United States Patent Application Publication US 2013/0096032 A1 - sequence listing, part 26

SEQ ID NO: 885 - DNA, 74282 bp, Arabidopsis thaliana
gaattctgacaacaacaacttaagaccatttattccgaacagaagatttgacaatccggaagagagcactggtgggaacaggtttgagatgactcagcagcgaaggactcgacggtctgagaccacagaagatggaggtgatgttattcgacggttcaagtttaatgaagaacaacagtcagtggtggtagccaacgacaacaacaacaaagagtcatgataacagataacgtaagagacttgtttgggttctttccaatagaatctctcttatgttagtttagatttgtttgttatgtttgttatcctaattttattttaggaagaggtaagaaaaatgccatggcgtcatctgttacgtttatgactgctggtatttttgttttcttttaaattttctcattttctttctacagagtttttagggttttctaggcttaatttgatgctgttttccttttctggaaatgatttctatatttgtagaaaatcaacaaaatgaaatcaatatctttttttcttaccatatttgtagctcaaatgaattttgtcaataaaaaatgagaaaaatagcaccaatcttgagatggtacaaggacaaacttatacgtacttcctacattactatatggttcttagcagcttttagatattttgttgctttggttttggagagtagaaaagtatttacgaaaagaaaggaaaaagacttgcggcactgtctacactgagaagaggtcataacctgcaagtaaggcccaaaataatagaaagagatagtaatgagctacgtggtatgaaacaaattcattcgaaggtacaaagcctcaaaataaaacacagtaaggaaccctttggcaaattaagccaacttgaaattttgtggggtttacaatataaatcaatatatatatatatatatatatatatatatatatatatatatagagagagagagagagtgagcactgagcagagtcaggtccatagtttagttatactaccatcttcacatgaacttaagaactttaactccaaatgcaattcctatgaaagttgcaatggcgatcccaaatattccggccagaatcccgggaactatcaacgagttccatccctttgccgtcgccattccagctgcggtcgtgggtcctccgacattagcatttgatgctagaagcagtaaccttagctcgatgtttagcagctttcctatgcccaatatcacagccagatgtgtcccaatttgaaccaatgcaaacaagaatatgctcggcgccgtgttgatcacactccatatgtttccgcttgcacccaccactgtgaagaacacctgaaagaaaactagcttgattaatatcaagaaggttgcatcgttcttgaatttcttgtctcatacctgcatcaaaattagagccatggcttctccagatggagcaagacgaccaaactgggacggaaagacagttgctaaaataacaacaaccgctgttatagccggtaagctaccacccgaaattccgaagtactttgttagcaaagccccagccttgcagatagctaatgacacagcaattccagtagctatcagtagcacaggaattttatttttagtttcagaagcttcgttcgtctctgcatctacaactgccataggagagtaatacctaagtcagagttcagaaactggctagaatcgacatgaaaaaggaatggaacagaacattttcctctggatatctaatccaatagaaatgactttctaactgaatatttacacaacctcaatgatcaattccaaaggaagccaaatcaaacgaaaccagacatcacagcaacattcagacttactagtagtcggtggcggtacagcttctgcaggtattttggagcccaaagcaaacaatgtcgtgaaatatacagcgcatataacattatcagcagccagtccagcagctaaaaccgatggtgtaactccaagagcatttgatatagctacgtagttgacggctggaaaaaaaataatcacaatgcaacttatacaccactatagaaataagtgaacaatattggcgcgtcaagaaaatggaagatacagatgcagatgttcaaagacatgaattttttgttacctccaccgatatgtcttcccatgagagcagctgcaatcttccaactatcagggccaagtgacttcattggcactaaatagtatgccagagctgtacccaccgttgtggcaactgttatgaaatagcaaaggctcaggtttttctgataattcaaagtcagaaatatcaagagcataaccataggaatagtgtgaatgttatgatccttatacctgatccaatcaaaaaggccaagagaagctttccagtggactgaaccacacgacgcaaatcagctctaaacaacaacagaggaacagctaatggaagcagaaaattcaacacaacagcaaaagcaggagcttgagaagaaatgatccctagattactagctgcaagaccaactagagtgctgactaacgcaccactcatagcggctccgacctttgtcttctccgacctatacaatcaatcccacaccatttccgatttcaaacttcacaattggtatcacacaaaatcaacttcacttaagaatcaacacaacgtaaaattcaaatctccgatcagataaagtaacgatcgaagttctataaagagtgatgatcgtaccagagaccgagagcaccagtagcgaagagagcagtccaagttccccattcatcgttgggagaaatgagaggcgtactcaacgaactcacagtaaccgatcggatcggagatgatgattccggcgacagaaacctgtcggttccgttacgaaattgcgacaacgaagcaggagagaagctaagccttgaagaggttgatttagctgagaattcaggtagatcttggcgtgaaacaatgtacgaacgccgacgaaatagtctcgacgacgacggtaacgagtttccgatcacattgagtaatggcaagctcgtcgccatttgtcgcgtctgcttcacgacgaggaaaaggtggaaaagggaagtgattagtggaattgactcagtgtgcctattagtgcgtcaacttttgctttccattacaaattttatatataacactgagccaaaccgaaatattaaatcaaaattggtttcgattaaaccggtaaaccaaatcaaatcaaaccaaaactgaaaaatggtcagagtcacagagtcacatagacccaaagttgtgtgtttgaaaaccgttttcttaaattttctgtttcttgggatcacgtttctcatcttcttccaaagctttgagtttgttcttaatggcagttactttttcgtctcggctcatttgtcctgagctgctcccgtttacaaatctggttctgtttccttctggtaatgatcttttggagtgatcatgagaggaatcttctagatgcttctcactagctagacgcaccactaaaggcctaccacaagctaatctcccatgcatcttctctttcgccaattcagcttcctgtatgctcactttagatgtagaaatcaggagattgctcaatcaaaatcaaaacatttttcatttcttgaaacaatttcatccaagtacaaatgcaaaaccaagagagccagattgttagttacctctttaaggctgtattgaatgaaagcataaccccgaggttctcctttctttggcccgcgtgtgtgccaaaggaagtcttctgatatgatcttcccatatggagaaaacatttttatcaacgaagccctgtgacgaagagaaacttataaggtattgagcaaagttttgatctatggtgtggaggtaatataacaagctgtgattcacttactcgtttattctaagatccaggtttccaacatataatctgttctcacctttttcatctacaaacccaccagtatcctgaagtatatatacaaaaatatttagaagatgacacaaattagtataaagaaagagtagtaaacaagatctgtcattgtaaaatgagttttgaatcgcgtgtttacaagtttgaacaagctagacaaaaattcaacttgaagaaattctttagagattgtagttaccatttagttgaagaaacaactagagtgaaaaaggtattgttccaagctcaagaacttaaaaaagaatgtatagtctgcaattctgcatccacctgaaaataacagctctcaagaattcagtaagagtacaaatgctttaaggccaatacaacaatcaaactattcttcaacactttagatgagaaagaatttaaaataaacactttcacataaggaccataaaccgaaaataatggcacacgagacatgaccaatctttgatcaaaagccacaaaagaaaggcataaatcaatctaacaatactccagttagttactactctctatatttgcttaaacactataaaaaaaaacagaggcttctccatgagaattgcagttgtttagtaagcacaaaagaagataaaccttaagctctctatctattgaacaagatctgtggtcaaatttattgtctgttctaagtgtgattgatgaacttagagtaactattccccgacatgaatcttaatcttacaataatcaattaagagaaacaccagaaacaattcaaaattggacagaaatccctaaattcatcgccaaaacctcatggatttcgttgagtggtggtaattactagctagtcaacctaggcacctacttcgattacaactgaacaacgatggagagaagaagcagagagttcatatgcaacttgggaactaataacagatgaaaaatgttgtaaagatttagagagtatccatggaaagcaacttacaaagctaaagcgtgatctcacagacgcagacttcaataaaaaaaaaaaagcaggagcagcagaatcggaatttatggctgtaaccagtaaaggactatccggttaaacgagaaaaccgaaccggtgattcggacaaaattagtcaattgtcattcatcaagttataaagccagctgactttattaaacgacgtcgcttcattttaaccaaataaaagcatctccatatttaccaattgaaataatacaaaatcaaaagtttgggatacatctgaagggtttttaccttttaaattttaacaacctctatgaaaatataaacatttgaaaaaaatgtgaaagtgtttgggatacatttgactctcaaaacttgacacagactctacactctcaaaacttgatacactcacaaaatttgacacacaaactcaagtgaatcttcacacgaccatagcctatatacttctacacaaaacagaacaacacttgcatgtacttgctatttatgcttccttgaactcttgcatctcgacatggacttcatccttttaaactctgaaatcgaatttaaattcatttagaacagaacacaaaccaatccatttgaacactaacacaaaccaattagaacagagcacaaccaaaccaatttagaacagaacacaaacaacttaagattcataacctaactgaacaaaaacaagtgaagaagcgttaaccgaaacaaaaaagactaactttcaagacataaaagacaccattcaagcatttgacaatatgtcagtgataagtttgttctttaaagccatttcaagatcactaagcggcgctgtttttcgaagtagagtctccaacaacgtcttcttgctaagcttctcgttcaattcaaattccttctgcttaatctcccacatgctcttaatcactgacagagtccttttagctttcgcggcctttgccgccttaacacctgatggacgagacattgcttcatctgaatggctaactgcctgggagcttgatgactgtgcagaagcttgagatccatcgctttcttcatctacaaacccaccagtatcctgcaaggtatatgtaaaagtatttagaagatgacacaaagtaacataaagacagaataacaaacaagatctgtcattctacagttggtttcaatcgcgtgtttacaagtttgatcctcaatagaaaaagctagacaaaaatcaacttgaaagagtttgaactgacatgaacaaaaattgcattagagattggtgttaccatttgattgcagaaacaactagagtgagaaaagtattgttccaagctcaagaacttaaaaaagaatgtatagtctgcaattctgcatccacctgaaaataacagctctcaagatttcagtaagagtacaaaataaacacttaatagtaatgtatcacataaggaccataaaaccgaaaataatggcatatgaccaattgttcatcaaaagctacaaaagaaatgcataaaccaatctaacaatactacagtaactcaatatttcctaatcactattaaaaaaacagaggcttctccacgagaattgcagttagctctctctattgaacaggatctgtagtcaaatttattgtctgttccaagtgtgatgaactcacaataatcaatagttcaaaacagctcaattaagaaaaacaccagaaacaagccaaaattgaacagaaaaccctaatcactagttagtcaacctagtcacctacttcgagcacatctcgacacacaactgaacaacgctggagagaagaagcagagagttcatatacttaggaactaataacagatgaagaatgttgtaaagatttagagagtatcaatggaaagcaacttacaaagctaaagcacgcagacttcaataaaaaaaagcaggagcaccagaatcagaatttatggctgtaactactaactagtaactagtaaatgtctatccggtttaacataaaaccgaaccggtgattggaacgtcaaaaattagtcactcaccaagtcagagaccacgtcgtttcattttagttaaatgattctcgcaacgtccgaatttttactttgaagtttgaagctattgctagtagcctagtagtattgaaaatgccagtgaattgagaaggattaaattaagtacaaccacaaaggaaacaaaaacacagatcgtatgagtctcacttcactaaaaagctaaagagagatgaaggatttgcacagtgtaagagacgaaaaagttgttttggttgtgtaaaataaaaaacagcacacaaacttttaataagttacaaatgcttgggaattatgatacagtcgtcatcttctgaacatcccattgaagacaattgcgtcaacgtcagtattctcagagatctgtagtgacgacacagcttgagtatcaaacaaatcagctgatattcccatgttgttgttgttgttatcccatccccttgcgaaaggctcatatgagactgacgaccagttactgtctcttgttctgttgttatcatgaaccgcgtagcttgagcaccgttggtgaggaaagaatctgtttattccaccactaaaaagattgattttggtagtatagtcccatggcttgaaacctgtttcttggtttagcgtgtttcggtatgagtcatcacaatcttcgccaagtaagacgtgcagagcaacagcctctgctatggcggcaccttcctcatccaatcgcctttgttcctcaagttttctaagcttcttcttctctagctcagccctgatggctgcagaagtagcgatggatttctcaatacgtctctttttcctctctgcttgtttgatacgctccagttcctctctctcctgcttcttctttgcagcatatgctgaatcttcttcaactgctgcgtctagctgtccttccttcttcatttgcttcttcttctctagctcagcgcggatcgctgcagtagtagcaatagctttctcaagacgtctctttttcttctcagcaatggcagcaccttcctcagccaatctcttttgttcctcaagttttctaagcttcttcttctctagctcagccatgatggctgcagaagtagcgatggatttctccagccgattctttttattctctgcttgtttgatacgctccagttcgtctctctcctgcttcttctttgcagcatctgctgaatcttcttcatctgctgcctctagctgtccttccttcttcatttgcttcttcttctctagctcagcccgaattgctgcagaagtagcaatagctttctcaagacgtctatttttcttctcagcttgtttaattgggtccactacaccttttacttttttcttcctggcttttctaacaattggctgagcttgtttgcacatcgagctactgctatccatgattgctacaagtctttgtttgccttgcttttgttaactggcttcttcttttagttggttgtttccttttactttgattctaccaaactcactacaccaaggcgcgatgatctcaatgactactacacccactcaggtatgtaggtatacctcattttacggacaatacaatcccaaacagaaacaacaggagataagagaagggagacgttgtaggagtttgcagagttatcctttgaaagcattcgtcctaatttccaacatcccttaacttctcccattttctacaaaagaaaacaatactagattagacttgcgttaacagggatctcaaaaataatataccaaaccaaaccaacccatctgctttcttaacctaatgaaagctgcacgaccacacagttctattttctatatggctatatgcaaaaacattaaacaagaaagctttttcacaaccagatgttacccagctgattacttaattactcactcaggttaccaacctataaacacaattgcacaagggacctagaagatacagtgattcaaaagaactaacactggtcaacaaaccaagataaatcaaccaaagttgaatgtacatactctcgatcaacattgaaacccaaattcggaaagctagccacaaactacacaaagtaatccacgaaacatggacataaaaagtcaatttgaaacaaatcataagccaaatttaacgaaattcatactgcgcacactaaatccgggacaaactgcgatcggatgaatcaacctataattatcattcagaaactaatgcatacaccaaaatcaaatcaaagcaaacacgaaacgagtaggtcgattcagagatcaaaacctaaggcaatcataaagtattacaaaatcgactcaaattggattgatctatggaaattgaagaagattgaatcgaagcaattatgaaaaggaattggatcctaacctcggcaaaatggcatagaagcagactacctcgactaacttctcctgagatttatcggatagaaagagagagagagagagagaccaaatcgcggacgtaaagttactacttcgatccagagagaataaacgcagagacgagagaaagaagattttgagaaagaagattttgagaaagaagagacactggagcggagcaattatgttatatttaatccaattagaaagtaacacgtggtggatgatgtgttgagtggaggttttcgattgggatttagggacctaaaacttgattagtcaatgatatatgtattggatccacatatatttttcagccgttagattcgacaagtattgccattaatatttgataatgaacggctgagattggatcttagagaaagcaacaagtgtatgaatgaactgtcaaaaatagaaaacctcgtgggccttttctgggctaaatcttttagattttgatagaaaatgtggatgggctttcatcgagctccagttccgcagcgctcttctctaatatatcttctccacggtaataatatgttaggtgggccatgtgttatcagaaaattattaaaattgtgattattattcgtaaatacattgcttaaaaagttagttagattttgattcgtttccaccagacgaatcttcgtaacgcattttcgttgattcactttccagctttatctcaaactctctctctgtcgtctcgatcgatctcccaaatctcaaattctgaattgattttttttgtttataaacaaagcaaacaaaacacataattttggttcggtcttcttcaattttcaccgacacaaacccgtcttttcctcttctctctcatttctatcaatttttctctacaattccccagtcgtcgaagaagctacaggtaaaccgatcttctcaattttcatctcttctcgtcgcattatgctcatacctcgccgcgagaggatatcaaaaagcgagatttgttatttttgcatccgagaattttggttatggattacacaaccgaattaatcgaaattctctttgttcgtgtttcccttgatcgccacgaaagtttcagatttttttttggatttcttaaccgaatttagtttaatcttgctcatgttctgtttcataccatgttctgaaatattgtttttttgaatcataccttttgaaactcatcgccaccagcttgcaatttgctcgtgttctcttccatcattcctttgttaagagcctcttcatggcttctacggttgattccaatttcttctcatccgtcccagctcttcacagtaacctcggacttttgtctcctgatcaggtttctatacttctgcactctgttatatgtttgtgtctggactagtgatccattcttttcttataattgtcttccatttcgtgatctggttttcgtggcagatcgaactggcgaagatcttattagaaaatggtcagagtcatctcttccaacaatggcctgaactcggtgttgatgataaagagaagctagcttttttcgatcaggttttttctttatgttttttttcttacatctcagtgttttgatgaatgaacgtagaaacaggacttaagacatcgttttggaatgaaaatgtttattagattgctcgcttaaattcaagctatcctggaggtttagcagcatacattaagactgcgaaagagcttctcgctgattcgaaagtagggaaaaacccatatgatggtttctctccttctgtaagtatcatcaaatcttctttttttgttggtatgaattcaaaagttcattgttttatgttgtctctgttggtttttaacaaaaggttcttgtggttcttgcaggtcccttcaggagaaaatctcacttttggtactgacaacttcatcgaaatggaaaaaagaggtgtcgtcgaagctaggaatgctgcttttgttctggttgctggtggtcttggcgagcgtcttggttacaatggaatcaaggtacatagtgaacaatgtttcatttacttaatcacttacccgtagatagaatagatagacctacaaacagatttgacccagttatgaatctatttcttaggtggcacttccaagggagacaactacagggacatgcttcttgcagcattacattgaatctatattggctcttcaagaagctagcaacaagatcgattctggtatgtttctaattttttaaatcaacgtaagtgaataagtactttttcacattcctcagtgattgtatatttctgcagatggaagtgagagagacattcctttcattattatgacatctgatgatactcattcacgtacactggacctgttagagttaaactcttattttggaatgaaacctactcaagtacatcttctaaaacaggtaaaggatcatctattgagtttcctagacagattttatgaaaacgtaaaatgttttgagaaataatgcactattggctaccttttttctaggaaaaagttgcatgtcttgatgataacgatgccagacttgcattagaccctcacaacaaatacagtatccaggtacttgtgttcatgttaacgttttcaaagctagtacaaatatttgcaggctgacctgtcgttttctttgctactcatagacaaaacctcatggacatggtgatgtacattcgcttctttattccagtggccttcttcataaatggtagttcatctatcatatatatcttttagttttataagtctgttgactataacaattttttttttgttgcaatttcaggcttgaggctggtttaaaatgggttttgtttttccaagatacaaatggacttctcttcaatgttagtagcagcgactcaactcttgtgtcttaaagtattcatacaatttttgatggaaattcacaattctttaatgacttcattggttcaggcaattccagcttctttgggtgtgagtgctaccaaacagtatcatgttaactctctcgctgttcctcgcaaggcgaaggaagctattggaggaattagtaaacttactcacgttgatggtaactttagtgaatagtagaaatccacacttgctcagtgacacttttcatattttccgtttgataatcgagtggatggatttaaatggtttccagggagatctatggtaatcaatgtggagtacaatcaacttgatcctctacttagagcatctggattccctgatggggatgttaattgtgagacgggcttctccccattcccgggaaatattaatcaagtgagtgttcttctactcgacgagacaagatttgtctctgatcaggaaaatttcaagactctaaatatttttcaatgcagttgattctggaacttggtccctacaaagacgagttgcaaaaaactggaggggccattaaagagtttgttaatccaaagtaattcttcttttctcctcccttgaatcttcagtgtttctcaaagtagatgctctgactttgacatctactttctggattatatgatagatacaaggatagcaccaaaacagcatttaaatcttcgactcgtctagagtgtatgatgcaagattatccaaagacattgcctcctacggcacgagttggattcacggtaattgttatctgtagaatataacagtactttccttatgcatgcttgttgtgacagtaattcttcatgtaggtgatggatatatggcttgcttatgcacccgtaaagaataaccctgaagatgctgctaaggtaaaatacttaataaacagagacaataactgatcaagaaggttcatgtcttaaactgtaacctgaatttgagaggaataccaaatatgaatgatggtgcttcctttctgactaatataatacgttttcccctatccactgaaggtaccaaagggaaacccatatcatagtgctacttctggagaaatggcgatttatcgtgctaacagcctcattcttcaaaaggtaattagtactctccagagaaacttgattctaaataaatcggttcgaatcagacaattctttccatgattatctaagcgacatctattttctatggttttacgaattctttaggctggtgtcaaagtggaagagcctgtgaagcaagtcttgaatggccaagaggttgaagtatggtctcgtatcacatggaaacccaaatggggaatgatcttctctgatatcaaaaagaaagtcagcgggaactgcgaggtctctcagagatccacaatggcaatcaagggtcgtaatgtatttatcaaagatctctccttggacggtgctcttattgtagattccattgatgatgcagaggtatgtgatgtgtatttgaaagctatcatattccattgttatctctttgattatcatcatattaacattgtgaaaacaggtaaaacttggaggtttgataaagaacaatggttggaccatggagagtgtagattacaaggacacatcggttccagaagaaataagaatcagaggttttagattcaacaaagtggagcaactcgaaaagaagttaactcaacctggcaaattttctgttgaagattgaagttatctttgcacatttatgtgacacttttttaaaaagtgttatttggcaatatgatcaattagcaaattagctatttttttaagagaatgccaaatgatccattaatttgtccttctaatggagagcttaattctttctttcgttttgtttccaacgaaacacttccttttctttgtttttcaacaaaacccgaatatattgtttctttatgtttttctaaatctttattagcctgactctttcttctacgtcattttttatatatactaaaagaaagactagtcccaaaatgtattacaaaaacatcaaagaagtaaaattgggtttgtagcaattaagaggtagaagaacccttgttgtataatttgattctccggcttatctctttctccaactcttcttttcctcccacttcttctacttcctgcaccattctcaaaatccaatccaaaccatatgcaaacaaaaaataaaaatcaattcacgtgttaaacaaaaataacatgcaaattatcaattgatatctcatatgtttatttttgaaaagggttatatattcttgcctttggtccaagaaacagcccatatggtacacctttgaatttgtctgtgtggtgtagctaaaaagataaagccataatcgttagcaaaattttgtaaatcaataataactatatggaatgaagaacgttaagagcgttggttaacgatggtattaaaacctggtgagcggcggcgacctttcgaaggtaaggaacgttggcaatgggacctacagggaatctcttgtgcacaagtccatcgtgaacgaacatgtaagccattccaaacatcgttattcccagtccctggtgatattacaaaccagtcagcacaaaaaacaagaaacagatagtactcgtatagtggtttcattagtctaagtacacccaatctttcatgtttggacgggtactagatgataggtctcacccaactcacacgttcacactctttgtgggacggtgaaaagaaaaaaaaaaaccacaaaaaattttcatactttcggtttccgtgactttatttaaagaagtcaaataccaatttactattgcttctctctttatagaaaaacaaaagacttttgatcttttctttataagtttcggatattgtcgaaagagagaaaaaagacttacggcaccgaagcagagaccaggaacaagtcctttattcaagaatccataatagagtagaccaatcgcaggaaccgcgtttgttatagcaaacacatcgtttaactcaaacgctccttctcttggtttgtgatgtgactgccacaaaccaataaccggctatgaatattcttaatttgttagcagtaaaccggaaaagaaaaaccagaataatgagaaaaaatgaaatacctcatgcatgttccataaagaatcatgccaaagagctctatgagcccatcttgcccaaaactccatcccaacctaaaattcaaatatacgaaaatataaatgaatcggaataagcatggacattggctttttacggtttaacttgttctggttattgaacttcgtttttttcggatgttagaaaataggctgaaaacaaatgtattttgataagtctagttaaaaataaaatttcttatgaatttgtggtttaattctgtttgtttgcatagaattttatttagtttgagttataaataaaatttggttcggaattagattgacatatttcggtttggtttggattttcccaccccaaaatgggaatataatgtaggaatgaaacttacggcagcaccaacggaaagagcaaatgtaccaaacatctctaacacagacacttcacctccctaaaaaaaatcaaatttttcacttttggaaattaggacaaatagtattgaattttcgttatttatttatttattataatttaccttcatttgccaagaaaatcggtaataaacagccattatagccatagaagtgataccaaagctcgacatcacagctgctattaaataagtgaacctctctgatttcttcttctccgctttcttgagaagccgcgacgtcatcaagatctcagaagagcttgtcgtgctttctggtttgttgtcatcgtccatgggagagctttgtttccgttcttccacgacgaaacaaacggtgagaatctttcgacgtcggaagccgttgaatcttagagatggagggaaaactgcggtggatatagggtggtttgcggagaaagaagagcggttgagtggtttgagtgttacggcgattgttgatagtcctgctgccatggaaggagttcgttgaggttttatgaaactttaacgaaagagagttatagagacaaatataaagagaaacacaaggagactattgtgtggtaaagctttgcagagagaagagctaaatggagagaggccacatttttattttcttttacaaacaaattatataaaaactataccattttgttttttttatatgttgagtcaattacaataatattgttaatgtttataataagaaaaacatttcgcaaaagcaagcatataaacaaatacaaaaagtgagtttattagaatttgaggtaaggagaggtgatggcctgatgggccattttctaggattttcccaagtcatcgacagcgaatcactccacttctatttaatggctccacgtggcctcttcttccaccgaataggcaagaggagtatcaccaacttccacatgtccaatccttatttgttcatattgtttcatcagatgacactcttcaaaggtaaatgaggtattgcttgacatgaagcttctagttctcgttctaaacttgtgcgacttaaaaaggatctcaagtatacaactacaggtggtttaatttacacaagttgtttccatgcattttcaaaacagatttcagcttgatttgtagttttgacaagttactaacaaaacaaaatagcaaaagttatgactgaaatatatgaatgtgactatgtgagtgatcagagcccagaaaagttactaaaaagccgcagcataaactaattgtttaaagttacagatcaatttgctttggttttaactaaaaggaaatattaatttgctctgtttgattagtatgttactcaactaaaaatatgcatttctgataaattctggttaatgtggttctgttacaccaaattcgcattttactactatagtaaagaaacttatttcgtattattcggattattataaagttgactaaattcgattcgattacaacttggttcggttcggttcggttacaacgccgacctgtaattaaaacctttttaactgcaaaattaatgaagatacacacacgtaatcgaatattctcaacgacgcgtaagcttcctctctaattacttacttcgtctccagggtaatctgatctctctcatcacctctctcttctcctgaaatcaccatgagtatggaagcaacggagctacaagatctctctgacgacgccgattacgccgcttctcaacaacaagtttgttattctgactttgtccttcttctcgtgctttctcaattttgattcaacaattcgatcgtaattttccgataataaatcttcgccaatgcgaatttgaatccattatctatttgacttgatcgtttgattgtgttgctatggctcttgattttgttagggatcggctagtatgatgcgtagcgatagcggaaagagaagtttacaaagtgaacacgaagacgctgtattgatttatttgaaagataacgttgcaattcatcctacacagttcgcatctgagaggattagtggtagattgaagttgactaagcaagactctgttctctttctggtaatcaatcactgaaattgattgtttgtttgtattagttttgtattcattcacttacttgtttccattttttgatatatgatggctagtcgtggattccgtacaagggacaaacatcaaatgcaaagctatcagagaaaggtatttaggattccttgaactgaattagtatatgttagtattgaagattaatgctttacctttgttcttagtttctatatcttttctagacaggagtctttataccatcaccgcggttccgtttactgaagtgaggtccattaggagacacactcctgctctcggatggcagtatgtaattgttgtcctgtcttctggtaagcaaaacttttggctgttgctttttgtgagatatatataatgaattactatacgggagggggtttcccttttccttctcgacaagtcgaatgattcagacttaatggtttaaaatgacctgcaggacttgcatttccacctctgtacttctacaatggaggagtcagggagtttctggccatggtgaagcagcatgtttttcttgcaaggtttgtgtctgatatgagatagttttttgttctgtattgatattcttatttataacctgtctttatagtctgtttcggttactgtatgaaagtagcttaggaatgcacagtgtcaatgtattgacaggcttttatagcacttgttacttactcattagagaggtctaacatgaaaacttttggttcacccgagtttattatcgtatggaactgggtggctcgttacatagttatgtcacaaagaaaatattcagaattcatagtcttacatgatactagctttttataggtcgtcagaagatcaaaatgtgttcattgtgaatgattttcagagtcccttgcaggtaatcatatcagatcatctcatgttgggtgcagtgatgatttttttttaattctcttattggctaatacattttatcataatatccgatagagaactttgtcttcattggagctgccaagttcactgcctgtagcaagtggacaatccgtatacccattagacggaggttcttctagtgaaaatcaaaggagaacaagttcagatgttggtaatagagtatctagtgtttcccagtctggcttcagaaagcaaaagagtcatgatccaactcgggatctttcaatccatctactagagaagttttctctggttaccaaatttgctcgagatacaactactcagctgttttcggaaaacaatggctttggttccattgacaagagatggaataaccaacccgtacatagttatcctgaaaagttgtcgaacattgctgaggaaaagcatcatgaaatccgtcatagttattctgaaaatgaccttctcaaggatgacgaaatttcttatattgatgtccctgctgatcccttagaggtaacgatcattttttttgttataagcattaccatgttggtggaaactatattggtatattgtgaaccatcctgtgtacgcaacatctagtttttttcgtctcgtggatagattgtcatttattctaaagcacagggtgaaatttttatattacctattgactaaattccatacatcatagatttttttccttgtgtctgattcattctagatccccaattgacaattaccatgaccttggtactctagttatcctactgggcataattcgagtgcttatatgggtggacttatgcatgcatttcagttgtgcttgtactttcaattagttggaacactaccttagatactagtgactattgaattacagcacttttgcttgttcttgttaaagtttgttggaaacacagcgctgaaagttctttttatatattcaagggcaatcactttgtagactaagcaagttaagcattgattaaaacgatcagctttagttaataatcacttctgcaatatatatgaatgattcaccttgtataagtaagataaacatttacggatggaatgctttctatgctaccaaacacaactggccacttgttacgacaagtacatatagagtatgatacttatgaattttttgaagattatgccatttaattcgtcctattttgcagtttgataaattaagtttgatgtggggaaaaccaaggcaaccaccaatggggcataaagaggtaagcccttccgaatattgcaatttttcaaagtctggaaagtttagagaggaagctttcttgggtgctgtgttttttttcttaatactaaattttagagaagaaatgatatatcaccaagcattaagtgtagaatatcgacagagtatgtgcaacctggtagagaatatggtttgcttcttcgtatgctataagcctctgtttaaattcaaacttttgctggttcttagttcacagcattgttggattctgaagggcgagttgtggaatcaaaagctcttcgggagagagttttctatggaggcattgagcaccagttgcgtagagaggttaactttatatttcatatgaaattttaacttaaaattaggcttgcgtgattatatgcagattaattttggaacttgggatcatcattgtaggtatggccctttctcttgggatattatgcatatgactcgacatatgcagagagagaatatcttcgatctgtcaaacggatggaatatgcaacattgaaacagcagtggcaggttcattcatcatcatttctagattctttaattggctatgtagttcttttgcccaatgatgcctgagctatttacataaaattttgaggcgttcctagagtagtttatttccctcatgtagatgcacttttaactagtatattttttttggcagagcatttcccctgaacaagcaaaaaggttcacaaaatatcgggagagaaaaggattgatagataaagatgtggtaagaagagtttgagaattgtgatatatgtggtgtgccttattcaccgaattcctgttgagttattatattcctggtttcttcttgtgtaggtaagaactgatagggcatttgaatactatgaaggggatgacaatctacatgtcaatagcatgcgtgatattctgttgacctactccttctacaattttgacctgggttactgccaggtactcatcagttttcaaagttcattcttagcactgaattacaagttggcgttgtccttactgttatgaatccatattttgggtcggttgccccacttagcgtacaaaacagaactgctggacactcttctatttctggcttttgctttgaatttttccattgtgtttaactgacaaatgtttttttatctggttgttagggaatgagtgattatctgtctcctatcttgttcgtgatggaggatgaatcagaatctttttggtgtttcgtggcactgatggaacgacttggacccaactttaaccgtgaccagaatgggatgcatactcagctctttgcactctcaaaggtctataattttttttcttcgagaacccctctacaatttacattttgcatttcttcctttctatcagcattcggcatcaatgttgggggatctgaacctgaagcatttctttttcattttcactgtcacacagctggtagagttgctcgatagcccgctacataattactttaaggagaatgactgcttgaattacttcttctgtttccgctggattctgattcagtttaaaaggtttgtttcttcttttctgcctctttttcgttattggttagatgtttgtaccacaacatcattttgggatggacaaaattactgctaccctaccaaaaattgggatatcatctgtgattagttaaccagtttacctacccattttgcagtacttggctcgaaacccttccaatgtctgacatatctaaagaaaatatactgtctaaaatacctgaaatacgttccatagcactttgaatgtgaatgacgagaattcccaatattattttcttaatttcaagatttttttttgtttcttttaagtttttactgtgttgtatttgattctggtgacattgtgttttagggaatttgagtatgagaagacaatgcagctgtgggaggtgatgtggacccactacctctcggaacattttcacctatatgtttgtgtggcggtcttgaagcgatgccgcagcaagataatgggagaacagatggattttgacactctcttaaagttcatcaatgagctgtctgggcatattgatctcgattcaacagtcagagatgccgaagcactttgcatagaagctggtgaaaatggtgctgctagcattcctccaggaacccctccttctctaccccttgatgacggtaccttatatcctcaggaagatgatgttttgtaagtaatacgacttttcttttttcttctggacatgttaccaaaatttggattgcttttactagaaatcccatacaatgattaaggcaaaggacataagctttttttctttttcccacttaataattactctggttcgcaaatcgctagggataagtattctgctgcattgtgctgcagttgcataaggtaagaatacgatcctcagcgaattaggacttgtcacaatttaggattaattcttgcgtaggctacgtaactcgatgtaaattgtataagtaaagcaataataacataatgactcgaaaagtctatgcaagaatttatccttcgagataaatccaggaaagtcctaaagcagaggaaagaaatcggtaaaggaaaaacatgggtcaaacacgagagtgttgtctgggtagtgggaaataagtggcaagggagatcctacgtggacgtcatagccaaagtggttggtctcctccatccaggtattgctctcctcttctcctccttctccatggcttcttctcagttctgtagacataactggcttatccgtgaaaggagtggcgccgacgattgattcaggtgcattctgtcttcgggaattaggtttcttgttcaaatgagtattccagtagttcttcacttcattgtcagtacgacctggaaggcgaccagcgatcaacgaccatctgatggaaaagaataagaagttagtatcggtaaacttatgagagggatgatcagtggtgaaagaggaaagacctgtttccaagaagcttatgcatgcggatgataaggtcttgttcttgtggtgacatgcttcctcttttgatatttggtcttagatagttcttccatctcagcctacagctttttcctcctctcttcaaccctgaaaaaaacatcatgcagaaacacaaattctttaatgtcccaaaatcccatctcccctttactagtaaacacaaaaatttggaaatcgaaccggatctacgagaaatgtctgcccagtttccttcaccatgagtctcaacatagctttttaatatcatatcttcttctggtttccacaaccctctcttcacgtaagacttcccttcttctcttttgcattccatcttttattttttcttccacagttttgcaagtgagtgaggctgtttattaactatatacacaaaaagtttgaggtttccaactttaactcttacatgtggggactatctactaaaattattgaagagaaaaagagaacagtggtttgcacttttccgacagtaacactactgtaaattcgtgcaaactagagctgtaaaagctctattcccttgtttttatcctcaacattgtcacaaattattggcttttaaggcaaacatataagcacgggagatcagaggttgaagattgccatcaacctcgatacatgcgttagtccattgcattgcagatacagtttgtgcgtttacagttgttgcgtttcaaatattctttctcgctcaaaatgcttttccaatagtcaagactagtgtataagggataacaaatcaatatctaaaaaatctaagaacgaaaagagaggtatatgtctaatatacatatttgagtgatatatgcatctacgtcctagctagttcttagttttcagattttaatattatggaatttggtaacttacatttaaaaagaaaacacgattcaacttattttcttttttaatatgatatcataagatacaccacgattaaaatctgaaaattccatataggtcaataactttcgaaaaacattatagtaccaaaagataattattacaacaagaaaccatctttttattttgtgtaacttttgtttggctcacaaagggcattcaaattttagtacacaatgacatgcctagatctcattgatgtaccttcctataaaaaatgaagactgaacaaaatatgtggtatcatattcgattcattatatccactttgatccgatccaaaaatctgtataatcgtaaatttgcggagcaaaacaaataataaaatttaatatgtgccaaatgtgaaacatataacaaaaactaaaataccaaattggaatctttgaatatttcttagtaaaatgtagattacttttagtaggagtttactctgtcgtatcaaacagcaactcatgcctctagttttgtttgctatcatcatcattgttattgtctttcatataaaataatagcattatgactactttctgactgataaaacttcataattgcgtaatcattttcaaacaatgtagttagatctttattaattttcgaacaatttatctttgtgttatacgtatgacccttattaattttacatgatgcatattaaccggaacaattgcaatgacatatatgtttatgttcaaaaagtttgcaaaaacctcctgtttcgcacccttcaatacaaaatttccagcatttcccatccttctcagcatcatcatcgatgcctggaagacaccttccaacactcggatgttctttacaacatatcgatttgtcttcaaatatccagggtgcgatgtgtttttgtccatctatttgaatggatcctacatttaatcaaaaataatattacatgaattaattttccaacataaaaacttcggaaaaaaaggttaacgctttagtgctaaatacaaaaaaaacatagtatacataatacaatagcagcaaataaaacaaaagagacaacatttgttctaaccattcttctcttttttctttgttaaatcaaaatattaagaattttttgatatttttgtatttgaatgagaatgaagaaggagttgtttcgtatttataattagaattctaactatattcaagggatccttcgaattaacattatctcacataataaatttgtaaggaatacaatatatttggtcaaccaaattaaaaacatgtttccaaaaagattggatattccaactttgactacattattacaagacatacatgacttatttagataaacgtttttggtagtttgcaaggtaatgcagactaatattttctgtgggtttattctgtcaagagatatgattagagactcattcatttctcaatattccaattcactagtttaggaaattaatataatcttgaggctcacgcctattacttgtatataaacaagctctgtatctctttgtgaaatacatcaaacatacatcttctacatatccgttgtcgtaatattcttgtttgaactctaaaccaaaacttagatcggtttggtttactcgccggttgttgcgctctatgacgaacttttatataaactcgtttactcgccgttattacaacttacaacttctgctcatattatttaatactcatgcggtgaagaagaaacaagacgaggagatgagcatatattattattacattaaaattattacaaaggattcacttggacaagactgaccaacatttatatttaaaaaaaagaactgacaaacattatacgaaagaagaatccattaactcatgtgatcatgcaagatcatcactcttcttgttcttattacaataacataatactttcaacgtaatccgtgaaagtaagcactaaagatgatcgatctgagcatctgatccctccgagccaaacttcccttgaacgtttcatcttgagatcaacatagacaagataaatctgataaaatcgatcatgagctgtaactataagctcatcactaccagcaacaaaacccaccgcacctagccaaacaagatcatacgaaaacatctctcgagttaaaacgatagaaaccttagaccattcttgtttcccggcatcttccaaaacccataaatcatacatgctcatactttttgcagcaagtaaagctagtttcccttgatagttcacaagtttagagtaaccaaagttcatatcataaacattactagccccgaccggtatttcaatgaaatcaccaaacttttcagtagccacgtagaatctaacaagcctcagtccatgcgccgtctgagcaccgtaatacacaaccccatcgatgcatattcctctggttgagggagaaggaatattctcaacctcgatcattttccatgaaccttgaccttccaatgtaaacacttccagtttatagggagataataaatattgttttgagaaaaacaaaaccttgtattgataattgataggatcatatcccatataccatttcctgaacttttgatgtggagcggattggggcacgagtacacccttacgcgtggcaggattggatatccacagttgagacatgtattcgacacatatcaagccattgacacaatcaggcgtatgagaagaattattggcgctgcatgtcgccttggtaaccaaagaaggttgggatgacgagaagaaatgccaacgacaagatgtgaatatatcacgtaaagcaaacatgacatatggctgacgagtagaggatcgagattggtataagttgatgaaatatcgactgcggatgattgtggcccaaagcttgcacacacataggcatctagctaggggtttcacaggcaatcttaagagaatttcgaccaaaaggtcttcagaaatcatacttgataagaaaaaagtttagtattttttttttttttctgtttgataagatagataatctataaatcaagattctatcttatatatacaaatgcaatgggagagtaatttgcttagtcattaatatataagattgacttgactacatttttttaaaaatgtatattaattaaattcgtatctaaatgattaagtcaatacaattaataaccgcgactagctttttgtatattactccctcggattcattttgtaagactagaaatgcgtggttttaatactacactatattattttgaaaaattattttatttacaatttctgtacttaaaaaatataaatggaaatgaataagtggataatcatctaaaattattttaattttgaaattttgtttaaaataaaatatcgactgtcgatctggtgaaacagagcttggactgtcttattgtgtagtccggttgttgcgctctatctctctccaaagaaacaaaaaacggtgggttggacttaataatccaagcaattaagcttgttgttcaaattttaatcaccacctttctcaaaagagagtgttaagcctttgacgaagtatgaatcgttaatttgcacaagagtaaagaattatatgcgtgtcaaagttttagtgtttgagaatgattataagctgtcttgatactcagttaatcatcatatatataaacaagaagagtgagttcacaagtgtagattttatattatacttatttttggtcaaaaccaaagtgtagatttttttttttgaagttggggacaaagagacggatgtcgtttcgggtataaacctataatttcttagaaacgagaacacaaaattgatagagagatcttaaaaaaaccttatagactataatatcatttccaaagagaagttttatgaaaatgcatttgatggaaggatataaaacattatcatgtgttcaagtaaaatagagaagaaaacctgggaaaacaaattgccaacaaatgatgaagctcacaacaaaacttgtctgatgaaaagtcacatttccaagtaaactacctagactatgagttatataaacttgacatcttctgcatagtcaacaaaggtgtaaactctactactaagattcttctctgacccttcaaaaccttggatttcaactttttccagagtgtttctttcggggttgaagtagtaaacaaagaaggattccgatgtataatccatggataaaataatttcaccagtagcagtcactccaacaacggaaacattgccgtgaacgatattcaccggcaaagtgtattcacgtttcaaccattcttctttctcggcatcttctagaacccacaaccacaacataagtaccttccaccgaagcggctttggataaatttgattatcccataaacaactaagcacgcataatttacccttgtaattaatcagtttagcaagcgcaggacaaaaggttacgtcaacatccgcattaagaaacttaagtgtttcataccttacattaaaggaagctatcttcacaccactgaactggaatttgttgctagccatgtaatacaacaccccattgatgcatatcccttcactttcaggataatggtctacgagacatcggatactcctccatgctacttttccagttcctaatgtcagaatattttctggatcaaaatgtgaactgcttggtgtgattaccttgtattttttgccaatcggatcataccctaataagctgctcaaattgttcatactactcctttgagttaatcttgcgtattgtcccgtgctagggttacatatcaccggcacttcgcctgtacgcgtattagggaaatagagcaaaccagagacaaggccaaaaatctcttgtcccatgtctctacgtaactccatatgaaaatcggctgatactacaagagaatgattctcatctggaaactgagactgaggcgacgagtacaagcaccacttatcagaattttgaaccgcgaataagagacgtggacgactcaagggcctagtaattaggaacaactcaatgaaatcttgacctcttagtatagatccacagaacttggatgcgagaccaaacttagcgattgaattagtagacaatctcgagagtatatcgagaatgatatcaatcgggattggatctgattttccttctctttccatcgtacgtttttcaaagatcgtgtattttggattttggttccagttccagttccagttccagttccagacttaacgtagacgacaacctagggttcaaaggcaattcattcatacctaatgggccgaatgaattcatgggccatgttagaggcaactaaaaggctggacgaaactatctattttagccttttaggggaggtaacgtattaatgtccccaactatcttttataggatgcatagttggttttaactaacattaaaggtgttactaacaatgggcaatgatggtaaaattataacgcagtggacacaatataacttagccataccaatgcaaagaatcttgaaactagtattaaactcagtcacgtatatgctctccagtctatgcttcgaagagctttcttctaatcccatacgaagaagctctctatgtttttctaatttaatcaggcttagacaactagtttcaaagtcataattcttggtgtctgagttgtcttccctttccatcgagttttttaaagatcgtgtcttttggtttccagttccagactacgtaggcgacacttcagggtttcaaaggcaatggcactaaaagtcactaatgggcctaacgacttaatgggccttgtgaaacgttacccaataagagacctggtttctcactgagttcaaccatcttcttccccatggctctgaattcttcagctttcttcgttccatgtcacaattacaatcaaatctgtgatcttcttctttcttcagctcgaaccagatcaactattaaaggacttcagcttcatggctatgtcgttaaatcaggcctttctcttatccctctcgtcgctaacaacctcattaatttctactccaaatcacagcttccgtttgattctcgtcgagcttttgaagatagcccacaaaaaagttcgacgacttggagttcaatcatctcttgttttgcccagaacgagcttccatggatgtcactcgagtttcttaaaaaaatgatggcgggaaaccttagacctgatgatcatgttcttccatcagctacaaagtcgtgtgcgattttgagtcgttgtgatattggtagatcagttcattgtctatcgatgaagactgggtatgatgctgatgtgtttgtggggagttctttggttgatatgtatgcgaaatgtggagaaattgtttatgcgaggaagatgttcgacgaaatgcctcagagaaatgttgttacttggagtgggatgatgtatgggtatgcacaaatgggtgaaaatgaggaagctttgtggttgtttaaagaagctttgtttgagaatctcgctgttaatgattactcgttttcgagtgttattagtgtttgtgcaaattcgactctacttgagttaggtagacagattcatggattgagtattaagtctagctttgattcttctagctttgtgggaagttctttagtctcgttgtattcaaagtgtggtgttcctgaaggagcttatcaagtttttaacgaggtgcctgtgaagaatctcgggatttggaacgctatgctcaaggcgtatgcgcaacattcacatactcaaaaggttattgaattgttcaaaaggatgaagctttctggaatgaaaccaaatttcataacttttttgaatgtgctcaatgcttgtagtcacgcgggtctagttgatgaagggagatactactttgatcagatgaaagaatcgaggattgagccgacggataagcattacgcttccttggtggatatgttaggacgagctggtagattacaagaagcacttgaagttatcactaatatgccgattgatcccacggaatctgtatggggagctttattaacgagttgtacagtccacaagaacacagagcttgcagcatttgcagcagacaaggtcttcgaattaggaccagtgagttccggtatgcacatttcgttatccaatgcttatgcagccgatggtagattcgaagacgcagctaaagctagaaaattgcttcgagaccgaggggaaaagaaggaaacagggctaagttgggttgaagaaaggaacaaggttcatacatttgcagctggagaaagacgtcatgagaaaagcaaggagatatatgagaagctggctgagttaggggaagagatggagaaagcgggttacattgcagacacaagctatgttctgagagaagtggatggtgacgagaagaatcaaaccataaggtatcatagtgagagattagctattgcttttggactgatcacgtttccagctgatagaccgatccgagtaatgaagaatctgcgtgtttgcggtgattgccataacgcgatcaagttcatgtccgtatgtacgagacgagtgatcattgtgagagataataatcggtttcatcggtttgaagatggcaagtgttcttgtaatgactattggtgaagaagacaaatgagagttggtttatatttaaccataatttcattcagttcacactgaaccggcgaaatttctttgccagacctattcggaattgaaacaagtggagtctcgaaacgaaaagaactttctggaattcgtttgctcacaaagctaaaaacggttgatttcatcgaaatacggcgtcgttttcaaagaacaatccagaaatcactggttttcctttatttcaaaagaagagactagaactttatttctcctctataaaatcactttgttttttcctctcttcttcataaatcaacaaaacaatcacaaatctctcgaaacgctctcgaagttccaaattttctcttagcattctctttcgtttctcgtttgcgttgaatcaaagttcgttgcgatggcggatgttcagatggctgatgcagagacttttgctttccaagctgagattaaccagcttcttagcttgatcatcaacacgttctacagcaacaaagaaatcttcctccgtgagctcatcagtaactcttctgatgtaagtttcccttcaaatctctctctgctcggtgtgactcgtccgcttcctattttcttgcatgttgtttgttctttaattcctggattcgttgatagcgttggattcgtaggtttagcgttgtgattgcttattcaaataaatcgtgatttggcttgtgcatcacgttaagtttagaattcttagcttgtgctcgatcttcatgtgttgtagttacatatatagaacggttcttgcttcgatgtagtctttgatttaccctagaggattgaggaaagcttctgattatctttgtttatatgaatggttttgtaggctcttgacaagatccgatttgagagcttaacggataagagcaagctcgatggacagcctgaactcttcattagattggttcctgacaagtctaataagacgctctcaattattgacagtggtattggcatgaccaaagcaggtaacgaatcaatgcctaataatctctcgttggtgagatgttttagtgtatgtgctgtggttatgactctctattattttttcagatttggtgaacaacttgggaaccattgcgaggtctggaacaaaagagtttatggaggcgcttcaagctggagctgatgtaagcatgataggacaatttggtgttggtttctactctgcttatcttgttgcagagaaggttgttgtcactacaaagcacaatgatgatgaacaatacgtttgggagtctcaagctggtggttccttcactgtcactagggatgtggatggggaaccacttggtagaggaactaagatcaccctcttccttaaggacgatcaggtaaggaatcgtagctttgagtgttttggggattgtttcttttcttttggtgttttctgtgttcttacaagtgtgtttattcatgcagcttgaatacttggaggagaggagactcaaagacttggtgaagaagcactctgagttcatcagttaccctatctacctttggaccgagaaaaccaccgagaaggagatcagtgacgatgaggatgaagatgaaccaaagaaagaaaacgaaggtgaggttgaagaagttgatgaggagaaggagaaagatggtaaaaagaagaagaaaatcaaggaagtctctcacgagtgggaactcatcaacaagcagaaaccgatctggttgaggaagccagaagagatcactaaggaagagtatgctgctttctacaagagcttgaccaatgactgggaagatcacttagccgtgaaacacttctcagtggagggtcagctagaattcaaggccattctctttgtaccaaagagagctccgtttgatctctttgacacgaggaagaagttgaacaacatcaagctttatgtcaggagggtgttcattatggacaactgtgaagagctaatcccagagtacctcagctttgtgaaaggtgttgttgactctgatgacttgccactcaacatctctcgtgagacgcttcaacagaacaagatccttaaggtgatcaggaagaatctagtgaagaagtgcattgagatgttcaacgagattgctgagaacaaagaggactacaccaaattctatgaggctttctccaagaatctcaaattgggtatccatgaagacagtcagaacaggggaaagattgctgatcttctacggtaccactccacaaagagtggtgatgaaatgacgagcttcaaagattacgtcacaaggatgaaggaaggtcaaaaggacattttctacatcactggtgaaagcaaaaaggcggtggagaattctcccttcttggagaggctgaagaagagaggatacgaggtactttacatggtggatgcgattgacgaatacgctgttggacaattgaaggagtatgacggtaagaaacttgtttctgcgactaaagaaggcctcaaacttgaagatgagaccgaagaagagaagaaaaagagggaagagaagaagaagtccttcgagaatctgtgcaagacgattaaggaaattctcggggacaaggttgagaaggttgtggtctcagacaggattgtggactctccctgctgtctagtaactggtgaatatggatggactgcaaatatggagaggattatgaaggcacaggcgttgagagatagcagcatgagtggttacatgtcgagcaagaaaacaatggagatcaaccccgacaacggtataatggaggagctcaggaagagagctgaagcagacaagaatgacaagtctgttaaagatcttgtcatgttgctgtatgagacagctttgttgacgtctggattcagtcttgatgaaccgaacacttttgctgctaggattcacaggatgttgaagttgggtctgagtattgatgaggatgagaacgttgaggaagatggtgatatgcctgagttggaggaggacgctgctgaagagagcaagatggaggaagtcgactaagagatgaagaaattgctcttatggttctgaaaacttctaatatgtcgagttgttctgagttttaagattttccaaaatgtctttgtctttttttttatatctttagagttacttgaacattgtgactacttctagggttgggtttgtgtcaggtctgttatatcgtgtggtgggtctgtctaatactgattcaagtttttgttattcagctaaggaacttttcttgtttctgaacaaatcttttggttccctagagtaaaacttgacttccaaaagatagacttcctaagatcactggaatagataggagtgacaacttgacgtgaaaggtagcttggctatagtaattttagatctgacaaaacgagatcaagaagttaataattttcacaacaccaatttgttatcgcttaaaggttgattgatttgttcaatagggggaatcatattctcgcatgctcgaaaaggggagagaagatggaatgaacataactttaaatcggatgtttgattcaacaacaaaactaaactcagatagagattatgaaggattccggaatctgaattacaaaagcaaaatttaaagctgaaaactcctccatggtcttactgtcacctaaagacatttctttttcaaggcaaacctgaaccagatggtgcagctgcgctgtagccaccagcaccacggccaaaaccacggccacttccctgataaacaagaaaggatgttagaacaatggcaaccaaacaaagagaaggcgggtaaatcaaatcacaaggcaattatataactatagactttgaaacacttcacagctaaagtaaaagatttatgttccttgtaactaaagtgataaagagagactaaatatgttcatggtttctcaggttcaggagctctatgataaagacttcaagagtagcacattatatgacgttggtgagatagagaagtaaatagaaggtatggtcagtgagaatttacttggaaagatggctggtaatctgcgggagctccacccttttcacctccaaactcaccaccagctcgaggacctgcacggtacccatcacggtcaccaaacctgggacggtctcctccttcatggcgaggtcctctgaaatacaaagaaacccaaaccatgtcaaacaaattaaaaaaaaaaaaagtttttgccagacatgaaatgggttaagcaaagagttaatcaccttgagcgatcaccaggtgggccaccaaatggacgaccaccaggcttagctgacttcttcaaagtagcaggaacaacatcagatggaagattaagataagttctcaagaactcgatcccttcattggtcaaaaaccaatagtaatgcatccaggcaaatgtctccctaacatactccttggatttgaaactctgcataagcttaatcacttgtaggttggggacatcgatcaacggatgcttagcaagattgaaatccttcttcgcaaagcaaactccttctgcaaaaatcatagaacatatgataatcaacacaatgttcaccttctaagccaaacatcataattgctaccataactagttaacctaaactagttcaaaaatcacaatgttcatcggcataagcctaaaaatgaatcaatttactcacagaagctgaagaaaacagagatctaagaacaaatttaagaagaacgaacctttgaagaggtacttgcagatttctttgcggttagcctctgagataatctgagagcaagaaggaagaagaaaatggtcaaaattcaacgaaacaacattctgagacaccggagaatatgatgagaatagagaaatagatcaaaagcagagcttgtgtgttaccattgtatcggtaggagatcttgctcgagcagagagtcgcacggaacttcgagagagcaaaaaactagggttttcgcaggactagagaagacgatgactttatatgctttgttttgggcctataatgagttcattaaatatgggccttaagtttgggcagtatcggagactgagaaactcaaaatgatcttgtcgaattgaattaagaattgggggtttatcaaattatttgatgataactatatttaatattttattaaccaatacttacactcgttgtatttatatttacgatggtttatcctctcttttttgaaaagtttatatcttgtaaattttgtgacatacgtttaaatattatttactataactttgattttttttttttttttactataactttgattactttatatatttttatcagattagttaattctataaattaacatatatttttattaattacatatattatcttgttaaaataatttccagtttaattaatttatttgctccatattgtaacaaaaaaatctttgagagataaatgtatttttgtgttgtttcaacaaaaaaaaaaagaagataaatctatttttgtgtcaaaaatttgttatgagaaattgtgacatatgtcgaaagagattgtgaaattgagagataaatgtacttttatagattatttaacaaaaaaaatcaattttcagtaatatatatagaggttgatgagcaagcgagtttgtaatcacattcttgtccatcatcttctcttctccttccaaacttttgagtttttcaaaaaatggttagttatttttcttagtaaacctatttatgtggttatataataaattcactaaagctttagttttatttcattgtttgtagtcgatgacgattgtattcaagcatccaggatatcccgaaaaaaaatggcgaaaaggattcaaaattgcaggtggttttccaggtacaaacctacacacacccaacaattatattcaacaaacgaattttgaacaatgtgaatgattgtcatctttttattattatattaggagttgatgtcataagttgtggtatcatggacgacgtatttgcagtgaagggagaaaatattgatcaagataagttactggagaaaataaaaaaggttttaaaatctgtcgaaatcattgatcacaccaaataccctccggattattttttctatgatttctaataatgatgtttatttttctttgggcaaataatgatgttcatttatgttttcatattctatcaaagtaattggatttggtgtaagtcttaagatatattagtccattcttataagttgtaagttataaactttttgttcaagaagattgattttccttggatgcatagtcgagagtatgccactaaaaatagcttaaccatattggtctacactgtcaccttatttcttcctctataaacgaattaaaacgaaagcatacaacgctattatgagatttgatttggtctcccatcaaagagacagatacatactttaacaaaagctcaaaacaaatttgagagagggaatggtatatgattacaattcttgtttaaaatatgattaataacttcttctagaaaatgttttatatgcaaaccagtcaaaccatcatttgatttacatctatttagaaatgtatttatctatttcatcactaagaatgtgttttatcaccacctccaaaatgtgtttacaaacaaatgaagccaactacaaattattgatcttgaaatctgtcgaaatcattgatcacactgaataccctgcaaattattttttttatgatctctaataatgatgtttatttttattttttacttttatttttctgaggcaagtaatgatgtttatttatgttttcatattctataaaaaaaataattggatttggtgtaagtcttaagatatgatcaaattaaaatatatattagtccattctttataagttataaccttttgatcaagaagatttgatattccttggatgcatcttttcttatagtcgagagtatgccactaaaaatagtttatccatattgttatacaaatggtcacagtcaccttatttcttcctctataaacgaatgaaaacgaaagcaaagacaactctattaagagattttggtctcccatcaaagagactgatacatatgtttaaacttgagatctaacttatgataatacactgtacatataccatccttaacccaacagactatttataacagtaacaacaactaaaccgagtaacatcagcttcatcttcttcctatgtacaaacaaaaaaccacaacagaatctctgtattttgtagccatctggttgttggctggctcacctgagacacttttcacagttctcctcttctattaaacattaagtagagatttcaggtgggtctttgtttaaggttttattcactccaccatgatcagttgctgtctcagatccgatatcataagacgaaagaagccgtctctattgtttttgaaatcaataagagtcttgaggttagttctggtatagggtttcgagttaaaattgactagtagtttgtggagtaaaatacttacatgatcctcaaagtcaggactagacaagttgatggatagatttctcatcaatagtaacacctgtttggtgggggcaaacaaaggaaaaaaatgattagtttaaccatttgttccattggaccgacgtggtttcaattaagattgatgtaaaagtgaaaactgaaaagacaagaaacgtactgtttcaacatctatggggtccatcttcttcagcttttgtagatgattacttgcatatgggtcaaacacacttccaatgaagccgtatacttgggcaaagtccggtaaaactgaaaaaaaaaaaggcggaactgtctagtaagaaatggtaaatatggtacaaacaaaaagattaacaggagacgatgtaacgatgcttacctcttaatgaatggccaacatttccatggtctcttgcgtccctgttggatcgtggtcttggagtattttcagaactactagaacaattgttattagctcctgctcctgctgtttccatcaacgtggaacaacaatatgcttcatttagtaaaatttgaaacagagattatattaagagagtaacagtaattgcataatgcttgtaaatgagaatagaaccttttgggaggggagtgaagctaattgtttgcgcattatttgtccatggagccgcagcagcagtggttggcgaagtcatcagcattgaagaagactcaggcctaaacataaaacttgggtcatttggttcagatgttgacttgaatgaccctggtacttgcagttgcactgcacattgccataaacagtgcatcaatatagttttcagtaagcaaacaacaatacaacttcaaagtttttaaagcagtagctataacgtaccattcttgtgagccttctgaggatatggatgagcggctttccttttaggtcgaggaggagggagatgttcaccggtcccactcttttgtaccttaagaaaatacttctgagcatgacttcgtatctgcagtattaaaggagtccgtataagaagccataaaagagctcaacgagctcacttgtctaatgcaaaaataactacatataacacttcattaagtggtgataagcgacaaacgcatgtgacattctttctcctagtagtagtagttcaaaacagttacagacaataaagatgttttaacagaacactttgtggagatatcaaatgagagaaaacaacctcaatccaaagtaacactgagggcccaagagaaagatgacagaatcaaacaactagagtaggcgaaaaacagagtaactcagaagatatatctactttttactgtacctgaatcactgtctttgaaccaataaaagcttcaatcttcttccagtctctatcaaacctaaaataatcaaaacacaaacataagagatatcagatccaccaccaaacaacctggatatagcatgtgtctaatccttgcctaagattgtacgcatcacaatacacagaagaataagcaatgaacagtacaatcatcatcgcctcccctagaacctaccccaaggactttcccactacataccaaccttagtactacaattactcacttaccagtgtttatagacactattgtaaccaaaaaaaaaaaaaacgcagctctaatagttttcactaaatcctctttttactaagatacatatagtttgcgtcgctatttcctcataatctcagctcaatttcttgcctgtttcgttcttcactatcaatgatcatacaggtcttagaagaacatttagctcatccaatttcaatagctactacacaaattcaatacagtctatactcatttttcgacatcctgatcttctcaattcttatcagacgcctaattcaacaaaatgtgcatacatagccaaatccatctgcctaaatccaactctcgattccaattctatgtcccaaatccaatctaattccactggttcaacacagtacaattcagaaacctactgaaacataaagttgcacattatcctaatcgaaactccacgcatattcacatgattctataaagtccaccacaaaccctaatcaaccaaaattgatgctaattcttcccaaatcaaatctccaaatagccattaacgagaaatggtaaagcacaaaatgaacaaaactcacaattgaagagcttcaaggaatttatcatgctcaggctccgtccagctctctctagacttagtaatagtataaggcttcctaatcttcttactcaaatcctcctccgaagaagaaaccatcgccgtcacatccgccacagccacggccgtagaagaagtcgttggtgaagaagaagaagaaacggcggctgtaaaggaaggtccgagaccaggaacagtcataccggtcggatccaagaaatatccgtcagaatttctagagaccatgaatagaatttgaggagatttttgttgaatcttttgcttttttgctctgttgggtttaaaaagctgtgttgtgtaggagagaaagagagaagaaatgtggcttatgagaaagaagaagacggcagagattttattaaaatattaataaatttataagctatagtttttttgtgtatatgttgtgtttctcgatgaaagaaacttattcttgtgatcgtttttgaggtcggcaaaatagttcttgtgacctaatataacgtgccacgtatttggatctttataataaagatttttccatttatgttttgtatccgtttataccaaaaaagggtcttttctttttggttgaatttaggattgttttgtagtttaggtaaaggttttctaattgtccaaattttatgttttgtggagcctttttagctaatgggcaacttgcccgtcaaaaaaaaaaaaactaatgggcaaatgggttatatatttagcccattatgaaacatcgatatgtcaaaaaaaaacttggtgatgccactgtttttgtcttaatgtttagcccaatcaacaagacaacaatgctttttttcttggcatccttcgattagaacgattgatttgtgaatgagaatttaaatggatggtttacattggtttataaatttctttaacaaatgaacatattttaacctcgcaaataaaggaagaaatgcaaaaatgtggcatgttaaagaaagagatcaaccttcactatatcttttaggtttctaattggtttcgatgtgagaacatctttgttggattgttggtaatgccacgttcttaatattgtttatactaatgttttggcgttggagtctgttacgtaactgaattaatgacattggctaaagcgcagtaccaaaagttatagtatagatttgtataactatactgaaaatttcctaaattatggcgtttactaatactgtaacgcttcgtatgagcccaagtaaatgacgataatgtcgtgtggtttgggagttgtgtggttcctcatgctttcacacatttttattaaggaatgtataattttattaaaaatctgaagctgaaatttacgtatcaacaacatctctatttattaatacaaagaacatttgtaaacatgatagcagccgtagataatatgatttaaatgattaaattaggggatacaaacttattgtgaaaaagaaaaaaaggcgatacaaacttatcccaattttattcatattttcattaaacgaaacgaaatagaaaacttatattgttattattatatagggttgatttaatcgctcttattatcttatatcgacgagatgataaaagacaaaagatcttacatatgcataattatgagttatgacacggtattagttgaagctactaaagtactaaacaaaagaggcgcaacaacacattctaacaatctattatatagaaagactcaaacctgttttattaatcatcttcatttaagcgtatcaaattgactatttcagtttcttgcttggatggcttgacttaaccatttcatattcgctaattcaagcaaaggatatcgtgtatatatatggggcgaaacaaaggttaatgagcaagctacgaggttgatttcatattcctttacatcatatctcctcaatcatcaaactttctatactttccgaaaatgccggtatgtcttttcttttagttacttaaaatcttagaaaactaaaggtactacttatacacaatgaactgtctaaagcttcaaatctaaatctttgcaggagaaagttgtattcaagttggaagtttttgaggaaagaatcaaacgaagagctatgaaagttgtatgtgactttccaggtatattataatatgtacaaacaatgtctatatataatataagtaattgaatctatttaggcttaatacaaattaagcaataatgtttgttgttgtaggagttactttgatagacgtgaaggaaaaaggtaaactaaaggtgaatggagaatttgataagtttgaaatgacgaagaaacttaagaaggtgtatgaatttgttgacattatcgcggttgggccggatggagaaccggcacaaaatcagaagctggttaaaaagcctgaacctaaagtgaagaaagcaccatcttaccgtggttggaatttgggtttctttaagtgatcaatttgaagacgtgatcggtttattttccatggactactgtattctgatgatatttcatctcattttttctgaaaaaattgtttgcccgttatttgtaataattatgtggctcttatattcatattggcgttatatgtcttttgttaacattattaagttctgatcatccaattgaaaacaacaaaaacaaaattttcatctaaattgtctaagttaagtaatagagtctcattgttgtgtccaaaaaaaaagaagaagtaaaagagtctcattgatcgcttttcataagcaacacttaattcttatcaccagcaactagatgctcaaactaatgctggccgaagtgtcagaaaagatagtcaacgtttgatagattattgttatcattcaacttcgttccacacttattccaagtaattcgtttatattatatcgtcaataatcgtgttattatatcacaagtgtttctttataataggtatttatgttttttggcacatgcaataaaattcattaagccctgtaattctgtcggttttcttaaataataaaaataaagtttagaagattagttaaagctatatactaacctttctgttacatttggatcatcataacttatatactttttcatcatattcatcagcgttaattgttagtaaattcatggaaatccatagagaatgattgtgagtttgtgattcaccaaagatctccatcaattagtacttcaaaaaaactcgtcttaaatagatttaaaaccattgcattgacgaatatctgaataataaaaacgatgaaattgtacatgtattgggaaatagtttgttaatcaatacatggggtatcaagaaattcataaagatttaggaacaatatttatgaaatttctttgatttccttttgcacctcccataaatgttttcctttatacaatatgttttatgcataggatattgtatttcctagcttcgaagaaattgtaaggctctttcgtatattctttacgtcttgagtgtactagttgttctaaattatactacagaattaacgaaaaacaaaatatcgtatatttgactataacacggtattagttgaagccactaaagtaagagaccatgccaacttccattctattatttagaaaaacctttttttgataatattcatttagaaagacttaacttgaaaaaaaaaaaaaaaaaaaaaaaaaaagacttaacttgtttcactttctacctttcttattatacaaagagactcaaaactgtttgtattggtcttgatgtataaaattgactatagttcttatggttggacctaattaatcattactatattgagcactagttacaaacaaaacattgtataaataaacggggaagcaaagggttactagtgtgcaatctgtgtggttacaatcatataacttcactgtccaatcttttaaacattccaaatatgcaggttcgtttttttttttttttcagtttctaagattagttttaacttttaagcaactaaaattcaatggttctaaaatagtttttgattattatacaatgaactgttaatatgcaggtggagacagttgaattcaagatggatgtttctgatgaaaacatcaaacgggaagttatgaaaattgtctggatgccaggtacaccaacacaaatctatggttgtagtattaatgaaaccaaataaatcaataagtaatctatctaagcttgaaagcaataatatttgttgttgttaggagttactttcgtagacatcaaggaaaaaggtatattaaaggtgaagggaaaatatgataagattcaaatggggagcaaacttcatgagctagataactctgttgacattatcaaccaaatgggaaaaacggggcaatatcgcattccgagtttaacttcagtctacagttattttaccactccaaatatacaggttcgtttaatcgtttagaacaaatttttcagattcccttatttttgagcaattaaatttcaaatggttcatagtatattttaataaaattattacttgtatcatgacctgctattttgcaggaggtagttgtattcaagtttaaagttcttgatgaaaaaatgaaacttgatgctatggaagttatttgggagttttcaggtacaccaaaacaaacctatagtattattaattatggctggttattctgttatacataatttttcatctatttagtctttaaaacaaagcactattgtttttttggttgttaggaattacttcagtagaggtgaagagagataatcaactagaggtgaagggaggagaatttaataaaatcgcaatgtcgacgaagctaaaggaaatagatgaatctgttagcgttatcatcaagtctggaccagatggacaagttgatgtgacaaatattaagatcaacaatgcgagaaaaacttcacgtgtccctgctcctgtacctgttcgtgcgcctgcccctacgcctaaacctgcccctgcgcctccttctgttcctgcgtctgtggctgcttatgcgaacatgcgtctttatgtgcataaaacaccaatttggaaaaagtgctttcgagcaatttcctgtggactttatcgttgaaatcggtcactggaatgactggataaaggagtcaattaatttgttgtaatgaacattataagatatcctatttacaattgaaaatcgaagttaaattgaatgagatatgaatgtacaaaatggctagattgaaaaacttttaaaacttagtaaatttaatttgaatagttctgaaatttgtcaaaagtcacacattagaataatgaatatttgtcaattatcaaaacgtttaaggaatacataatttccctttggctagtttgtaaaacgtcttttcacaaacaatctccgtgatctaaaaaatagcgtttaagaatacctttttccgatttctatgaacgtgtattagtgagttctggagcatggagatcactctctacatcgtgaagcatcagacaaaaggaagaacatgatatttgggactctgatgagtaaacacggatttgtcatctatcaactttgagtctaaccagctgatccttaagaataatggtgtttttattataaaatgtatttcgttaaatgaggattgatctatcgcttccattgttgcaatgaataataaaaagcaagttgattaatatgtggtcgaattctctaatatttggcatgaaccgttcgaatatgtgaattataagtatatacaaagactaattagtttgaacataattccaaagtgcaaaattagtaaatatcatatacattttatacttactatataacacggtatcatttgaagccactattttttgtttagaagctactaaatttatacgtgaagtagaactaaactcaagacgtaaatttagtggcttcttatattatcacctaattgatacatctacttcacaaatttttcctacaatttatttgatttgtttttcataatttaaagtaacaaataaaaaaaaatcatactattttacaagaaaataaattatcataatgaaaaccatttcttggatggaaaatggtagggtttaaatataaaattatgcctttatgtaatttttataaacattaattactacaagttaaatgcaagtaaaaaatctagagtaaatgttacgtttaaacagttgaatcctctcattaaagcacaaattaatataagaaatttcagttaaaaataatgtattaaggccaattaaaaatcatcaaacgttgtctttcactaattgagtaagcaatttgaaagtcagctccacttaaatcctatttaaatcctaataacttatgaatcaataacgtatgagttaataacttacgaaatatgaaataatatcatgctccactaaactcttctttacctaaattcatttgttataaatagtagcttatcctttattacaatacacatgtctacccctaattgtttttttaatacacatatactactataactctttttttttgggcaaatatactactataacttttatatttattcataaaatattaaaaatattttatcaagatagatgaattattatattatttttagactatatcttaccaaaaccaaaaagggaaacatgaaatcaatctgtctagagatttttaaaattattgtcgtgtatgagctatagagtatggacaataattcaattgttgtcaaaattctctatttatgtgatcttcttcagtttttatggttttttctttctcatttttagttggtgaaactaagttgttgcaaaaactttactttctaatcactacattacggcaccaagaatgagtttgatgaactgtttttcatcgaaaacgggtttaccatattttgagacatgttcacccatcgaatgtcaatgaaagacagtccatcgaactcatctttggtgtcgtaattagtaattgaaagatcaagttcctgaagcaatttagtttcatcaactataaaaagaaaggaaaaaccatacaaatttattttcttaaaactcctgatgagagaaagagagatcatttcttgcgcgacactcaagatggatgttacaaaaccaggatttccatttggagggacatatgagttccttagttgcaggtacaccaacacaaatctatggttgtagaattgataaaattaaataaatgaataagttatttgagtttgaattgaagcattcttgttaggatgtactctttcgtagacatgaaggaaaaaagtatactaataggatagcggaaaatttgaaaatattgaaatgagctagataaatatgttgtcataatcaacacaatgggaaaaccggggaaaaattacatttcgagtttaaatgcagattacaattatcttaccactccaaaaaatacaggttctttcgtttttaataattttcagattattttccgacaaatgtgaagtatgcattcaggcaaagtgtcagaaaagttagtcaacgtttgatagattatgttattattcgatttcgttccaaaataaccacacttattccatctaattcgtttatagtatatggttaatcatgtaaccaaactgaactcatcatcatattataatatcacaagtgattctttttaatagatgtttttttttttgccacatgcaataaagttcattaagcctatatgtaattctgtcggttttcttaaataagaaaaaaaggattagtattttttttgtcaaaaaagtttagaagattagttagagcttctaacctttctgttacatttggatcatcataacttgtatatatattttttttggccaaaaaaaaaaaacttatatattttcttgatattcatcaccggttattgttaacaaattcatggagaaccatagagaataattgtgagtttgtgattcaccaaaacatgtatatctagattttcatcaacagctaatgcttgtaaaagttctccttgtgatagaattgtaactgttgcattgacgaatatctgaataatcaaaaacgatgaaattgtgtggaaaaaaataacttgttaagcaatacatgtgataacaagaaattcttaaagatttaggaaaactaattaatcgaaaatataaatattcagacctcttggatttccttttgcacctattcctttatacaaaacatctttatgttttaatttttcgtgaatgtaattatgatgcattagattataagaagatattatatttcctagcttcgaagatattgtaaggttattccgtatattctttacgcttgagtttagtagttgttcttaattatattatagagttaacgaaaaacaaaatatcgtatattttactatgacacggtattagttgaagcgcaccactaaagtaagagaccatgccaccttccattaaatatttcattattttgaaaactttttttttgataatattcatttagaaagacttaacttgattcatttgtttcactttctacctctcttgttatacaaagagactcaaaactttttgtattggtcttgatgtataaaaatgactattttgttttatagttcttatgattggacctaattaatcattactatattgagcactagttacaaacaaaacattgcataaataaacggggaagcaaagggttactactgtgcaacctgcgaagttacaatcatattccttcatctccagtctttttaacattccaaaaatgcaggttcgttttttttttttttttttttcagttttctgtttagtttcaagtcattaattttcaatggttattattatctactgtaggaattctaatatagttatcacttatacaatgaacttctaatttccaggaggagacagttgaattcaagatggatgtttctgatgaaagcatcaaacgggaagctatgaaaattgtctggatgttttcaggtacaccaacacaaacctatggttgtaatattaaccaaaccaaataaatcaatcagaaatttaatctatcatgatgtatttaagcaataatatttgttgttgttaggagttactttggtagacatcaaggaaaaaggtatattaaaggtgaagggaaaatttgataagattgacatggggagcaaactacatgagaaagataaatctgttgacataatcaacccaaatggaaaccgggggcaatatcgcattccgggttatactacagtctacaattatctaaccactccaaaaatacaggttcggtttttcaaattatcaaattatttttaagcaattaagcattaaatggttcatatttggatttaataaaattattacttgtaccatgaattgctattttgcaggagatagttgtattcaagtttaacgttcttgatgaaaaaatcaaacgtgatgttatggaagttatctgggagttttcaggtacacaccaacacaaacctatggttatattaaaccaaatgaatcaaactatggctggttctttttacttaattttaatctatttagtctttaaaacaaagcactattgttttttggttgttaggaattacttcggtagagttgaagagagatcatcaactagaggtgaagggaggagaatttaataaagtcgcaatgtcgacaaagctaaagcgcatagatgaatctgttagccttatcatcaactatacgcgaacaaagaaattgggctttagtttatacgatctatatcgatgagaatctgagcaacacaagtatttgagcaaaaatatatatgactccattttattttctgatgttttaattttcttgggaattcttttccacctcccttaaaattttttttgaatgaatgtaattttttttacctgtattacattaagtgcatcttttttgaaactttgctacgattgtatttgatggttctacagatcaaatcctagtggaaagccaatatatgaagaggtcttcataatttattttccagttttccgaatttcagagttgtggaattaactccgtagacatcaattttttgcgtatcaaaccccatattttggttgagtgttgacaataacgtcaaccttagccacatggagtaccgtgtcttgaaacttccataccatgatatcctcccatagcggcgtaagtacgttttcgataacctcatcaggaatctccattgatctgtgtctttaattccgaagttgaaatgtttagatcttatttttgagaatatgtttgttttgagccactgaaatccacgaacccacttcctttgtgccaaatttaacccgtaaatccaaaacgcagcgtttttaagtaatggatttgaaagtttttcaattctcttatcaactaatccacattatacaaaaaagcatctatgctttaatttttataacaaactttaattgtgacgaattgggtatttcatttcctaccttctaagaaattgtgatgttctttcgtatagcctttacatcttgagtttaatttttcttatgttgtggagataacgacaacaaatattgcataacacgctgttagttgaagccgctaaagtaagagaccatgccaccttctaatattgcataatcatctattatttagaaagactaaagtaagagactcaacatggtttgattctactatctattatatagaaagacttaaattgtttgtattggtcttgaactcttgatgtacaaaattgactatttccttttatttccaaatatttggacctaatcattactatactcactagttttatatttattttatttttcttgtgtagctagttactagttactagttacaaacaaaatatagtataaatatacggggaagcaaagggttattgttgtgcaagctgtgaggttgcaatcatattcctttgcgtttatctctaatcactctccaatctttttaacatttccaaaatgcaggttcgttttttgcaattttcagaacaaatatttatatgattgtctaatatagttattgcttgtaaaatgaactgctaattttcaggaggagacagttcaattcaagatggatgtttctgatgaaaacatcaaacgggaagctatgaaaattgtctggatgtattcaggtacaccaacacaaatctatctttatgttagtgaaaccaaataaatcaataagtaagttaatctattttggctataaaaatgaagtaataatatttgttttttattaggagttactttcgtagatatcaaggaaaaaggtatactaaaggtgaagggaaaatttcaaaagattcaaatggggggcaaactctatgagatagataaatctgttgatataatcaaccgaacgggaaaaccagggaaaagttacatgccgggtttaaacacagtctacaattatgtcaccactccaaaaatgcaggttcgttttttctaattttcagattatttttaagcaattttgtttttgtgcaccatttttagcaattaatttttttttacactatgcatatgcattatgcattatgtagatatacattaaaattattacttataccatgaattgctattttacaggagatacttatattcaagtttgaagttcttaatgaacacatcatacaggatgctatggaagttatatgggagttttcaggtacgtatacaccaacacaaacctatgtttatattaaaccaaataaatcaatgattgtaagatatattcagtttacatcattttgcattgtacgatgtttgttgttaggagttacttcggtagaggtcaagggagttgataaactagaggtgaagggaggagaatttaataaaatcgcaatgtcggcgaaactaaaggacatagatgaatccgttaccgttatcatcaaggagggactagatgtacaaacacctaatattggaagctcaaatgggacaaattttaatatgaaaaacgcgctatcctctttccgtgtgcctgcgcgtgtgcgtgtgcctccgcctccacctgtgcgtccagcttcccctgtgtatgctgctgggcgtggaaaaaaatttaaccaaggaaatgagtttccaacatataagcagccaattttcaatgctattgctgcgcaagttcgtgacttattgcctaaagcaaacgcgaataagtttatgttggggcaacataatgcagagatccttggaaggaagaaggcacaacctgaagtcaagcagcagaatcataatgatgcacaggcccctgataagaagaagcaaccacctgaagtcaagcagaatgaacaagaaggaggattctttggattctttggtaagaaaaagcaacaacctcagaaggaaaaaatcgtcagtgaaatcccaaaacctcaacgaacatcgagaaaaggtacaacactgaactcatgtgcttgtgtaaacatgccttttctagtttgaagtatgttttaaatggaagaatttgaggtggtgattggtttgagctccatggactagaaatgtcatctctcatcttctaagataaagtttgtctcattatttgttgtggggctttatcacacattggcatattcttttgtttctattaaccttaaagatttgtgttaaaccatctaatgcagaaggcgaaacgtcacaaacacagacacaaagttcgtggaccgactcatcatggcttacgggcttaaccaatacgttgaatccctctcaatacacaaaatcaagcagtcagacgatatcctatcaaacctcaaaagcgggtggatcctcaagaaaccaacattcaacacgaaagggaacttaacctacaacgcgaggaaagaccgatgattctattaaattatctaatagattctcttgtctaagtcgaaagtactgaatcgtgtgtcgaatgttcatcggatgggattttcctataggacagttgagctccttggactatcgtttgttctggacgagaatttcatctcatcttgtaaaataaaagtttgtgtccttatctgttgtggtgtttactacatatttcatatttgagtattattgtttttcttaaccttaagttcgacttgatcatccaaattgtgagtagattgagacattgagttatttcctttttcttaaccttcagattgcatcattataatcatttttcgagatatagtaatcattcttccttgaacaaaaccgctatcaaagttgcattttacccagcccgttggaggtggttcccaacgtctacttcgatctttttgctgttgattaagactgttggattagtgatacttacctcatgaggatttatgcattagtaaatccattgtgacttatcaatgcatggatatatctctaaatctttatcaacaattgcaacttctgaaaaaaacttcttgtaatagaatgaaaccattaaattgacatacatattgcgataaaacagttcaaaaggtaaacttaatcgggaatcaaacccttttgcacctcccttaaaatttcccttcaactatccaatgtacaaaacatctcgatttttttaattctctgaattttattataacaaattgcatattttatttcctagccatattgcaagacaaagtgaggttctttcgtattatcgagaccaggccactctcaagacaaaatatatcgcatatttaatttttatatataacacggtgttagttgaagccactaatgtcagagaccaggccacactctctaaccatatatcatatagaaagactaatctagactcaacttgtttttattaattctaccatctattatatagaaagactcaaattgttcgttggtcttgatgtacataaattgattatttcctattatagttccagtggctgaacctaatcattactatattcactagttgcaaacaaaatatcgtatacatatagagggaagcagagggttattttgcaagctgcgaggttcctgtcacattcatttacgttatctctcttaactcttcactctccaatgtctaatcctcattacaatctgaaaacacaggttagtttttctcaattttcagattagttttgagcaaataaaatttcattggttttaacggtaagatttctgcagaaacatacaagaaagtaattgtatttacatatttacgtaaactatgaactgttaaattgcaggaaaaaacagctgaattcaagttggatgtttctgatgaaaacattagaaggaacactatgaaaattgtctggatgtttccaggtacaccaaaacaaatctattgattttattaatgaaaccaaataaatactatatttaagcttgaaatattaaaaagcaataatatttgttgttgtagttactttcgtagacatcaaggaaaaaggtatactaaaggtgaggggaaaatttgatcacattgaaatgagagagattttacagcaacatatagatgagtctgttgacttaatcaatccaatgaaaaaatcggagaaaaaacagattccaggtttggctacagtcttcaactactttaagactccagcaacgcaggttagatttttttttgcaattttcaaattattttgaaggaattaaaatttcaatatctaccctaggaattctgtagaaatataaacacatacatatgtaaaaataaaattattacttattccatgaactgctaatttgcaggagatagttgtcttcgagtttagagttcttgatgaacgtatcataccgaaagctatggaagttatctgggagtttccaggtacatcaacaaaaatctatagatatgtttgtttgtttttttgagcaaaaaatctatagctattttatttaaacaaaataaatctatgacggtacgtaggatatattcaatttctatatagaaattaaaaattcaaaaattaaagcactaaataaacccatgtttgttgttgttgttgttgttgttagtagttacttcggtagagatcgagaatgatttttatctaaaggttaagggaggagaaattaataaagaggtcatgaagacgcaactaaaggatgtagataaacatgttaagataaaatggcatggacaagatgtagaagaagagccaaaaaagcaatccgaggccggtggctcgaagttgcaaccggagcaacttagtaaaaagaaaaatatatacgaagacgcctacggtgaacatcttaaaaaacgacaaggtattaaccaagcaaagcagccggcattttacgacgattggctcttagaggaagcgcatggaccttttaaccaacaacaaggttttaagcaagaaaatctgctgccaatctatggaggtgcacatgcgcaaggattgtataaacaaaatgcgaataaggtcttccagccgcaaccaaaaggaggctttgctgcactgaaccttggtgagaagaagaaacaagctgaagtgaagaagcaaaatcaagacgcaggatggtttggaaatatgtttggtaaccaacaacctcaggtcaagcaggagttcagaggcaaacgtgaaaatcagcatgctcagcgcatcgatccgcttataatacaaggtctagatggaaaatttcatgcatataaggagaaaaataataatccgtatgcccgtagctcaaatgggccaacatctaacaatggtacatcacaaaacttgggtatcaacaaacttgtttcagtttatcagatttatttttatgggataacttttaaaataaagtttttattattgtttgttgtggacctcactatattggcatttttttgttaaccttaaatatttgtgttaaccaattattgtcaacagagtttggatcaagcagtacgcggaatcgctctagcttctcacggtcaagcagtgcgatggatctatctcaaaccacatcatcaagcagtgtggcgtattcttcttactccacaacaccaaacagttctaggaattcctctcactcacgatcaagaagttcggagaatctgtctcaattccaatcaaacagtacggggaattcctatacatcctctcaatcaaacacagcgagtggatccaagcaaggccaaagttctaaaaaaccaggaaagtaagcatgctcggttgcaaagaaagggaggaatgtcaaaactaagctctgaaatttttgacaaagaaaaagagacttgtcaagaataaaggtccagcatatttttttctagtctagtctattagatttcttctaaaagagccaatctgaggtggtgatcggtttgacctccatggactagaaaaaaaggtattgtggtgtttattacatattaattggcaaagtattgtttttggttaacaatttgctcctccaattgtgtttagtcgagtgatatcgttgtgtttctttaagatttattaaacatttgagtttttttttttcttaatgcaaatcattataaatttaagctgtcccaagctcatgacatttacaacttgtattgactaaaattctaaaataaaacaggcaagcttattgtacgggtatataactatatacagtatagccatcaacgtgaaactagagcaacacaagtttttcctaaaatactttcataaatacgattggatatatatatatatatatatatatatacatattataatcgatctttccttgtttaagtttcttggcaatccttgaatttccgtttgaatccattctaactatttattatgcgaaacaactcaagcagtttaaatatttcagttacacaaaattagattatcttatttcctaccttcgacgaagatgtgaggttcattattaaatccttataggcttgacttagtcgctcttatattgacgtgataattaaagacaaaagatatcgcatatatatggtttaaaactgtgttagttgaagctactatagtattaaactaaagaagcgcagccacattctaacaatctattatatagaaagactcaaaactgtttctatgccgcataatttaatcatactacattatctatttcattttcttgcttcggcggcttgacttaatgttttctatattcgctagctaaagagtatatatgtagacctggaaacaaagtctatgagcaagcaacgaggttccaaattcattcctttatatcatctctctccaatctcgaaacttttccacaagatgcaggttcgtgtatattttgaattttgtataagtttttagaataaatttaaacaaaacagtaaaattaagctaaaattaacataattatatatcatcatagtaataatgattttgtttacacttacacctacgtataaagcttcaaatatatttaaatcatgtttacaggagacggttgtattcgagtggggaagttttgacgtaagaaccaaagagaaagctatgaaagttgtatgtgagtttccaggtacatcaacacaattcaattcctacgtttaactttaaccaaataaaccgataatggcaagaagtcataataatttattttttcttattaaggctaaaaataattaatcaataatgttcttgttgttaggagttactgtgatagacgtgaaggaaagaggtaaactaaaagtgactggacaatttgataagtttataatgacgaagaaactgaagaagatatgtgattatgttgacataaccgcggttggaccggagggacaaccggctcaaaatcgcaatccggttaagaaacctgaaccaaaagtgattagggggcgaccttaccctcctcagaaaaaaactccaggcaaaaactcggatgagtgtatcatcctgtgatatttcatatctcatttctatgatttaaaaacttgtttgttgtgtggtgtttatttacctatatcgccattctgcttttttttttttttgtttcgtgtgtgtgtgtcaatcttgatatttttcatcctaaattatattgttttagtacacaatgataaaaaaccttaaaagataatgaagctaaaaaaataatttcaatttttttttttgcgttaaaaggcgattccgcaagttggcccatgcatacaagattgacaatatcgcttatgttagtagtactcagtttttgcatggaaattacgacgaatttatggacctttttagtttgtggttcctcaaccattcccggctcaacgattatatcatttcctatagctttctacgaaactgtcggcttttttcttctatacttttcggcttgacaatatttggatatttgacaaagacaaaaaatatataaatctattataaagactctaatagtatttataagtcttgaatcttgaaataattacatcaaacatactatattattttctagcttcaacgaaattgtgagtactttctactctttattcgggttgcctgaatcgtttttatattcgcgagctaaagataataaaaaatcggatgtatataaatacacatgacagtatatttggggcaggcaaccataaaacattcacgttcctttacatcatctctcttcactctagctacaaactttttcattttctgaaaatgcagcaaaacactaacgttgtattcaaactggaagtcgatgaaagaaagaaaaagaaagctatgaaaattgtatgtggattttcaggtactaacacatctcaatgttatacaaaacccaaagaaaccaattattttggttatacctgatttaatattacatataagtagtttcatttaggctgaacttttaaagccattcgtaccattttttcttgtaaggggttacttcactaaacgtgatggaagaagggaaacttacggtgactggagaatttgataactatgaaatgacgaagaaactgaagaaaatatgtaaacatgttgccataatcgcagctgagcccattagggaaccagagcaaaaccgcaatccggttacaaggcgtgaacccaatagagaaccagagcaaaaccgctctcgggttacaaggcgtgaaccgagcagagaacccgagccaaaccgcgctccacttgcaaggcgtgaatccaggcctagaactcactctcgtccgtccatacctcacgctcgtccttcgagagttcgaggcgaaaactcggatggttgtatcatcatgtaactgaacatatctttggtccaagttgttaagtatctcttaagaacaaatattaaaaaacagtttaagatagcaatcttttcgagcttcatgcatgagctatcataccctagtgatatattatcgcatcttctactttccttatttgtaatatttttgtggtgtttattaaatattttcgtttccttttttaaaattcaactggtgattgggtcatccattgtgtttgttcaatacggtcaaattaaaaaaagatttgcaccctttctttttgggggtaaaatgttaaacatatcttaaaaggttgagtttcacaaaaaggttatcaagagttttgagaagaataagagacaacaggtacatacaatagtagaagatcagtaaaacctagcggttaattgttgtaaagctaatctagatatgtcaacatgtaaagctaagttatacgaggtcatgtagtatggtggttttctagtttaccaggctctcagtggacaaaagtatttgtcgatttgataccatcttcctcgttgtgcgatagtgtaagtacgctccacaatggaaatagagaaaaagaagggtaatcagctagagttaaatccatcggcaaaatctaacacacatagttttcactcaatcactctagattgatttaataagtcatttataaaagttcttaatcctcaaatttctatggaaatttttgttcatatgatttaaaattttgtacggagctccaaagaaattaagtttacttggaagcgaaactcgactggatttgtcagacggaagactcttacattggatttaagctagagaaatttttattggatcgactagataagttgttctctcaaattgatactcgatactcaaacttgtacacaaactaaactacaaatgctacgttgcatctggtatgaattatgtctcaaaagaatccgaccagatccttttcaaggttacaccccgacaacaaaaccagcttggtaatttgcctggaaacgagggagttgaaaacgtaattcttggttcacaattaatcctacatttggagacttagtgcgatttagtcgctgcaaatttgttggtttgtccatcttagtttattcaacttgaatctcgctttcgtggtccaacttttgatttgaatagcatctccacaaacagaaatacacatcttttatttccagttttaaaaagaataaataagcctcaagcagctatcaaaatataatgcaatattgtttaaagagtttcattttattccgtagccatttgaacagcattcgacatataaattttaagtttagccaacaattaccgattcttgccaaaaaaaaaaaaaaaaaaattaccgctttaatgtttaaaggacgaagaaaacgtgttattttaactttaaattatttttaaaagtttaataattattgtgtatgcatggagaagcaataagttacaccaagtaacacttgagacatatacttgatttttttccattttcaacgttataggaaaattggtgtgaattagtatatccttgtctttttcatgccctgcaacttgcagctgcttatataaaggactaaggaaaggagggacactttcaaagctcattagtaatctaagactttttcatattttccaaacactaattgaagaaaaacatgcaggttcgattctttatatatattttcctaatctatgtttcttaattggaagcttgtaataatttttccgaatatttttttattgcttatatatcaaatgtcataattctaccctaattagctctttaccataattaatattttcatgacaggtagttgtactgaaattagatgttcattgtgaaaaaaccaaacaaaaagctatgtcaactgtatgttgtctctcaggtataaacaacactcatcaattgctaatatatattttttttactcataagcctctaaattctcttaatcaattgattaaatcataattaagtacattttgatttttttttgtattgaaggattattttttcttttggtattgaaggagttaactcggtggaggtgaaagatggtaaactaacggtgacgggagagattgatgcctatatgattgtgaagaaattgaagaagatatgtcataccgagtttatatcggttggaccggttaaagaaccagagaagaagaagcctgatgatccgaagaagcctgaaacgaagccaccagatgtcatttatcattatgtccctccatgtccaccttattaccataatttcaacggatgttacaatgaagatcccaacgcttgcgtcacctcttgaaaacaatattttggtcggatcagtttggttcacgatagtcatcactcatcagcttcgtcgtagtctttggttttgttctattgtgattgttttaactctttcagtccagtccattatacacactcaacatgactagaccaaggttgccactcccaggcccatttcttgttttaattccttttttgttttcttgttaataacatgcatttaaatttagatgacgacgcattaattgaccatatttaacacaaatcactaggttatatacgtctaattcaaatgattttgtttcataaaaaataaaattagatatctagtgatcttatagtaatatataacagtaatctaagtagactgctccacaattatattttactttatttaaaaagaagaaactacgtaagaggtaaataaagtacatctttaaaaacaaaatttatgaatgaaacattgtgactttaatctcggtttgatttcgatttcagctttggttttgatatgattcaacttttacctagagaacttgcttgagaagttcttatgaccgaagaagtcaataaggtccaaccacaaatcaacgttgtccgggtcgtacacgcggaattctgaaaactacacttccttttgtgttcgttagactcaaattaattttcaaccaaatcataaaaataaatataaaattggtagagaatgagtcattctgaatgactactttaacctctttgtggtcgttattgcaatactatttttatttaaaaaatacaaaaactttcccttgtggccttgtgggtcatatataataatacttgcaaattccttggcaatttctatttaaaccgatttcagtagacttgctattgtcatcatttcatatcttagatcatctctcttctctctctttctcttaagaatattggaaatttctgaagcttttctatagttgatctcgagccatgcctccaatggtacgccttctttttcctatgatatctcttaaaataattatgcgttgaataatcgtttgtatataaatactatttgactatatatagttatgttaatcaggttgaaaatatgtaattaaccatactgatctctgttttgaaataacagaaagctgtgttgcaattgagcattcacgaggaaagaatcaggaagaaagcgtttgtcaccgtttctcgatgtccaggtaactttattagttacatttttcgaaatttataacatgatatattgtttggaaaatgaacttatattcatgtttttttcttttgtctaaataggtgttacttcgataacaatggatgacaaaaccgggaaaatgacagtagttggtgaagttgatgtaccggttatcgtgatgaagctaaggaagctatgtaacacagagcttgtttcggttgaagttgttaaaccacctgagaaaaagcctgaaccagagaaaccggctccacctaaaccagctccagctccagctaaaccggctgaaattgttgcctggccggttcagatgaacaacccttaccaatacaatcctgcctatgcaaattcttactatcaaccatatgggaactctagatttgtaacggacgaatcaaattgtgtgattatgtgataacttatttcaaataatgtgttaagttagttttgatggaagagtgtaattttttagctactgtaatatacatttctcatatgagcttattcagaaaaatttatgttactgtatgataaatttgatctttatacgttttgttaactttaacttttaatcatttagtaatagttgatctttttcctatacagaatattattctctatactttgtcttttgcttatatactaatcaaatggatacaaaaatatcacacacacacacacatagttaagtcgctctcaacttatttatgaatatcaagtaccaagatcgttcacgtaatacattcaattgtccaaaactaaaataattttgaaacaattagagaatgagatattagtaaagatgtgatgtagagagtcaagatctgaaagtctcctttagcaaaacaaatactaatcaataaaattcctacttggagggatccacatgtaaactgaggctttcgaggacatttcctttcttgactatgaaatagcagtattatccgagtcttcttaccatttttcaaatataaatcgcacatttacagattaaaaaaaaaaaaattggattcatgcattgagttgattttgaaatctaacaaaactcttgtgttacttttaagtcatgacttctaaaattttagtttaaatcatgtgttattaaagtaatcgtttaaaatacaaattaaaatttgtgttaatctattagtattttaaaattacaaattaagaattatgttttttttgtctgcgaattttgttttcgttgcgcaaccaaagaattgtgggtaagaaatgtgtaatacaagtatgatgcatatagaatggctcgccatgaaaaaaagctgcataaatgaattgctaggatcatgaatgttaagttgatcaattatactggatataaaagttaaagtatcttcaaatgatactgtatcagacaaaccaaagaaacgtgtgagtatattagaaaatgaaggtatttagtacatttttatatatttaatgagattaacacttctaattatagtataatttatacactaacgcgttaatcaaaaatagacaatttgacgtagtaggagagtcagcttttaatctaaaattcgaaaaaatgaatatactaaatagctcatctctgccaataatgcttctcttgtttattatactctttactcacagataaatatagcgaaatggagagactagctagaaattacaataaaggatcacatacattgttacctaattattattttcttaaaatttgaacaaatacgtgtgtcagcattatgctaatcttctttgtatcgtttcaaaaaatttcaaatattcccggtaacaaaaatttgaccttaagaaacaaacatgtacacaaatattcgttgccatcacaaacacaaaacccatagatcacaaacacgttacaacttgttacctttttgttgttgttgttcttaatgattttgctacttgttactttcctcttgacttctttgatgatctcgggctttcaactgttttttgggcagcttcgaattattttcgtgtggctctgagtaggcattatattgttacgatacctagagacaacaacgataacattgaaacaaacttatctttcctctctcactattcacaacaactttaaaataaaataaaagaacaattgtgacaatctcggttttatttcgagtttatctattagttctgaaatgattcaacttttccaagaacacactgtatagaactttcctgagaatttcttacgtgcccaaagtgccaatagggtcaacatatggacagggtcgtacacgcggcattctgagtgatccgtaatgctttcgtagtttcgttacaaccaaaaatagtaaaatactaaaaaaaaattaattttttttgactactttactctttagtctttacaacaactttttggggtcatcatactcgcaaattcctacgcaatttctatataaacagatatcataagacttgcaatatgtcatcaagaagcttcgatatctcaatctatctctactcattctctcttaaaaaaaaaaaaaaaaatcaaaaatttctggagtagtttctcgagccatgaccgcaaaggtacaatacattttatcttccttagagtatgcgttaattaatcgttatatacacatatactattccacaagttctaactatatatataactatcactttttttacattgaaactatgcaataagccaaactgatttctgatttgtaatgacagaacgctgtgttgcaattgagtattcacgaggagagaaccaggaagaaagcgcttgtcaccgtttctcgattttcaggtatcttttataaaatttacattagaaatgtataatatgatactattgggaaaataaacttgtattaataatttgattttcttaataggagttacttcgataacaatggacaaaagtgggaaaatgacaatagttggagaagttgatgtaccagctgtcgtgatgaagctaaggaagctatgtaacacagagatcgtttcagtcgatgatgttaaaccacctgttaaaaagcctgaacctgagaaaccagctgaatctattgcatatcctgttccgatgaactacgcgtaccaattcaatcctgcctatgcaaattcttactatcatcaaccatacggaaattgtagagtggtagacgaaccaaattgtgtgattatgtgattgttctagtgttatttcaattaatgttcagttatttaacacttatagttttgatagaaatatgtaattttttcttagatactgttgtaatatgtaattttttgtcatcgttgtaatatacatttctcttgccaaataaatcaattttgtatgacaaaattaatcttaatacgctttattaacttttactcttaatcatttagtagtaataattagttttgttttcacaaatagtttcatttgcttcttgttgtctcctatgctgaatatattctacattttgtctcaagctagtagtatactaatcgatatgttgcgagggattggtaattggttgaatggaatcataattaatattggataccaattagatagtatatctacacacatagttacgtcgctctctacttcttcttgactcatgaacttcaagaatccagatcgttcacgtaacacattcgattgttctaaataaatagaaatttgaactattagcgagtgtcataataatggagagagtcaagatccgaaaagtcttgtacaacaaaacgaaacaataataaaagaccaagtctagggtgacgtggagggtccacatgtggaatggtgcttacgaggatatttcgtttcttgaccctgatatgaaaaattattctaagtctttttttttttgcctttttacgacgatttgtgacatccatgtagacgtgcgatcggccatagattaggttaaattattcaagtcttctttccaaaataactttaatatgaatcgccaaaatcttaaaactttagatttatgaatgtgctggttgcgaaatacaaatcttgtgttacttaattaatgttatgtagacaagaaatttagatgaaaaatcataatttggtagtagttttgaaatataaactaaaaacattaacaaaagatagaatgttttacttttaggtggtctgtttgttggattgtgaacctttttaaacgtcttttttttttttttgctacactagtactttaatatttgtcaaaatcttgtgttatattattcgagtaactaagttctaaatcctggctcacaaaatgaaaattattaaaagagctcactggtatgtgtgtttcaaaatagtgtttataatgtccacttggattttttggaataacattatatgttaaaatccaatggcttaaaaaatatcaaatcctttactggacttgtctcttagttatatgaatttgcaatcaaacataatcttgtgttattcaactattattttacaatctttgtcaaaatattatgttaattcaaagatttatgatatgtgaatcttagctaaagttgtattgggaaaatagctacgtttcaaggacatgtttccgataagccctctagagcccaaaatcgctatatacttgaccgtgagggtttcatgtccgcacatctccctcctttataagatacaaaagaaccgttatgacttctatctcggtttgattttgatttcagcttttgttgctatgtgatacaacttttccaacactctaccaataaatggtccctgcagtacacgaaggattctaaatactgcacttccttttgatttcggtacaccgaaattatattttcaaccaactcgtgaaaaatactcaaaacaaattgataaagatttactagtctagtcatttttgtagtcattcgaaatgctattgatatgtaaaaattcacaatgcacaatgcttgtgggttatatatttaataaataagtgcaaattcctacgtaaatttatatttaaacagatatcgttggacgcaattgtcatcaagaagtgttagaagatctcggagattacgagatggaactggtcatatttccatattgttatatagacaagttaacatttgtgtaatatagccttattgttaattaggtagatttaacatatatatgtcaaaaacatgctaatcaagttataactttgtataaataagtctattagggctaataacttcttcgctatctcaatatagtcctctctttggaaatttcttaagcttttccatagttttctagagcgatggccgcgaaggtacacccctttatctcgttttatctatctttaaataattatgcgttgattaatcattctatatttatatatgtactatttaactattgttaatatagtaagtcgattatatgcaaataggcatactaatctctggtttgaaatgtcagaaagctgtgttgcaattgggtatccccgaggagaaaatcagaatgaaagttttgtgaccgttgcaggatttacaggtatctttgtaagttacttttctaaatttgtagtattgatattgtgggggaaaaaaagtttattcatgaactttaatttttagtataggtgttacttcgataacaatagatgacaaaaccgggaaactgacggtagtgggagacattgatgtaccaattatcgtgatgaagctaaggaagctatgtaagacagagattatttcggtagatgctgttaaaccacctgagaaaaagcctgaaccggagaaaccggctccacctaaaccgagtgaaaagattgcatctccggttccgatgaacttagcagaacgagtacaatcctgcctatgcctattcttctgattcttaccatcaaccaaatacttgtgtgattatgtgatttttctagagttatttcactaatcttaatatatgaacacataaattagttaattttgatggaagagtactgtaatttctgtatgataaaaatgatgttaagttgtgttaagccgatactatcatgcctatgcaaattttttttttttttttttgcctatgcaaattttgacattcctcagaagatgttagttggaaagtaaatagaaaaatatcaatatctgcattacaaagttgatcttaaattgttaactttcactttcaatcgtctagtaaaattaggtcctttttccctcacgtacatagacttttctcctatgctgaatatattcaataatttgtaaaaccgatctccttatactaccactaggccaccatccctttggtagatatctaataatttgttagagttagttctaaacttgtaggcaatgttacgaggaattggttgattcggttcacaatttggatacaaattcgataaaaatatatattctcacacatacacagaatcatttgccactaatttttgtggactggcgaacattaaagccacttaaattttttatattagcagcattgtcgtcttgatggtttattgtaggagttcaaaattttgtaagtataaactctaaagtgaatgtggtagccagcttaaaagtttttatgagactttcccaaagaaaaatcaagattattatcattaatacattaccattattggtcctctttccacatctctacccaattctcctttgcctctttgagtccaaaaagagagttagtcttggccgggtccaggtttgtggacaagcttccgtacgcaatcccaagagccgacgaaccaaaggtcacgagtgtggtcaagtatggaacccacaaaggcacgtcccagacgtttctatccttcaaaacttcgagtactttcaagatcgccactcccaagcccagtggtgttcccacagacaccacaatcctccccatcatcctctcgaacacttcttgaggtatcgggggatcgtcttccgggtccgggtctggccggccgggtttttcagaggttctagaagattgaaaccctttaggtccagcgtggagcttggattcccatcttggtttgttgttaggatatagggtttttggattgtgagatttggttttgacggttgttcttgagagagatgataatggtagtaaacggtgtgagcacaagagagctctcatttctatttcttcttctaatgtttttctttatttatcttatctacatgtattatatggttttgtctttagggataatgcatattttgtttttatctttgggatatgttcattgccacacatttcatactatttatccttctttatatctttttcttcatttcatgaaaataataccgttggaacattttcttcaattttgtattttaagaacatggaattagtgttcagaaaattagaaaaatcattatttcttcacttcaaatgcacactacatataatataatccaattttaggaaccatttgatcttgatagcttttcatacgatttcctcaacacctgcaaggcaacaacgcaaacaataaacaaagtgcggaattaacttccagcgcaagaaagatactgcaaagcaatttcttgaggctcacggtacgtaccctactaggagacaagtaataataacgctcattattactgtccggagagagtatggaaggagattgcgctggtggagaagcgtggagtgttggtcggagtaacagagagtgacggtaaggtgaatttattggtgaccgcagcagcgtagagatcatgatgctcggcgacagaagacttgagcgatacggcgagataggagatgccagctccgaagcccaagtggcagtttccggcgaatttcccgacattggcatgtttattgttatcctgtagtaggaaattactgtaaattgcagtctattgtatggattgataattggtgatcataccttttatgaagttcgacgtactggtccgtctcatcatatatttcttccttcaaggttcatcaaatggttaattcaatcacaaacgtcatgttagatgactaacatttgtaatgataacatattatagattacctgtataagttcctccataacatcttccagagttataatcccaatgacttcttcatcttcatcagaaatactatcaatgtatcggattggactttgatgactagtttcgctggagttcaacgcgggaatactcagaaaaacgttggcgtctttattaggcgatcctgaaaaattacagaagacgtaaattttctcgtctcaaaacataatatgatttcgaattttatgctctctcatttgtatacgagtctcttaaccattgatgctcttttcatggactggagtgttggtattagtgtggttcttggtcccaacgacagcagccatgtggcttcgacctgtttggaagatgttgaggatgtcgtagagaggtaaattcaaatcgaccctgcttgcagattttgtaagaaaaataagctttgatcagtccagctttgaaagcagtttagttagagagtcaagatatgtttatacttgggcattcttctgatagggagatctctgatcgatgtctcatcttcaggacggactttgatcaagttctttacctattcaaaccaaaaaaacaattcaaaaatcatgcaagtgtttctcaagatgattgtgtgtaatagatttgttgcttactcaccagaataaatccaatgataacattaggatttacagagtatataggtattcggctatggcctgcacttgctattaatcccattgtctttctgtgaagcccaaagaggatgataagaataactaactggatattgtctaaaagaagaagaaagaggaattccaagagaagaacatactcgtcgagcttaaaatttatatcgagtgaaaagatctgagagactggtgtcattgcgtctttagcacttttctgtgacatgtccagagctcctgatatgattgttgtttcatcgtgagttagttccccgccttttcctgcctaattttcagattaaggacacggagaaaggagaagaaaaagacatgcattcacctcaaatattgacaaaacaataaaagcatctcaagttcttgaaacgaacctcgtttccgtgcatatacacaagtgacttgagctctgctcgtcctaagagtgtggaatgtctttttccaagcaacaaatcgagtagctaaagcattgaaagaagaaaactttgaattattgttttaacttcactcaattgattccactaaaagttccattgatgttaagctggttgaattaccttgctgattggataagataatgggaagaagactataataatcaaccgaaccaaaaatgatagctttgccccgatgctcagtccgtatctagagcatacagcttgaggtataatctacaacaatggaaagagaacaataagctattgggcgatgttaaaaatcagatcagcagagaaagctaactcaaattccattcacctcgccaaaggcaagtatgagagtgacggatatcagaatagcaccccaggctggaagcagggaatcgacaaagatcggtagagcctttcaaattttatcattgaaaacagcgtcagtaaaaactgcatcataagttctaaaaagccaaagtgtgcacaacacaaataagtatccaaatatatatgcaataagcttgatacctccattgccaaagcattgcctataaggagtgtacacaagagaaggtgctggtttttaacgaggggcagaatcttctctggccattttgttacaatttttttaaaatggcgttagtatgaatatgaagtattaaagtatgagtatgtcaatgggttcatgaaactgacctgcatttttgcggtcatggggttcaccggctttgatcatgacctcgagctcgacaatactaagggacatgagcccaagagtcagtcctgacatcaaacctgcgaaaaccactagagcaacacatacgagtaggtacacccagaacatagtctcacagcaagggacatcatttgcagccatttcttaagtaatttagaaggtagagactaaagactatgaatgccgagactgtgagagaatgagtttgggaatcataggagcttaaatagtagcagcggatgacatagtataccaactgctacaccaagagaacagaatccaagaaccaccatccaagaggttattacataagggtaaaaacaaaatgccttttgcaagaacctttgcattcacaatcggattttggtcatcggcccacaaaaactagttttgatgtccaccgtttctctctaatcattgtcaaattattatgccctagtgacctgctatcagacagaataaccagaaagagctatgcagtgaagctgcgaatcaacacttagtcgatatttcaattcaattatgttgtgcggttcttatacaaaaggtgtgaggagaagaacaacatgcaaccacttgcattgtcaactcagagcgactgaaaactactcattatagtcgaccaacccaaagaacaccaaatgatgttgtggtctttagtaccaaaacagtgacgttacgaaaaatctattttaaagtgtttttcggatattcagaaacgctaatacaagtaacttccaaaggagcaggtgataaaa

SEQ ID NO: 886 - DNA, 81575 bp, Arabidopsis thaliana
gatcaaaaccttgatgatacccaacccagatagcaatcgattgataaagaagcaaacgacggttcaaaggaccacaacaataataatatctgtaagggtcaagataagaaatgacctccaaaccaaaacaagccttaaagaaaagatttaaaatagttcagaagaacaaaaccaagaagctcttttaaaaatattggccaactccaacaactaatggaagcaagacacataaagattaatcaatatataatgtgtttagcatcactatcttgttcaggtttttctgctaaacaaatcctctatatatgaattcatcattctccactagcaaatactttattcacttcgtcactttgatgagaattacataataaaattttatttttttagcaatgtacctattactagcaaattcatagcaaattttaaaatctcatatgaaaattcttctaacaaaagactgatcctaacaatttgacaaaaaataataattgaacctagatcattcatacacttcgacgagttgagaaatctgcccttgttatgagatttgacataccttggactcgcaatacgcgatattttgcgaagacgaacccagatcgaagaaacaccaaattagattgtgttgcaaatgttaggagtctaagttttgcatcacattctaatttgatgttcttcgatcgaccagaaaaaaataaaagcttttcccggtgacctgagccagcaacgtctccgttaatcttcttcttctgaagaccaaatgtttctttacgaataatcgtgtcgttcgtctctaaagcaagaaaagttagacggcaagtagaagccaattaaacggcacactgttttaatctctaatcatcaaacaggaggtagtagtaatacttttcgacacgtggttgtgattacgactccgtttacgtttgaccagttgacctcgtcgttgatttttttttttggtgaacgggaaaaaaaaacacaacttttcaatttttctgattccaaaaatttcaaatcccatcgaagggggaaacgaaaaagtctcacttagaattgtcacaattcaatagtgaacagtgaggagaagaagaagactggagaaaaaatgtcgaagaaacttagctcgaactccatggatgatgttgatcgattgtttcagtgtttcaagtgtgggatttctccgcctggtgagcatttttcactctcttccattaatagaatcatgttctgtgattgctcgaatagagattcattgcttttagtagtggaatttggaatttagttaacgcaattgacaattgaatcttatgttcttctacaacaagacctgtttgagatctctgtgaaatatttcaacttctgctatgaaattataatctgtggaatttttcagcttctgctatgagagaaaagaaacggagcaagaaaatgttgaattcagagtatgactctcctgtgacctgtaagaagttgcagctaagttctttgtctagattatctggaaaaagaggagaaagaaatcagattgatggaagtgtctctgtagattctgttgtatgtatcttgaacacaaagttttgttcgttgtgttttgaatggttgtggagtgaattttgattctcttcttcttatgttatatctcagtctggttccagggatgtgaaaaagagcgttgggaggcagttttcacccattgtattttacggatctccaaatggcgttcctccgaaaaaaccgttgagtttattaaggctcttgcgtgagattcgtattgatcttagtgaagaaaggaaagcaatctccaggtaatctaatgaataagctggtgctgtctttttaggggattgtaacggttgtaaatcatggcatggtcttcactttgtttaggaaaggagtttgggctacatttcctcggcaagaggaagcgattaagtttgaaaaaaggcatgacaatgtgcggatttttagttatcaagatcattttagtggtcagagaaggtttctggtttcatcatatgaagaattctggaagaggttcttttatttcccttcttaaaacattccttgagtgttgcaggatcagttctttaagtgctttaattatgttattcttcttccttagatacctatctatggatccaaggcaccgacaccattatgaagtgattcaagaggtatctaaatctcattcccttactattttagtgtgtttctacataaaagtagatcttccagtcttgaaacaaatatgcatgtctggcttttgattcacagcatttaatttcaacggcttctcagggattgccatgccatatgtactttgatttggagttcaatcagaaagaaaatgaaggaaaaaatgtagatgaaatggttgatatcttgatatcagtcattctggaagccttgcgtgagaaatatgctatcgaaggacaagaggactggatagtagagcttgattcctcaactaaaggtactgtaatatatatgctctccgagctgctagttgaatatgaggtgtcctttttccatcagctttattctctgagggatttcaaaaaaaatgccagttattgttaaaaaaaagttttatagatattgtaaactgtttttcctttagtatttctgtagaaggtaggttccttttgactaagaattcctagaaaagttcatatgctgataaggtttttttatatcaatatgaatgtcatatgcagataagttctctcgtcatgtaattgtaatcattccaaaggttgcctttaaggataactcacacgttggtgcttttgttggagaggtatgcttcagttgatatttcacttttattgcctgaaaatatggcttattttcatcttcatgtttctccagctatgctcacggatagtaaatgcaaaggaaacagatgaaaggttgcgcaagctgtttgttcacaaagaggctaatgattcggcatcgctacttttcgtggatactgctgtttactctagaaaccgttgcttccgtcttgcactatcatcaaaagctggaaagacatcagttcttttacctacaggacgattcaaatgtaaggatatggtaagtccaccttaattcaagtctctctgttgtccctcactttcttttccagacttcttgttttgctttagaacagttcatagtaatttcagtatctaacaagaaaaattggtaaccaaacagggtgaacgagatgttttcatgacatccttaatctgcaacgtagaatcagattgtgagaagcttctggtttgcaagatggaatcagactgtatgaagacactgtgctttgacacagaggtgaatttttcataagttgcccgcacacttgtgcttttggctttcaattgcatcttcgttcatacttgactacttgagggaccacaaatgtttgagcctttaaactgaattctttggagatggcaggtgaacagtaacaatcttgtaagagaccagaatgctcagaaatttcaactgaatgctagcacaagtgacatgtcaacatcatatttcgggggcaagtccccgttcccgcaactggaccaattcatagaatccactgcttccacggggaatgtcccaggttgcatttaatctttgttcaacttgttgtgttgtggagagatctcaattctcatcttcttaaaatacatatgctgtgatatttaggtaagatacgctgctggtactggttctcagaagatggcctgattgtgtacagtatgttaagaaacagatattgcgaacggattggcagggaacataaaagcaatcatggtaccatctgctctcaacccatttatgatatacgagtatcgagtatgttatgtaatctctgcaccaaataacatttttttatgcctaacatttgttcaaacaaactatgttgttttagtgatgtacatcgttgatctcagaaggggaatctattatcagaaatgctacgatccagactgccgaggtgtgtatacgatccttactcattgtcttggcaaacaatatgaaagcaaaatcttgttcctaaaaaaaccaactctgtctgcagattatcggtctccaatacgtccagttccagatagttaccttcctgaagatatggtctactatcaaggagctacacagaatctctgtgacaatctttactctgaaggagaatgtcacgttgataaagaatgcgatccagatagtgctgctagcagaggctcatggtggcttgaagcagttaaagtcgcagatgatcttgaaagcaaacccaagacacttgaacctcttacctgggtcagttgacttattgttattgacttaagactctgtctaatttctcgagaatattataaagaaaaagctttggctcacaggaaaattacgaggaagatgatgactggtgggtagcagctgcagaagagtcactaaaacaaatcgcatctctaagtccttccccaaaatgcccttgatttagacatctacctaagtcaagaccaatctgggttcgtcttcttcccttttctctatttaaaaccaccatcgttccctaaatcaatgaatctctcaaaattcaatggctgcattaccagtattcataccagcagagtcatttccatcgatcctctcacatgaaaccttgatcaatcactttcggaccaatcttccgaaacattcatcaacaatcacaagccctgtccggcaaaactacaccgtttcatcaccttcctctctcctcctcatgccttcttggtcatcttcttcttctctcccttacatgggcgtcaagctcgtgacctatttccctcataactcttctcagaacttacctggcatccatggatcctacacactctttagctccactacaggccaaaccttagctacaatggatggtactgttttaaccctttaccgtacttcctctgtttcaggcttaggatccaaaatcctagctagagacgatagtcaagtgctgatcatggttggttccggtgctctcgcaccacacctgatcaaatcccatctagctgcgaaaccaagcttgagaagagtgatcatatggaacagaactccacaaagggctcaggagttagctgaaaccctctccaaggatcctcaacacaaggagatttcattcgatagccacgattcgctagatcaaatcattcctctaggagatattataagctgtgcaacaaactcaactgttccattggtcaaaggtgagttcttgaaacccggaactcatcttgaccttgttggatcgtttagccatgaaatgaaggaatgtgacgacaatgcgatacagagagggagtgtgtttgtcgataatgacactgcgatgatagaagcaggagagctcgcgggagcgtttgagagaggagtgattaagagagaagacatttgtgggaatttggtggagttgatcaaaggtgacaaagaagggagaaagagttcaacagacataacagtgtttaagtccgtcggttcgggtaccgtagatctcttaaccgcacaacttgttcacgagacttacctcagccgttgttaagcagtgtgaatgaatcttgtttgatcattgcgtttgcgaatatttcacattgttatttaaacgaaataaattattgatatggacctatggttttgttgttgtatagatggagttttattgccaaattttggattggttgaattctgatcgcaggtgaagcaagttgactttttgctgaactccgttcaggttttgctgatagccggtttggttagttgtccttctcaaattaactaattgaaaatgatatactcctaaatttcctattaactaattaaaattagtagctggagatgtgaatggaaattgattagtaccaatgtaaaaacggacaaattagtatgaaattgtaaaagcggacaaattcgtttactcgcatctgattttgtatgtaaacagtgttctctaatagtggcttcatgaatctctctaataaaatatgacttgttgacaaccacaaaaaatggcattgtgctaattagatccaatccaactatctaagtatacatatcactgacttatctttttttttgggatcaaaatcactgaattatctaaaatacatatttttggatttatatttgaaccaaacaaaaagacaggcgtatataaaagagactaatcaatcaattagtcatcgaagccgtcttagctcagtggtagagcgcgtggcttttaaccacgtggccgtgggttcgatccccacagacggcgaagtagttaattttatatttgatgcttttttttggggccaatcgggttttcggcccattaattaaaggcggtgataggaaaaaaaaacaaaaaagcaaatgacctaattgagtcagcttcttcttccctcttctctcttcacttagaagaaccgcaaagaaaagaccttattcacacaggtcgtctttgcgaagctcatcgtcgacgatgaccatgatggatacagacgaagggaagacagtgatgtgtctgttaacagacccagaaggaactcatttaggttctgccatgtatattcctcaaaaggctggtcctttgcaacttactcagctcgtcaataggttccttgacaacgtaatcatttcttctctcttctttttaactcttaagttcgtttaaagaattgatttttcgtttttgggtagcttaggatttgcagaaacatgacgcctctgtgtattggttgatatattcaggaggagatgttaccttacagtttctatgtatcagacgaagagcttcttgtaccagttggaacgtacttggagaaaaacaaaggcaaaaaaaaaaaaaaaaactctctttaagcagtgtggttgtggtgtcttatggctctatgaaaatctaataaatgttgttgcaaaattgtgcatttcagtgtctgtggagaaggttttgacgattgtttatcaacaacaagctgtttttcgaattcgtcctgttaaccgttgctcacagacaattgctggtaatgtcacaatacatcatgttctgtttttttagattgtttaactatgtgtcaatggcttacttacttgagttgttttgaatcgtaggtcacgcggaagctgttctttgtgtttcgtttagtcctgatggaaagcaattagctagtggttcaggtgatactactgtcaggctttgggatctctacactgaaactccattgtttacttgcaaaggtttgaaatttccctcaccattgttcttcagtttacttccctctgtagattcttactaatagttaatctataatctttttcaggccacaagaattgggttctcacagttgcgtggtctcctgatggtaagcatcttgtgagtggtagtaaatccggtgaaatctgttgttggaatccaaagaaaggagaactagaaggcagcccacttacggtaaagtctcttttacttggtattggtccagtggtattggtccagtgtccatatgctttggtttgttacttattaccgttgtcttttacctttttcttagggtcacaagaaatggattactggtatctcgtgggaaccagtccaccttagttctccatgccgtcgatttgtgacttctagtaaagatggggatgcaaggatttgggatattacactgaaaaaatctattatttgtctcagtgggcacacacttgctgtgacttgtgtcaaatggggcggagatggaattatttatacagggtatgtttctaatacgtgaaatgttttgtgttgtttttttaagctatggtgtctaatgtgttttgacaaacatttctatgtagttgatagttaatagcttagagcttagtttgcagtcttgttatcttgttaatcactcagtacttgcctccatgtttaagctccatgatcactttttagggacctaatattatgttcttcattgtattctatttgaatatttgttctgtgtttggcagttcgcaagattgtacgattaagatgtgggagactactcaggggaagcttattcgtgaattgaaggtaaccttcttagccatgttttggaagttgttctgatcaagtttcgtatatattagtatcagacgcagttctcatccttcttgtgtctcgaaagaccttataatcagttactgatgcaattccatcccaattgtattctggtagatggctttatgtgtttcgtgttctgaatgtatctggttcagagtcaccaactatcactttttaacagcctcaattttcactctgttacttcaggggcatgggcattggattaactcccttgcgttgagcacagaatatgttcttcgaacaggagcttttgaccacactggaagacaatatcctccaaatgaagaaaagcaaaaggtaagcttctcactccactccacactctatattagttttgtcctttaccatgattctcatctctccctttggaaaatttgctggcttctttttattacaggcgctcgaaagatacaacaaaacaaaaggggattcccctgaaagattagtctcaggttctgatgatttcactatgttcctttgggaaccatctgttagcaaacaacctaaaaagcgcttaaccggtcatcaacaggtaacttacttgaaaaattcactcttttcgcctaggcttttggttctgtttctgaatctttacaatctaattttggtcaaatcaacagcttgtaaatcatgtctatttctcacctgatgggaaatggattgcaagtgcatcgttcgataaatcagttaggctatggaatggtatcacaggacaatttgttacagttttccggggacatgttggacctgtttatcaggtcagttggtccgcagacagtagattgcttttgagtggcagtaaagactctactctcaaggtaaaaacttgcttttatataatgtgacgtaactcaatgaaatgtcattcctactctctactggagatattgctcagtttctgaatcagaaagcttgttacttctacagatatgggaaattaggacgaaaaagttaaaacaagatcttcctggtcatgcagatgaggtatgaacacttttaaaactaaagtttttagtggaatttgaatctttctttctctcaacttttataacttttttttgttattgttgtggataggtttttgcggtggattggagtccagatggagagaaagtagtttctggtggtaaagatagagtgttgaagctatggaagggttaaaatggaagaccattttggagtttttgtttactcaaccaacacttattttacacatatttatctatttcgccttgtttggtttctacacatcaatgcttctctatgggcttctttttgatcttatgcttagtaaaacaactcttttttcttacctcaagttgttactgttatgaaggttaccatacaaatctttttaacattagctattacagtaattcatgcacaaaaaaagttacaatgaaacaagattagcttgcaacaaaaaagaaaaagaaagtattaatttgaagaaagattgtttagccctaggactataattggaccagttctgagtcggaacattattaaaaatgacaaaaatcagattgagaaatctctctcaacttacataatgattttttggaccataaatcaccatgaattatgagagttacttgcaaaaaaacaatcataacacaaaagttacttggggttgatcttatatcgctatcatttgccaaaccaatgaaaatttttgaagaggggacatattttcagaaacgatccttggctcatcagtttcctaatgaaaccaaccaaacccacaaaaaccaaaaggtccaaaacgtggtcatggaagatttcacaatcagtactaagtgataatgacaatcacatcattctattcttatctccctctttctctctttaatggcccctctttgtaaggaccataagctctagtagcttctctctatcatcccatcacctcgaccgaaaggagaaaagatatcagcgaattcttcttatagagacaaccaacttgattctagaacgagtttggaattttgatcagaaaactttctctttggcttgctttttcttttagacataaaccaaactattaaaaccaaaattctctaaaaaagaagtgaaaggaactataaccattaaccaaacatctctctcatttcattccctttggatgtctttttttcaaagaaaacaaaaaagatgatacatcagatatgaagaaaaaaaacattatagtgggaatggtccaaaaatcataagatttcatctttatttcctttatttatgtcttatcgtatatgatcatataaccttattgccaaatcaaaaccacatatttttcatgtctccaacattaggtccttttttcgaggttctagattctaactaatttttgaaacaaacctaaactttctttgagacataaggttaaacaatcacatcagtttaaaacttacctttctttctccttttttttttacttatgtgaaaaaaaaacacaaacgagaaaaacaaaaaaaaaaaatagtgggaaaatgggcaactgtgggagtgaatatagtgatgttcgggtttgattccttggtttttttctagaagcatatatccctctttttctctcttgtcttttggtattttttgaaaaaaaaggaaaggtttataaattatgtgcaatgaagccatattctttttggtaatcatagatgaaaaaccttttgtgctcgtaaagggttatattctcgatagtttgttgcaaaatgaataactaatggaatattattggtactataccttctctttattttattaaaggcacattgcttcaatattgtccaagaattttttgattccgaccccttgatgggaaaagactaattttatgtgtggttttttcttatgatcttactcttctcatcttcttcttaaaaaaaaaaaaaaaaaaaatcaaattgcaagaaattaattaacagattttattttcaaactcttcaatgaacaaaaagcagctaaattttgaatatattgccttatcttttagtcatgaaaatgatctttcaaattattgtcattagtagcaaacataatagagtatgtactattagtgtagcagtgaatgttatgattattgtagggattaatgtagtcatgtctagtaataagagtgatgcctttatgcttcaactttttatataagaagattgaatcatcttttctgcaatttgtctattggccacaccttccactcttggaggtgcaactatattttgcaccctacaaaatggtcacgtgacattcgttgaacgcacgtgttcctgacacaaaccctatcgacttgtgattcttttcatttcaaaatatatactaacactaaaactgctgaaagtttgagcttacgtaaaatgattggcagcttctcttgatttaatgcaaattgcgagctgagattttatgttaaaaaaatttgttgaaaattgtttaatcaacatgaatccatctaaaaaagatgttgtaagtagtcttatatagttttacaaatataatactagtagtgatggagattataatggagaggattacttcagctacgcgtatatggttagaaactaacatgttaaaaagtgtaaaatttggtaggaattacgaagtgcaagagttttatgaccaacaagagtgagaaaggacttatgatccaactctgagtcgttgactttctaaacatagtccgatgaaataaacctgtttcccactcacatgaccaacacatgcatgtttcagcctttcattggcattagacaagaagtggggagcttgtgacgtaagatggtcctgtcttcacctgattacaccaatcccgagttgatttaaaaccattaatacttgtagttaaatcattgaggttaaccatttatgtagactgatctatgcaggttgtggcttaaatattatctaatgttttatagaaccactaatgatacagtaattttatggattaggacatttaaaataacgtggaaaacataaaatatccttttagttgtatttgaatgaaaaaaaaaatggaattttaatcaattgtatagcacatcactgctaacgaaaaacaatttttttttgcaagttttcaataaattcaacaatatgtccttaaagattgttctttctattttgtaaaaggttcaattggatgataaattaagcatgtaaagaaagaacatctttaagaaaagcaaagatttcattcaacaacaacaaccaaaagcaaagaatggatacgaaattccgagtgataataactccaaatatctcaaccaaaacatttacggaaaatgtaaatgatatttttaggaattggcaaagaatccatcccatgttgtcgtttacctcacgtgtcatgtatggacccatccctcttcctcttattggttttgttaattgattccataaatatcgatctatcaaaccgtaatggtgcattgtgatgtgttatagaatatatattgtctgagaagtaaccatctaatggctgttagattagtatttttttttttccattgaaagtcactagccaaacggagaagtttgtaaatgtcgttttatgtacataaattctgcattatgtgttttccataatttgtaatactgtaatttgtgttaatacatattattgttgtttagtttatttgagttttaatttgtataatgcatgcatattgttgatagaaaaaaaaaatatatatatatatatatatatatatatatatatatatatattgtttaaaattggggtaatttcgtgttgatatgaccaataaatctgatttagaagtaaaattaatcctatcaaaaacgattcattggcttgtaaaagtatacattagtattcagatttatttagaaaaatgtcattaatattgaattgtagaatatatctaaagtactgatattgaaattgagatgagtagagcaaacttgtagtactcatatatcagaatgagttttgtcacataaataaagcttgctgccaaaaaaagaagggttaaatctttaaaaccccgacctaaatagttgttttatctagaagagacaagttaaagcgttatattaatggcatcttgaatactatattgaggcattaagatgtctagatatttttgagatttagctgaggaaatctattttcgtcttcgatatctattttaagatcttcataatcttaaaattcaatcaaactctttagaaaggctgtcgttacgcatttctttacatttaaaaataaatgtcttttatacatataaattaatttgtggtcaatgacataaaatgaaacataaaacaaaatgagtgaataatagtgcaagtgtgggtccttactccttacgataggattttgaacattattttatactccataagtgttctattatgaaacacataattaatatataattacaattgttaaaccaaattttgttatacaatattcacatttaacataaaccaaaatattatttaaatataaagaaagctaaactcgaattgaaatatagtagttttaaattttcgtaatcagctgttaagcctgtaatttgacaagagaattctcatagtatacagcaaaaaaaaagacaaaatctctcaagtcccaaatgagcaaaaatacaaatagtgtcagacaaacgttttaaaaacgttgagaattttcttaaattatttttggaagtatacaagaatataattttttcaaaatgattttgaattttggaaattttgtttagttacgtcacaataattttgaaattattattttttttgtcggcaactgtgattttgaaattagtttcttaccaacataattattttcttataagaatgaaggaattgaataaaacaaaaatacggcgaataatattacatgttgattgctaacagagaagagtaaatcgcacggcccagaggcacctcagataaacggacgaatcagaaaagaggaagccaatatatacggaagcagacaatcattacctttcatcgcaatatgactcactatcctgcgctgttactgctactgtacgccaaaacaaatgcggtccctacctttgacttggtttaaaaaagtcaaaattaaagcagcttttgtgggataagattgttgagagagaggacaagaatctgtatctaaattccacttacgaaattacgagaactctttgtgtctgtgagataacaaaaaaattaaaaatggaaaaaaaaataaagtagagagtgacacaagtgctttgtttggttcgaatattatttgtaccattaccattttattttctagcacacaattttgcaatttttctctctttttttggcctaatgatttgagatattcgtgctttcttaccttttaatttgtaagatcttgtgaacattttaaatcatacaaatatctcttaaatcagtgatgagattcgttttgtgaggaggaggaatctagaattgatcttgtatatatatatatatatgcaattttaaaccattcaattcttggattctttttttaaaaaacgtctaaattgttggattcttttatgagaactctgaacaatgttacttacgttacgtacgtttaaaacaatttaatatttcttcttgttcttgtgtatatctcagcattgacattcacgctaaaaacaaactaattatgtatattttgtgtaccggagaaatgttgtttggataactaccaagttgtaaaacatactataagctactgctcaaaattttgtactataaagtatattgattcaatatcatcacagaatgatgtttagtttgtctccaaatacaaaaatcatggatttataaacaaaaaccctgagaaaaaaaaacatgttgggtttaataaaacatggagataaaagtctaaactaataaacctagcgggtatttctttttcttaaaagacatgattaatattttcttcgcatctatattttggaaagtgaaaaaacatactacatacattagttagataaatcttgttttcgcaagaaaatctgatagtacttgctaaaattttattattttcctcgttattttaatgagatttgagaattgtaaaactagatttttgagggctagtggtcgttttataacaatgttagtcgcgtcacctagtaacctgactttaccgaatagttaataattttcttaaatgccaacataccaaatcattaccagtttaccactcaaccttagtccttaattgataggaatgtccattgtttgatgaaaaaaaaaaatgaaaaaaattgataggaatgtccattaagttaaaattcttacaatacatgttagtgttttactgtttgctgactgaatcttaaattgatttaccattagtggttggtggtaaatttgaaattttgtcttacatgctttgtttgttcagaaagacagaaaccatgaagcattttcctaaggtataagaacattatcgtaaatctgttttctagttacacagaaacaaactttcctctatcattattttatcactcagcaaacttaaatcattgaagtgaaaagacaaattgatcaacctcatttgtaaaatctattcacaatatatatgtataaattattagttaccgaatcttattggtactctttcaaatattaacaaatatacgatgatggagtacaacataatatatgattttttgaaaagagtataaataagtgaaaaagaggaaagaaaagaagatatgaaaacccatcaaaagttaaaaaaatttctttttgtcaaatgtataaataattgaaaagaataggcaagtcaagtgctctctctcccacacccatcgattcctctcggacactgccccaatctctctctctctttcgacaaagaaaaagtcagcgccgtcctttacgccatagtttgtctcctcctctctctcctcctctcaccaacataatcaaagaagctttcctcacgaattcaagatcgccatgtcctccgaggattgggatctcttcgccgtcgtcagaagctgcagctcttctgtttccaccaccaattcttgtgctggtcatgaagacgacataggaaactgtaaacaacaacaagatcctcctcctcctcctctgtttcaagcttcttcttcttgcaacgagttacaagattcttgcaaaccatttttacccgttactactactactactactacttggtctcctcctcctctacttcctcctcctaaagcctcatcaccatctcccaatatcttactaaaacaagaacaagtacttctcgaatcacaagatcaaaaacctcctcttagtgttagggttttcccaccatccacttcttcttctgtctttgtttttagaggtcaacgcgaccagcttcttcaacaacaatcccaacctccccttcgatctagaaaaaggtttgttcatatcgaactaaacacatctcttagttcaaagtttctttctttaattatcttttttgtcttgttgcttgtagaaagaatcagcaaaaaagaaccatatgtcatgtaacgcaagagaatctttcttctgatttgtgggcttggcgtaaatacggtcaaaaacccatcaaaggctctccttatccaaggttatcatcaatctttttttcaaaattttctcaagaaaaaaatattaacatttttttaattaatgtgttaattaatcgagttattacataaaacaggaattattacagatgtagtagctcaaaaggatgtttagcacgaaaacaagttgaaagaagtaatttagatcctaatatcttcatcgttacttacaccggagaacacactcatccacgtcctactcaccggaactctctcgccggaagtactcgtaacaaatctcagcccgttaacccggttcctaaaccggacacatctcctttatcggatacagtaaaagaagagattcatctttctccgacgacaccgttgaaaggaaacgatgacgttcaagaaacgaatggagatgaagatatggttggtcaagaagtcaacatggaagaggaagaggaggaagaagaagtggaagaagatgatgaagaagaagaagatgatgatgacgtggatgatcttttgataccaaatttagcggtgagagatcgagatgatttgttcttcgctggaagttttccatcttggtccgccggatccgccggtgacggtggtggatgatgaaaacgaataaaatctcaatttacaatttacaaaaagaaaaaagtcagtttttaattattatttttgtttgttaaaacttgacatttattgtgttataaaaaaatatatagaagagaagagacagagaaagaaagactaatcataattgttctttgtttagattcatagctaaaattagtaaattagtcttgatttaatcatttggtcgatttgaattgacattgcatataccaaagctgtttcttggctccaaatgtataaatcatcttttcatttttcctatttcatttatgaatttatctgtattactaaactagtgatactttaaataccaaaaagcaacaaattttgtcaaaccctctatttttagtgttgtaaaggtcaatacgggttgacaaaagaaaaataaatagaggctaattctgaaacgaattaaagagttaagctaatttaatgtgcctagttaaaaaaaagttggcagcgagaaccatgctaaaaaaatcgtatcgtattattcactttcatttaatgtcgagataattaaaaacaaatcggtacagtttagtgtaataattgagaaataatcatgtgggaagagaagctatagctagacgacagttaatacggttcagaccggaaacaacgagtccggttttcgctggctttaatttcacgagacaagaccctaaatctggcgtctttagtcccacttgtgccttgccttctattaaatggtcaacctttttttattataaagttttttttgtcgtaatccgaagcgtcggtcaaacatattttatttcattatgtccgtcgtattagaaaaatcagacaattaaacgtctctggaattaactaaagtagggtcgttattgctataatttaaaataaggctatgacgatttagatgttacgaatttttttgtataaatatcatatactatggtcggtccagattctcatgacgagagatgggcatgcaagttgttacctctctcgattgtcttatctttattaggtttttaaaagtgttttcttattactttagtgaacaagcatttaatgtaccaaaaatatcaaaacaaatcgaggaaaaaaagtgtttcttttttagaaaaaaaaaatatccaacgtaagagttggccatattttctaatggtcccgactcacaaaaaaaaagatattttaatagataaataaattacaattgaattaaaattaataagaagtaaaaaaagatagaattaagtaataattatgcttaaaaatcaagatccatcatatgtcaatcacattaatgctaagcaacaaactcctatcaattactaataaggcccattattttataattaggcccattaaattcaatttcggcccatagtttctttcgctttctccatctgacaagtgaaagttgacactgtaaacaactacaaacaacatttctgagattgcgccggagtcaaggagagggagagagcgatccaacggttgagatgtttctacgggcaatcggacggccattattggctaaagtgaagcagacgacggggatcgtcgggcttgacgttgttcccaacgcgagagcggtgctgatcgatctctacagcaaaaccctaaaggagatccaagctgtgccggaggatgaagggtaccgtaaagcggtggaatcattcacgcgccaacgtctcaatgtgtgcaaggaagaagaagattgggagatgattgagaagcggcttggttgtggtcaagtcgaagagcttatcgaagaggctcgcgatgagctcacactcattgggaaaatgattggttcgtactctcgttgcctatatagattgagaacaattggaatatagattgatttgttgcgataatcactcaaattgagaaatgggttttgtaattgagaatctgaatcctgaggctttgtggattgttaggttgcaaaatctgaacactgagcattgcaaaggtgacccttttattgggctattgagtttaagtgtgtgttgaaaactgatatacaagtaagggaatgcaaaagtttaggtttttatataatttgctaactttggctatgagtgaatggttgcatagttcactttagtttggaacggcttttgctttcaatgtaggtgtgtggtcatcttcttgctttgtagttatttgtacattagtgttattgcttgtactctcttttgaatcttcataatcatgtgagcgaggttacaagtagctattgtttgagacttatcacattctttggttgcaatatacttccaatggttttagaatgatggcttatttgttctgattttgtcatttacaacatgttcttcaccatggagttgtaatttgttctttttgcatatgcagagtgggatccttggggtgtaccagatgattacgagtgtgaagtgattgagaatgatgcgccgattccaaagcatgttcctcagcaccgacctggtcctcttcctgagcagttctataaaacgcttgaaggtctaattgcagagtctaaaacagagatcccagctgctacacccagcgatccgcagttgaaggagtaacttccagtttttacatattgtgtgcttgttgcttttttggctagagttgtttccgaatcagtggtcaagcctctgaataaattgcttaataattttcataacgataacaatgtctgttcacaaatgttttatcactcttattaaacaaatgatgtttcttcccttttgcaagaacattcgccattcttaaagatatgaacctgattcccatctcttacagttattttcttatcgactaaccgagtcaagatggacacgaactcatggcagtccttacacagaattttgttcttaacaacatgaaccggggcttctggtgacgcatagataaaaccatacacaacagcttgttttgcactgtgaaagcttgcgttttcattacctctgtatggtgaaccaaaccttttgatctcttcctttatcgattctatctctgcgtaaatcccattcgttttatccactctagtaacatcctcactgacaaagctgtgaacttttccttgaacctccacagtgctcttgcctagctttttactcaagcgcttctcagtcatcaaatttcgagtcttttgagctaactctggttttccagattcgtcgtataggtcagccaaaagaatgtacaaggctggatcagatggtgcaagtgctaagcctttgttagccatatcttctcctaaagacagatttccacggtatctacaagctctcaacaacgttttgaagatcatagcatttggttttaaatgcattgtctctacaactcctgttgcttcctctagccgtccagcacgacctaagataccaactagatgaacatagtgctctacctgtggctcaatgttataaatctttttcattacttggaaatactcaaggcccaagtcagtcaatcttccattactacaagcagagagcaatatcaggaacgttactgaatcgggctcggtttctttcatcctcatctcctcaaatgcagatagagcagatgaaataaaaccgtttgatgccaaaccagataccaacccgttccaagaaaccacatcaggcgtagctatttcttcaaaaactttctttgcatcttccaagctaccacatttactatacatgtcaacgagactatttaaaaccgaagccgcaccagaaaacccggatttcacggagtaacaatgaagatgtttcccagtttcaagagcgcccaagttggctgaagctgagataaacccgggtaagcttaactgatccattctgattccatcaccatacatataattgatgacactcagtgccatttcatgcttgcccaactcattaaaccttgttaccaagctcgtgtatgtgatattatccctccttttcatcgacctaatcacattccaggcataatccaccttcctcgagctggcatatgcatcgacaagtgaattccctactaccatttcaccatctacgtgtcttctgagtagatatgcatgaatctctaatacccgccttacatgtctcaatttgctacaggctcggagaacaccggatagggtaacaacattgggttctacctctcgttttaccatctccatcagcagtccaaaacaatcttgcacgaacccgtgatcaacaagacctaagattaacgttgtccaagagacgacgtttggtgaaaccattgctccaaagactctcgaagcttctacttctgatgccgagcacttcatatacatatctacaagtgcatttccaacatcagtgctatcctcgaagccaaccttaattgtctgtgagtgaatctgtttcccaaaatccagcgaacgaacagcagaacacaagctcaagattgcagagtatgtgaagttatttggttgcaaacccaaacttcgcatctcaagaaacgtgccaacagcttccttggctctcaagttccttacaaaccctgataccacagacgtccaaagaaacacgtcttgttctccactcgaattcaacaccctcacagcatcctccattttagaaaactgcgagtagaaatcaacgagagatgtcttcaataccacattcagcggaattcccctgacaattatgttgctatgaatcgttttaccaaactccaaaccgagaaaggaagaggcacctaaaagcttaacaaatgtgaactcgttaggaggaacaccagctttaaccatctcagagtaaaactgcaacgcttctctccatttacgagctcccactaaagaagatatcatcatcgtccacgagatagtatccgcgttctgaagagaactaaatagctcacaagcttccttaaactgcccacacttagaatacaaatcactcaagctgcttccaacaactgagtttccctcaaacccagtctttataacagagccatgaactcgacctccgtaactaatatctcttaaaccagcacaagatcttaccaccgaggaaaaagtgaattcgttcgggtgtgttcccgaagccatcatttcctcaaacaacgaaagcgctgatgcaaactcttggctcttggtaaaagcagagatcataactgtccatgcgaaaacagttctgtgagacatttcatcgaacagtttacgtgcattccatataccatcggtttttaagtaaagactcaaaagattgttgcataagtcgagattctctaaaagaccaaactttattactgggcagtggatgtgtaaaccaatacgtgatgaattcgattcgcagaaggagagaatccgaatacatgatttttgaagattacccaattcgttagtgcgagagagaaatgcagaagctgctgctgctactactttgctcgtcatttcttttgcatcaaacttttgaagacgataaaagatcgaaagtttaatgttcacattgctgttgagatttgatctcaaacacgatttagttggagggaagcaaagccctaagtactgtactcaaataaatatgaaacatgttgtaattgtaacaagtcaactaacaacaaataaaatattgcaacactattagccaacaaattatcacacaacttctacgttctaattgttaaaaacttttttttgttgtgcgactgaaatctttatttatcatacttttttgttacaagaacttaaaacatacaacaaaagataaatttatattttttttatgtaatatggtgtactattggctagcttttggtttggttacaattttttttcacattttatgtccagagtaaacacagaattcatattcataattttcaaaagtaagtaatagagaagaaaattttgtttgataaaaatttgaatcattaataataataaagtaagttcatcaatatttgacaaaagcccattctagagtttaaaacccctacaaatagaatataagcccacaagacaagagtccgtttataggaagaagatggatagtcaatgcaaaatcaaaatatagtagaggacttccaagtttcagtttagggaaaaccaaagttgcatgatgtcactagcaatcgcattattttggatacgaaagtctgaaattatgtttttagtaatcctgaaattatgttttctttttttggttgacctagtaaggtattcaaaactcgttaacggaaatcaaacaataacgacaaaaacaattgtttggtaacaatggtattcagagaaaaggcagtcacgggtgagtagacaaagaacaagtccgtgaacaaaatctgatattttatatatgcatgtgtatgtgtgtgtgtgtgtgtcaatggttgcatgtacattgtactcatgactgttcttccacttgggactaaacttcaaggaaacaaacaagaaaaaagcagcattacattttgggatggcaagtggcaacgtgaccaaaatgaaaaatctttacttttgaaatatcataattttcttacagaaaaacaaacttacgtggaaaagtcaactatcaataattcacgatttgtggttgtctaatgtccatagaatagaaaaaataaacacttgacatgaatacaaattgtacgaagtagtttagaaatttataactaaaattttcttagcacaagattattgaaagacagagattatacatcacaaatattcttccgatccatttttcatttatcgtatgcaactctcttgtatactagtttataataggaattagttcaaaccactttgctacatgttttatcaaaaattcttcatcttgatcgtgaaatttgaatagcaatggaattttatgtttttttcttttgttaagagaagaagatggagacccgtgaagaccaaggtttgtctccaagctacaagttaaccaaagcgactcttctatgccatctatgtgtctaccttgtccccacctaaatcttagcctgagttcaaaatgatttgatttgagtgctctatatactatttcttttggttacttagtttataaacgagtaactaactagcccataatattcaatatccatataaatacagtcattagaattatatttaaacaagtgttggtggatcaatctatggactgatggtacttattccggtttcttgtgatagagagagaagtaatcgtgtccacatcatattattgacgtttttcccctttctatagcaaagttttaacttttatgggtccataatgtgatgtacatacataactgagtgaaactagatgtcaagatttttcttataaactattttgaaaaatagtgcaatcgacaggctaggtctacaaaacgttgaatttaacctctcatttttcgaaagtgacatgtctctacatagcaaacacctagttaacattgaaacgtgaaaaagaaagaaaggaatatataagttgaataattgatcccgaattcgaatgtctacgaaagactttataacagttccaacacatcaatgatcgatccggagatattttgttaagttaacatagattgatcagtgtgagaaacaaatgtaaaaaaaaaaaaaacttacctctttgaaccagaaactcttctaaggagagcaagaaaacacaacacacgataaagtacgaaaaaccctaacaaaacataaacattaaaccacctctgtttctcatgaagtcctttcttcttcaacacgtcacctccagtaaccatgcagatctttgtttgagcttcctccaaccagaccaaacacttggaggctaagcacgagtactcgtttatcagaagtgcatccaatgcatacttatacattgagaagaagtacatgaaaagccagtacttgggaagactttccttggaaatgaagtaaccggaaaacaagaagaaagccgctagaagaattgtcacaagagaggttcccgtaatgtaatttggggcaagagagctcaagaagagaacaaaagagttcgccattaggagaatgatccatatcacgagaacgaagtacccaaaagcttgccatgtggggcagagaccaatgaggaaatagaccgaaacagagtaaatgattgagataacgaacaagtacggcaagaatacgagtgtatttgcgagaatgtgagaggagagtctgtaaataccactcgaagtctccctgagaagaattggacgctcgttgatgaagatcgggagggtttcggttgttgaagagaggagaaaagtgagcgtgaaggcgaacataccgaatcttttctcaattcctgctttgccgattccgatgttgatgtagatagttcctaggacaagaccaactacaagggcttctaatgcattggttagaagtagttgccttgtccggtaaatgatcttccagaatcttctcgcgagaaggcttatctcggtgattcttgattttctatatcgaacaatactctgtttttctctctgtttccggttttcgattgaagggagagcagtagcatcggtgtttccgtcggattctcgtagttcttgaagtatttccattgcatattcaagggaattgagctgcggagggacggtaaatcccttgaagagcaagaaaccttcgagggagtcaagtcttccgtggtacacaacagttccttttgaaagaagtaacaaccgatcgatgatagacagaatcttgaagctaggctggtgaatggacaatatcacggtccgttgtcttgacacagcgatggatttgaggatgtgaatgacgtcaaaagcggatttactgtctaaacccgaagtgggttcatcgaggagaagaaagcaagggtcgtgaaggaggcttaaccctatcgagactcttcttctttcgccaccggataagccttgagcgagtcttgtgtgggaaagatgtgttaggttaagctctgatagaagagaggttacggtttcagaaactattgatgggtttgggagcaagagacaagcagcgaaggagaaggtctcggagacggtgaggagagggaagaaagagtcatgttggggaacgtaagaggagatttttcgataagaggaagggttaatgggaatggagttaaggaggattgaaccggaagttggggaggttttagaggcgagaatgtcaaggagagttgattttccggcgccggaagggccaacgacggcgaggatctcggttggatgagcggtgagagtgatgttgcggaggataaaggagggtggctcagtcgccgggaagcggaggagggagagagaggtttttggtatggtgtaggagattgaagaggtggttaatgtgtaggccgccgtctccggcggaggtgatggaggtatttccatagagaatggttctaagttctaacttgtaagagtttaagacgttgaagagtgtagtgaatgagatttatataattaagtttttatttggtcttgtgatgatgtaaatgttgtaagccaaaaacctaattttacatttttgggttgttttctttcactaagattttttggatttttgcagtatattgttttaaccttcgaaatgtatatgtgtatatcggtagagttttgggtcaaaaatctctcaaataaatattatttttcttttttttctccacatatacatcaccttcgaattcgaatacaatctctaaacaaaaaaaaaatcgtaatgtttttataattttcgatctaatttacgacaaaataaaaaatagagaatgtagcttatgggcttgaaaatttacataggcctatacattacgggctttatgaaactcatatgtagccctgtaaataaataaacgagaaccaaattggatagacaaagccacttattgagataataataaaatggaattgtagtcttgtagataatgttcccattctcaaactaaaacattgtccaatatcgattggaaaaaatgtcaaaagaaatcacgaacttttaaatttaggacgaaaaaaacataaacttgtgaaatgttatttaaatcacaaaattttatttgatttctgaaaaaaatggtcagggcatgtcgttatttttctgttagcagaccaaaatggcctagtcaacaaaatttgaccattttattcaaaaaccaaacaaaatttcgtaatttaaatgacatttcacaagttcattttttcgtccaaatttaaaaattcacaattctttttgacatttttccaaatattgatccaaaactaagtccattaatcgtgttctctctcacacatcaatttctctcgcttctctccacaaagatctcaaattagctcttactctaccatcttagctcagatggcacctcaagtgaaccatttaaatgatgattcattttgtttatgaatgatgattcatttccacttgcaaattccaatttccttggattttgttccacattagttacattttcataatgaaatttgtttcttgtttgttaaatatttttgccgaagtatgaattactccaattcttcttatttcaaataagtctataaataagatatagtaatatgcccttaatcacaaacagtcacatgcaatgcattcaaaatcccatgattagtatatagagacctcgagtaatgtaaaagaacctcaacttaaactaccatgttcgttaattaattataactttcgaacaaatatatggctaaatacaggtaatctataatacaatttgcgatgattaggacattgtgtacatacataaacagacagatcatttttttcgtcggacaaataaacttgaaaacattattaagctaaattggtcggagacatgtgtcctacgttagcatctaaagaaaatctaagaagaggggacaaccaaatctacttgaaaagtcttatgaaactaaacaagaagttccttttttttttttttgtcaagaacaagaagttcctttttgttctatacttctatgtagtagaaaacggtgtcgttttgaaagtgcaacgtattcttcctcatgtgggacttttaaacatggccacgtgtatggttctccggcgtcgattgctctttgcttccttgtgaggtggttgttctcgacatgatattgatagtgttgattatttatttctgtattaattgacatgatagtgatcatgattattgtttagacaaaagaaaaagaaaagaaaaactccaaagagaagtgaatgtgttattttgttttttgagtttcgagcggatcttgtattatgattctgcacagaatgttatgagactgatccattgcacgcgttgagtttgttttatgctcatcactattactacttcggaagcatcccacggcatataaactcgtcttataattaggaggtaatataacttaagctgttcaagtctaatatataaatatatacagattttgatctccattggttttggctttttcactgatattcaaattagatttcgatctcgattgattcatagtatttaggataacaatctttggataatatataaatgatatgatatcctttaacttttgagatagtttttatgttaaattataccaacattcctagtatggtatatatagaccttaaagtttgtccaaccgttactttcctataaaaatgatttctcacctatatataagtggcatgttttgtagtaaatttatctgaaatgttaagtttaaattgtttctgttgaagcgtttcccataaacatttcgaaaaaacctataaaaatgttccacatttggttaggaaaatgatcttttggtaatatataaatgaattggtaatccttaattattgaagtagttaagttagaaaatattcttaatagatgtttgtaaaaaccttataatagattttcacttggtttagttagtttttagctaacaaaatgcatctaaaaagacttttaaagcactatattatttgatgagcttttttgttataacttctttcagtttcatatttaatttctaagatggaccaacgatcaaggaagacaatattggaacaccggagaacatgttgcaaacatgtactagattgagactactattaaaaataacacttaactattttgctgaattgattatataagtatcaagatagcatcatgatgttatcatacatagcgttttatggtttctaaaagcaattaagcttttgtggttaattttctcgatcaactaataatctcacaactgatgataaactagagaaaaccagtgaagaaagttgtgtatatattcagtggtttattattatgtcgagatcagtaaattgtctcttctggtaactgaatcaattgatttttatggttagtctatcaatcagacacttgagaaccccaaaagatgatctgaataatagatccggaaatcctccactattatttcattattagttttgtaaatataagagatttgaggttcgattttaaaagctacgagcaaaaagtaacaagagagagagagagaccaagtagctaggtcaaatcttcatttgagtggttatcatctctgcctagactttagacctaacactttctcagtcgagctacttcctcaggtcaacaatttcacaccttctttctctctctcctcttttattttgaatacgataataatactaacatttaaaaataaaaataaagtatatatagaaaactaacgtaaattatttgactttatttctcaagttaatatatccatatacatgaagtagttttcttgtaacttgaacgattgataagtgaaaatatcaaatctccaaaaaaatgaaattaaagtaacgaggagatacaaaaaaataaactataaatatgagtggaggaagaagaggacacgatggttagagcttgtaacgaacgcaaaattgaagtggagaagttacagaaatttatgaaacgcgtaaagatgtttgtttaatgatgtgtttcaccacaagcatctctatctctttcgcacaacccaaaaaacaaattgtcataactcttgttgacaattcaattctttaatattccatctaaaacctattccttctgtttttttttgtttaattgtttagaaaaaaaatttgtttctaaaagattgatttttttaagttttccatataatatttattggttaatattggtaaattgtaattttcaagaaaaatagttaattatcattggtttagagttatagaaaactgtaaaatactaaaaataatatatttataatcaacatttaatatgttttcttaatatatgtgtttttttctaaacaatcaaacaaaaaagaacagaggaagtaattgttatacaaaattatatgaccaaacaaaaattctgctagtttgatgatattttactatgaagtctaatatgaaaatataatttacaccaagaccatctcgggtttttaagctttgaccgtttaaatggttgtttcgtgtaacaaagcagatggctcgtctcgtggctctgccagtttttctgcaaacttttttacgcttttcttttgagcatgtgtttcaaagaccggtggtttttgtttaaagctcattctatatttattttgctgttttaatttgaatgagtaatttatagtaattgtaaggatttttttggaaggaagctaaaaaaaattatgagttaaaataaaccaatttatggatgcaaatatatatattttttaatggaaataaatattttgtcattgttcaagcaaataaaaccctaaagttccagcagaacaaaataaggttttttcacgacaactttgaaaacaaagtaaagaaaagaaaactttgaaaaatgtatctacacaattaactttacaattaaataataattcaaattcgttagaacataactgaaattttggcaacaaaaacttggattgtcggcgacactttgtttaaatcggtataaattttgtttcagttgaactataatttttttaaaagcaatttttgtccatatgagatttttggaaatgcatgagaaggttaaatatgataattccaaatcttttgaaactctataagaatctactatcagaatttagttttatgcttaaacctgcataatattctaaacatgcaaaacaaaaggtatgtcgagttatttttagttacgaatttaataaaactacgtttggcaactaaacacattgtcaaacctcataaattgatgtcgtctcatgttctctgttttacgcccattgatccggtaaccatttttttctctcttgttttcctttgaagaaagaaaaaattctgatttttgaacttttttaaagttttgcattcggactattgtttggtgactctggtcggttgttgtggtgggatccaaaactctcacttgcgagatttgtctaataaccttaaataaatactatgtcactcgttttggtcgtttgttaactcatgtattaaatccaaaaataaataattctagtcaagaaaggaatgcattctctaacacaattacaacaaatactaaattattcagttgactaatcactcaaagtctatcgatcacagtattttatttatagttcacacttcacacaagcaaaaaaatatacataacctgcctgataaacatatattaaaaaaacattcttcgtgctggccattaactaatttgttgccgtccaaaatctgaaaactttcaagtggagccaaaacatggatctagtgctttaatcccgattaatttttttgcttgaggacgtagttgacaaaagaaattgggaaataaatttgagtattgattcaaaagattagattatgtgaaataacgagaatttaaatgaaaaggtgaaagcaatctgataggctgatagatattcaccagataaaatataggtcaggatgatgaattagcactgtcagattttcatatatatattttcttggaaagtgaaatagcaaaaagaaaagtagtgaaaatgagaaaaataaataatggaccagtcactggtccatgcaatttaaaagtaatggaaagttaaataacatgcaattttccattacttttattttttttaacttttaaattttttatttatttaaattattaacattttcgctagagtaagaaaattgcatgttatttgtagactaaaattatttgaagagatcaatttacttttattttcatcttgagttctaatatggattgatcactgatataataagagtagaatgttttacaagtatttgaatttctgatatatattaaaaaaacattaagatacactatctatgacaatacaaaatctaacaaatcataatttgtcatggagaatctatccactttcctaataagtaataactgatataatcagtacaaaggaaatctacaatttgctgtgttgagtagtttggcaaccaaaaagctacgtaaaataataaagttgattaaataagttcagctattttatcatagtcgagtctttaatttgtaacatttatttctagttgtaagctatttgcttaaacaaattcggttattttttaaatatatttcatgtattattgtggtaccgccaaaaatacagaatggttaatattattatatttgcatttagaacgttcaatttttactgaaacgcaataatcaaaagctcaaagcaacatttttcttgagttaaatagttgttactaaaagatactttaatttcttgagttttttttttcactaagagaatacaagaaattttgaaactatgacacatttttgagttgtgtgacaaacgaaaatgaagacgacagagatatgtaataaatataaatttactacaatatagttttttcaatcctcaaggtgtcaggattcacataatgatccatcactatacaaaggcaaaaaccaagaccattcactaatctgagtctctctgccacaagatttatctgtttttgtcatcatcatcatcttcattttaaactaatttcacaaaatcaccaaaaaatcctaatttcatactattttaaaaaaattaaacctaatcgctaatcttctccctctgttccttaattgaagtcaagctatccattgatttctccgaaattgaatcacttgaaatccttgaaaacaaataagaatctacaaaaacatacaaatagtatttaattagcatttccttcataattaacttaacagtaaacaaaaatgatccaattcaagaatttataatttaccttcagacgacgaagtactaagtttctcttgtgaagaagattcactcgtagatcgtgataacagagaagattctgaaaataagttataactcattaagataaagtgattaaccataaaacacaattatcaaaatttgacaaattattaaaaaagactctgttttcgaacatacctctcgagccatgaaacgatttcttgcaatgaagaatcgcactttgaatcccatcttgttgaacttgtaaagactcatcgattctgttcgccggagacattcctccgatcgccgcagaagctgaccgactcttcccaagttgtctcctcacacttctcatccccgacggaatattactcctctgtttctctctcgtcgccggtgaagacgtcggagatgtaatcgtcgacgatgactgcttcttcgttgatttagtgtacaaaggtttaatgagactgaagaatctctttgaaacagagtcgtcgaacatcgtgtcgtctgtttgttgtgatctcgcaatgcttgctgtttttctgaaacttgttgttgttgtttcatcgtcgactctgaatcttacgttgagactagttcggttgttttcttctttcttcttctcagtcgtcgttgacttttctgacttcttgaatgagaaagcacgaaacttttgaccggatttcaaaagagtggtcggagattgttggggttttgaagagatatcaacgaaaggaaggactttgcttttgttagaaacagagtacgttgttgttgttgttgttgtttcgagtctctgtttttctttaggtgttttgaaatccgagagagagatcttgagctcgaagaaggaatcctctccttcgcagaggtcaaggtcgggatcttctgatccggtggtggaatcgacggcggattctgagattctgatttcacggcgaggtttgatggttgtgttgttggttaaccagaatttcataaaggtaagagcttccatttagaaagagagaaagagagtaatggagaaagaaagaaagagagatagagataaagatagagtaaagagtttggctttgtcaacggaaatggtgaagtgaggattttatatagaaagaaaaagaagaaagagaaggtgagcttttttcgaaatggggtttattattttttgtttggtaaaggaagaaaaaagagaaataaaaagtaatgttttatttttgtttttttgagttttctctctactttttattaccgctcctttctttttctttattcttttcctttgccttttttttttctaatgcacaggttaatttgttttatctgttgtcttcatttatttagcattctatgccataatagtagctttttctttagaataaagtgcttggattattttttatttttttgtaaaatatgctggtttctaatatctgaaactaaatatttataaaattttaaaattattttaattttccttttctgaaaattaactctttcttatgctgtaaaaatttatgtctttatatataataaattttctctaatcaatataaattgaaaataatatattttgaaacaaaattgaaaataagaatataatctacgaaactaataaggatttaaaaaaaagaaaaaaaagaaagaggagtggagcatggaagaaaagaaaaacaaaacctctcttaacatactttctctttgcacctttagggtaaaacgagagatgcatgcatgctcaactcgaagcaaaagcttaagaccgactcgtggtttgaccgcaacatatcttcaatacatggtttttgagttttcttgaacctaaaatttatatcacaaaatatcgtatgaacgttcaattaacttttctagtcttaatatatatgtatatgtatccctaatatagttaaacaactgttattatatttgagcaaagattgaaaaatgttattatctttataaatgataccaactatagttacaaaatctcaaattgactcttatagtaataaaatacctaataagatagtaaaaaacaagacagaatgaagaacacagacataaataaataagaatgacaaaaagaaacatttactagtttactacacagaaaaagcagaagagtttagctatctgacggtctgaactctgaccttagtgtataaagataacttggggttctttccatgacaaaagtatagttggcccattttacatacttcaattttccttttgtctctactcttaaagaataaattgttacgtatgtactagtatccatttatcatgtctatgagtatagcaaaggttttaacctcaaaagctttgactcgaaaagctctttctttcgtgaagttcaaaattttacacctctttcactttaaagtttaaagaacagtttgcttttaacttttcctttttttttgtgtgttgttaaaatactttgtttcttagctttaatacaagtgagaataagttattcattagacgaactctgttttatactacttgtttaatatgttcccaactttgttttctatatttcgattcgattttaagcttctaagtttgttatgcaattgttgctttcaatgcagcaaacctatgaaccaacaaaccaaacttattaactttccttggttacattaaagcattctttactaagaatttggtttaaactatataatagctggtgacaaattgggaaaacggaaaactattattttgttttttattgactattacaatagttttctaaggatagcatggagctataccgactaaagtgcttatactgttagacctaaatatgattaatagaataatacaaaagttatgcctattcattcgttcggaactacttccacgcaattgtcatggaatgtgtgtatgcatcatcacattttatagaattgtttattaggagttgaacgaatttttatgttttcgcctataaaaaggtgctcataaaaataaattaacagcataacataaagaaaacttgaagatataattcaatagtagctcttcttatcataagaaaatgtgcttcatatctttaaaagaccctaataatggtttccacgactaattatcactacgttactcgtataatatgtatataataattaataaacattgtgtagacttgcattctttacacactagcttactcaacttcctcaatatcttttaaacatatacatacgaattcattaatcaatttttctccaatgaatctatgatcgacaatgagtcacagagtaattaggttttcaggttttcaactttcaagcattaattaacttttatttctgattattctgattaccattcactcttcactgcaacattttattcttcattccttataaggaggctacagattttttcattaaaaaaaatcaaattcttatattccattattttggtagattattatactctttcgtaaattcaagtgttattagaaaagtagaaacttcttttagataaaacacaatattaccatacgtatctgcaaacaaaaagctaatcaagtaggcttgaaactacacaaacattcttagtaaggccaaatggtccaatgaggtaccacaagcccatatagggccatatatttctctttagtgatttacaagtaatcaggcacgtaagaaagtttccatagtcgtccaggaaaggcttcatcgtctgattcgctttcatcatcagaactctctatccccagcaaatagttgacaacctgtgaggtaacaaaaccaccaaaggcagataaatagcttgtttagcatgtatatataaaacgagacaaacatttgaagcaagaatagcttacctggtgagttgttatgaggtcgagtggcttgttgcctgatttcaaccgacattgtttgttcagacatctcaagttttcgtgccaaacaatagaatcacagtaactgcagtatccccggccagatctcaatgcctccgatgaattagccgctgcacggttacacaaactctactttagaaattacataatagagaaagcagcgatttctgaaaggggaaaagataaaatcgtggacaaaagctctaaccgatgtatgctttcttaaaggcttctctccagtcaatatcggactgcatacgaatcaagactttgtgattgaagtgaaggtcaaattgtgattgccacagagagttctcatgcgttgcttggttccaagagctacaaacagatgaaacaaaacagataagtagaaggaaaaaaaaaagaagatgcaaaagactctgtaatgtggaaatatagaggaggaagtaccgagacacttgagctgaggaaactaaggacgatatctcgaggaaactgaagatgtgaataaggatatcttgtggaagtgaaggtatatctgaaaaaaggatttgcacatggtgaaggattatctcgagatattaaaaagaaagataactagaaaaacatacctatatcttcttcctcacggttcttactacgcctctttagtgctacttttgcctgcttgaattctacaatggctaaattcttcttctgtttggggagcaccgcttccacgctcttcaggagaaggttagcggctgaaacagcagctgatgtattgatgctaaatgaaagcaaaaaaatacagaatctgaaaactgtttgtagtattattcttaaaagacttaagaagaagaaacatagatttgcaatagcagaaacagagagataacaacaatctaagagatttgtgtgctatatgaattatgtactcttgagtagccatattgtcacattaagggtttcaaattcgattattccaatctaagaaaaaacttgcctttacgtttacattactaaaatctcgtataaatgaaacacaacattctacatattcaaatttgtttgcaaattgtatatgcagattcaaactcaagctaatttgattggtacaaagtaaagccattcaaagatcaatcctctgcttcataattagctgaaagttcccaactttattgactttttaatcgattctaacaaccctaagaattcaactacaacatgaacagaatctcaacacagaaaaccctaaattaaagcctcaaaaaactctaaatactcgcaattgagatgaaattttgaagtacttactcgggaagaagacgaaaagcggagagggtatcttggaagatcaaagctttgacatttttgggtgatagagagtaagcaagattcaatatggagcttagttcattgcaagcaaatgggtaaatacgatttttggagaaagcttctcctacctttagattttggtatctcttcatttctcttttctggggagatcacacaatcatcgtcgacgtcaaggttctttaatcattgtatcggttttgtgtaatttacttaattccaaatcaaaccggaaccggtataatatttggtttggtataatttttgttattcttttcatatgatttctagttcaaatgtatatgaaaatttctatgtaacaaacaatcataatatttttataaaatatctttactacattaactacacattcacaatgacataaatatgaacatataaaaaaaaatcatagttttgtagaaaattctataaaacacaaaaagaaagagaataagatgaaacctaaaaagttatctaaaaatggaatggcctaacaagtaattgaagactctttctttgtgatatgcgggatctctttgttatatatatatcgtgtgcatcaagaaacacacatcaatatctgtttgcaattttcaaaggaagtaagtgagctgttcctttttccttgagcctccttctccatacaaatcattccattgctttagctcattcattcctgctccttctgatgcaaaactcgcagctacctgcaataacacgacaacataactagttagggtttttagttttcttgtcttttcttgacaaaatgagataagattttagttttttttttgtcaaacagataagattttagttagacctgggttttagcttttctcatgtcttccatgttcaaaggtctcaatgtaataactctttcctcagaagcttctgcttcttcttcttttgattcttctgtgccttttcctgcttcttctctcttcttcctctcctaaaaccaccaagatatttcaaaatcctaagagactttgatcgaatatagagcgcaagagagggccattcttagtcttttacctgatctttcaatctttcctgctgaatcagctctctaactggtctataagcagctgtgatgcataagttctgtttgtacaaaagttcaacaaacagtcagtttccaacgattttacacgacagtctttggttatggttagagaagacacagaccttgagatcacttccactgtagccttctgttatctgcccaagctcatggaaatcaagattctctgttttctctttcgacaacaaagttctcaagatcttctctctgctctcaatcgaaggaagtcccaccattattctgttatatccaacacaaaacaaaaatcagtcaaaatagtgtaaagactgatttagaggttttgcattttaccaaaatttcttttataccttctctcaaacctcctaatgatagcttcatcaagatcaaacggtctgtttgtcgctgcaagaacgagaatcctttcaccgggtttcgtcattagcccatcccaatgtgtcataaactcattcttaatcttcctcatagcttcatgctctccaactcttgtcctttgtcccaacatactatcaacttcatccacaaatataatcgttggagatactttagctgctaaagtaaacagagctctcacattcttttcgtcttctccaaaccattttgaagtgattgtagacatggagacattgatgaaactagctccagcttcatttgcaattgcttttgcaagcattgttttgccagtaccaggtggaccgaataataggattcctctacatggcttgagaagaccgccttgaaaaagatccggtcttctaagtggaagcattacaagttcttgaagcgaatcttttgtttcgtctagagaaccaatatctgcaaatgtcacaccaatctcatttgctggtataacttctggtcttatacgcttctcaaactcattatcaggaacaacctcaggtgcttttggaggtaatggattgtcattcttgtttgaaggaagtgatatttctgactcgtttttgttttcaggaccagattttgactcactctttgaacatacttctcctccttttcgcttagagtcagtgtttgtatctagcttcaacgagtcttcaaatgatctgtttccaccttcttggaatatacttagtccatgagacaaactgtttcaagatcatgaatcagttaagtagctagaagatcagttagtatctgcaaatgaatgaataaacagattcttgtacacttaccttttggaagatattacaagctttccgtttctgtattctggttctttggtgtgtatcaaatgataagtgattgcagaaaccacaatttcctcaatatggttactcaaacacattgtatctgcgtggcatatcgaagacaagtcatcgcattggatatcattagcagcaagaacctctgcaatgtggttcttgttgtcttgaaactgaatcattttcatgtcgtcttctaaccgagatttccagctcacgagctgagattcatcttctggtggtctgatctcgatgttgtaaggaaatagagcggaaatactttcgtctacttcttggcaatcatcttcaggttctaatactcttgagccaagaattaagacaggaccagagagcttgttcaagagcctttggaacaacttgtagaatctttctgactcaagaagcttctcaacatctctcaagtatatgattagcggagttgtttccgatacagaactcaagacctacagaaaatgacaataattgtaagacatccattgaaaaacaatgtagcaaacttgtgataaggtttgtctttttaccttgtaaagtgattgcaggaaaagtttctcgtcgaaacatagatttgtagtgcgttttctggaagctagaagccataaggcatagatgaaacaataagacgtaagaactaagaacacgaagttgaatgcaaatgtaataagaagatacaataatcagttttccaaacctgaaacagaactcgaagagcgggaagatatgctactgatatcagaagcagcagaagcatttctcttgtgtcttggaagacgattagagctctcagtactcctgaattcaaaggagctagtgagctcacaaagacgaaaaatcgattaaactaacttcaagggaaacaaaggcaaaccttgatttaagatcatttccactggtgtgtcgacgcaatgtccctacattttacaagaatgttaaactctttagatcatgtttcaagtaataagaaaagaaaaatgagggaagagtctgtgttgtttttacctcttggttcaacttcgcgttgagagagcatagagaaggaacccatcaaactcgacactttatctaatgttaactcagaaatagacctcttgtgaaactacaaaccaataatagaagaaaccaaaattacttctctgaaatcatcaacataaaaacaaaacacatacaagtagtaacttacaggttctctcttggtgcatccatatttactctgtatctgtttccaaataatagacaaaaagaaaaaatcaagaactattctgttttgtagtgggaaatagtaaacatgcattgattgatttaccttaatagagaagtcagttatatctaacaacaatagctttgattcaaagtaatgagacaaagcttttgcaagcatttgctgataaaattccgcaggaccagaaagtagaatggctttacttgcaggtgcaagattccgagtgtgcttcgatatatcatactcttttaaatgaacatatgcaacacttgtcaacaattctcgagttctcttgctgccatttgaaaaaatgtattcttcttattagaaaacattaaaaaaatagacaatgtataattcactacttatactgatttatgacacttttgaattcaatctcattcacattcttagaaatgcaagaacttgctatagttttagtttactaaacaaactagtatattacagactggattcaatagtatccaaaaaacagtgtagcagaaaaggattaactaaattagtagaatcacatgtgagaatctttctatttctctctctctctctctctctctctctctctctcactgtctttgccaaatcatccacatgcttattgtgcaactaacctaccccactttccatcaatttctttaatttcttcactttcttagaaagaaaacttttgtattcacagaatttcccatctctatcatttctcttaacccaaatatactcacagattctaagattctttcaccacaaaacaataaaagataaaacaaatcctcatagtgaaaacataaccaacttgccaagttattttttccccaaagattcaatctttttaacagctggcagatgtaaaaaatcataaccaacttgccaagttggtatatcaatcacactcttatctaaaaatccatagatctgaaaaaaatccctaaggaacattgaatccttgattaagttcaagtcatagtaaaactatataaatctgaaaaaacacaaagaacagagcttttgttttctgaggtaccttaagaaatacggaaactcttcaaaagtgacagtactttctctaccatcaacaatttgtctaatcaactcttgctcaatctgttctccggtgagtccatcttcaacagaacctgacccgtttgcccatcttcccaaactttgacctgatgctaacccaatccctaacccaacaccaacacctaaagctgacaacaacacgctcttctgctccattttcttaccaataaagaaaagacttcgagaatcagacgaaaaccctcgattctaaatcagaagatctagggggggttcaacgagcattcctcgtaaaagaagaaaaaatcgagactcttttgttgtctcgaaatatcttttgtgaaggaaaggaaaagtgtttttttttttggtttggggtaaaaataagattttaaaggtggacgatggagaagaagaagatgggtttgacgggtgtggagaaagatggatctctctctatttatagcgacgtttgggtttagtcttttggtcgttaaatcctttcccgggaaaaagcaactcatatggtaacatttcttacaaatccaaatattttaaaaaagaattaccagatttttactttttttatttagttaagttttctgtcatttaaaaaataaaattcagtggagaaatataataactttaaaagaaaagctttctttgactggtaaccggatatttcggttttctaattttctcatgtctaaaacgtttatttttctctttgaaggtttcttctttttggtcggttttagtcttttagtaagttttagtttggtagggtttgacatgacgacctgctactcccggttatcaattcctccaaatccttttctcaaattttgtttgtttctattgtaattgaaactacttaattatggacaataggtctaacgtatttaatatatacggctatataattgtgtgtgtggtccaagaaatcaaggatgagagaaaatgtagccatacttgtgtggtaaattgaagtcatgcagtttatagctatatcacacacattgggtgattaaatcttgtgaaagacactcttttttttttttttttaacatgcaaatgtaccgcaaaacacatgtctcaagaagcgcgaacgatcaaaatcatcttacaagtttatttaccgtatgaattgactgcttaattttacacaaaaccatgccctatactagatgattttgacatttagtgttcgaatacatggatctcttctttggactgtgaagtcaaattcttgggaaggatatgagtattcttgttgaaaaacgaatcttttctttgtagaatctatcatctcatgggcatgtgatttcgcaggtaactttccatattaaattagattccttagtctctaacgcaaaccgactctgtctttttcaagcataactttactttttgttatcatcttatagacttatagtaattgaaaagtaaaagtcatcttatagtaattgaaaggtaaaagtgatcaaccaaacactttctttttcaaataaaacaacctgcttacttggttacaattacaaatgtctacataacggggaacgcttcatcaatttatcttagttacaattccgtctttgataacttcagatttgcaatgatttagtttggattttccgaccaattaaaaaccattttgaatcagtttaattattttgtataaattaatttttttttactattccttttaaacttagctatcattagtgaccaataagcagcagttatgaatatgtaagaactatatatcactttacgtaaaatttaaaaattatgtcgtaatattatcaataattatgttaaccaatttttaatattaataattaaatttgttcaaaaaatagttattatttcattactattatgttgcaaagatatataactaactgaacgacaaaatatcactccaaaatcatttttttttgtaatgacaaatttcaccacatgtaaaatttgggatggtttgcttgctagctacctattaattgacaagaagcaatgtagtgtataactcttttgttaaattgtataatgcgttttataaatatattaataacttttactttacactgttttaactacttttactatataacctattaaaatatcaacaatcatttttttgttaaattttctcatttgtttctaatcgcaccatcttcctttactaaagtatcttttaccgcatcacttaaacttaatcatccatcatagtcacgactcattatataactatgatgatcgtttcgttgaaaatagtatcatgcacagaaatagagatgcatatctatagaatattcgtgtgtagttgctttagaaggcagcacatggatggagattgagttgtaacaaaaggctaattacgggttaattccactttgcatattttttgttgtttccttcaaaaactactaacaaaatgtatcactttacacgccatcttcatcttttagaggcggcttttcagttataaaaacaattaaagagtcaaatgaaaaagatatgtaacaataattaatatatactaccatatgcttaaaacaaatcttacgacaaattacagcactaagagcatacaaatgatgccaaatcattgctctctaatcacatacgtttattatatatactaagttaaatataatcaactacttctcaaataaatatgagtctagttaacaatatataatctgctttgttgatcaataaatttgaaattaaaaataccacaaaaatgaaaacaaaatatattgtttttacaaccacaaatttttcatgcatgtatgaatggtataatcgactaaaattaaaaatttttttgaagtaatgacaaaatatattcaaaccagtatacttgaaacaacatgtgtgtgcatgtatgtctcttgtctgtttctaatgggattgaattacccagtttctgtggttaatggtattgaaggaaagtgcaaagttgttttatagacaatgattcacattttgcatcacaattaagaagaaaacgtgtatatgtagtatataactgatattcaagtttatcttacatcatcttaaatcatccgtacaaaaaattaggtatacagaattatagaatataagtctcttatgctatcaaaacctgaattatagaaatgtacttttagttattttggaagacgaaataaagttaatgttgcataggtcaggaatttttcatttaaattcggtggatatttaagaaccattgattttgtctgtgctgtattatatgctttacacatatatagtgtaatataatatttgtgtggccagtgagaaaactagtcttgacctggatgacaattggcatgtttcttgatgttttagtctaattcaaagtaccaataaaataatatctaactatctaagtgcataccaaaaaaaaaaagtatatctaggtttcggcctagttgcaaaataaaaattaaaaatccaaagcaaaaaaaaagtatgaagtatttttttttaagttcatgggaaccaattaaagattaataaatttaccaatatatattatgtagagaaaaatatattaaaaatctccaactcgatcacacgatttggtcccaaaaaaccaaaaacaaattacccataactatattaaatgttcaacttttgaattgagttagtcgaactagttcaaacgttagccaaatttaatagtgttaagttcgactaacgttgggtatattcagccaaatctcaatttggccaaaacgagcaagttaaatagttgcacaacgagtaactctttctcgaagcgctggcctcatgggtaatatggtatgttattaaactttcatctgtgattactacatcaaactttgatttgtaaaattacacacaaaaaaaaacatgtttccaaaatacatgcgctaaggtttaaggaaagaaaaagaaatgaagtgatcggacatttaagatagttttacaaattaaacacaccataagcctgcagtgattattacacatcttaaaaaccagtttttggttcgaaaatgggtacaagtgggatacacattgcatggtcaatgtgatttatttccaattcatattaatttgtctgttgtgacaagtggatacacactttgctttcagttatgttaacaattcattggtaaagtcttatatgttacatcctttttaattttaaaacatgtaaagttgggattttgtgtgtgtgtgtggggatctctaacttaaaaataagatcacatgccaaaaagctgttgaaaaataagaacagaaaaggttcaataaactattatctttttctgctactaattcatattggatctggtatggtctaagtttcttctaagaaatagagatttcactaagacaaagaatagtttcttgaacaagtgtaacaacccttaagaatcctatgaaacaaaatcttattataaaatctcatgtcttgcaaaaatatttaaagatttggatttaatacttcacttgttctcactaacctctaaaaatatcgaatgcatgtatattccaaattgagttgctatttattcacttaatcaagtatagttgcatattcctagacgttgcctttatcaagacatccctttctagcgtttttggcataatttcccaaatcagcatcacatgcttcttttctgaaaccaatttattttagggaaaatgtgatctaaatatgatttaactttagatgacacgcaatacgacccaacctttccacttcgccactaagtcatagtctcccatcggcaaagcaactctttgatctttcttccacacattatattccttgaacaattttttgtgtgtacaattatctttctttagcaaatgcaaaagttgaagtattataatcaattcataatgatttaaaccaattttatgatggtctctaatgggtttttttttttttatgttatggtgtcaaagaaccatgatacgagttctttcttctacgatagcaatcatacctcaaaaattagttttgattaatttcgggaatactctagttatcaaaatgtaaaagtgggaaaattatatggattgcacgaaaaatagtcttcatattaatagttattgacgtctatagtcccactacaaaattttgttgttgtatccactaagaagttaggccatcatctcctttttgtgtatatgtccatattaagcctaattttttttttattgttaaaggttttcgtccgtcaaaatccaagattgccaatatttttaaagaaatctatgaagagtgtgatctatcaaaaactgttttactatacatccatgaataaataataaacttatgaaaactaattggtaatgagagtcttattcaacaacaaaatgaagactgacgcagtaacgagagtgtggaagacgaaagccagttttatggaccatcctgctttggattctccaacctctcaccccttctctgtcacagactcacacatcacgcatctaactatagttcccaattcattcttgtcgcatatatatatataatttttgtcaactaaataagtaaattagcaggcatgaaccaatttggaaatgtgaaacctacaaatgagaatttttaaccctaatagaggttgtaattttggctaatcatgtgtgtgttttttaacttgagcgtcggagaattttcgataatatctattccaaaattatcctatcggtgttaggtatgtatgatatgtttgctctttagagggcttactgctctatagtgagttcctaaaactagcaaaacttctatcctaagttgatcaatctattcattcttaaatatttgcatgattcataagattaagataaattaacaaaaccctttgattaacctatttggtctcaatgatttttcctcatacatatacatttttggcatgtcgtcagtgaatattgttctgaacacgatcaacaatttttgtttatatttatcaagtgattttctaattttgaatttaaaagtatatacttccaaaaataatgagttgtgatgggacaaagaaagaatgagacgaataccaaactacatttcaaggaacaaatacactttttcataacattaacctttgaatatcatcaaagggccaaaccagtaagaactcacactttgagatctcatgtctttttttttggatacgtctttgtctttgtccaaatcttaactcaacattacctggttttggacctactatcttttaattggttcctcttattttgttttcagcagtttatttctatgttatgctttacaaaaagtgacaaatattgggatccaattaaacattattaagatacgaatcttagatctaagtcacggagcgagaagaaaacaataattctgtgaaataacaacaattgatattaaataactttgtgaagattaattaaccaaaaatactttgtctcctactctcatgtattcggcaacaactctgatgttaacatttgtatcgaaatacccagggacttcttatttcggcccacatttggagtccagttgatatggccttcttagtttagcctatatcaccaaaacctcttcatactttcatatttggcatcaatatttcgaactgtcttcgtgaaaatggcaatgtgagagaaccacgaaagttgcattaccgtgaaggaagaaaaagaaacttaaggcaaaagatttagcctaagaatttttaatttttggcacaagaccaaaaacaaaaatgccacaaaagagagaagaagagagagcctactaagagtttgctactaactattctaaccaaaaggagggaaaaacaaaaaaaaactgttcacttcctcaataataccaacagcttctttgatgctgcatccacttttcaagaatcattagcatcgacttgtgttgttgccactgggaagccgctctctgaagctgctgcattagaatcttctggttcttttgcgatttcttcttttccttcaaaagcatttgccaagaacccgctctttgatgaaacagactgatcaggatttgcttcagtagcaatgcctgatgcactcatgttcttgttgccaagctctagctgaagctcctctggcacatcttcaacagtagaagccggtttttcctccattccacgaggttcagcatctgcaggagttttctcatcctctgttcctgatcgtttagtttgattctgaaagagttcaaggttcagtgtagagctggatccagtggcctgcgttcgcgacgtttcaggtgctgaaaagaaatcaaccaaagtagtagaacctttagcaattgaatctttaggtgaagtaatagtgactgtaactgctgtcttacttgctgcacaagcttcggatctcagaacagtatgatcttctttgggtacgccatcactaccaaactgtggcatgagagagagggtttggcctgcaggttcaatgactttaccctctgcagaagagccagcaacatctttcatcagtgtatcaataggatcattcctctcacccatagccacagaaccaacacccgcatccctcattggatgatcatcaggcagcgatgtggtgcaagtagcagactggttcttatcagcgatcaaggcatctgtttgaggctcagaaccgatgtcatcagtttgattcccagcgtttttcttttcctgaagtggagtttgttggtatgaagagggaattgggatatcatttcttgcatacatcttagcttggggaaacaaatcagttgctggggtaagtggagtgactttctgaggtaagaaaacaacgcctttcaattgcttttccgtgtcagcaacctttacattgagaaaatagcctgcctcaaaagaaccttcaaccacaccagaaacaactcgacctatcagattctcatcaacaggtgggttcactggttgctgagtctggctttcgtctctgcgaggacgacctctttttcgcttattggtaagagatgagctcgacccttgattcagttgatccatctccatcttctctgggatatccatgatctttcaactttaaaaccttcttcttgatcaacaatagtcgtctagcaaaaaaatcaacaaaaaagtaaattctcttagtttcattagtgttctcatagttaccattatttaacagaaaactacacaaacccaaacttcaatcattatctatctgaacaaagcacctattcatcaattttcagaacaatcaaacagaacgacaattcacataacagcaagcgacggaaacaagatcacattatagcctacaaaatcgactattagcttgacacttcactaactttatcctcaaagatagatgacaatgcaaaactgtgattgacttttaacataaagaaccaagttaccattttgttcaatcatacatatacgtcagtaaatccccaaacagtaacctttaaggaaatgcaacttcctcacaagacaaataaagaaactttagattcaacacttcaaatcacaaactctcgtacttcagaaagacaataaaaatgattctaaaatcttctatattcctcataaagcaagaaaagaatcaatttttagctccccatgaaatcaaatcaaaatagtttatgatcagatggattatgtataagccacggaaacaagaatctcaacgattacaagataaccaaaggaaaaaaggaaaccctgtaaacacaaagtattcgagaatctaaacagaaacagaacaacgaagagataaaacctagattccaacaataacctaaaaattgattaatcaaccaagaaaacgaaaaatttcccggcaaaatcaaactggggatataaaagaaacactcaccgattaggttcgcgacggagagaaatgtttgcttccaaaaatcgaagggtttttatattttatttcggaggggaatcaccttctctaacgttacggtgagaggaatgagtagaaatatacgagcgtagacgtattctgatacgtattcgtagatttctccgttatacggttcgtcgcttcgtcttcttcctctgttctcttttctctatctctctcggcgtttttggtttttggggaattgtgtggaaaatagtttattattataatttgaatttaaatgggctgattatgggtttccttattaaagcccaataaactcttatccaaatacaattcgttttgttaaggctttgtgttgtaaacacaaaagtgacaaagaaagagcttaatagtgaatacataaggaattttggaattgtgaaatggaaaaaaataatggggattatttttaaagagaataagacatcatgttttttttctagatagtcatgtctaattgtgttctttttaattttgaatttttactactgataaaatataatatttgcttaagattataatttggaatccgatcgaccctcaaagtaagattaaaacaaaataaaaatagtacaagtttatagtggtttatttttaatctgaatattacatccagtgaatttttggatttttctttaatcaaattgacttttaaatatatattttctctttcaacaaataaaataaaagtttttaatgtacacaatacaagtgatgtcaattgtcaaatatacatatatacacataatacaagtagaagcaaacaattatgtagttatattgtctcaacctttagctcttatgttttttttcctttcgtttttgttaatatattggtgtcacatccttatctatgtttcgttgaagaaatggtgtagatgatgctcggattacaagaaaagccaggagaaaatgagggaaattatgtaattttgtcatggagaatatatgccaaaactaattaatatcttatccacatctcttttcaaacgattcccttggtctacatttttttgcacattaataatatattattataaacatatatacaaaaatcacgtaaatttgtgagaacacatatacatgagttgcttaatcgaataatatgacaagttaacgaattgattctcgcccgacaaaaggcattaaattaagataatggtttccgttggcttattttgtgaatctaatcaatctttccggccaaatatttagtaaattatgacttgaagcaacataacccttacatcatttttttggaaatttcatattttacaaaataagaaagaaaaaaaattggtcagcaattaattactttttctagtacaatgacttggttaatcatgatctagctagttctagtgtttccttgtcgggatttattggcatataattataacaacacatagatttggttccttctgagatttcaaattgagtttttgttgctgctctgtccaaagatatgttaaagatctaagtgattgaagtctagaattcaacatcggtcaaaatttataagatgtattcttgacgactatagtatttatttcttggctacaagtttctggattagttccaatctataagatatccgagttaagaatatcctactgtagtgtttaatatttactgtatattgtatggaaagttatatacttaatgattcggacgacgtgtggctagtatttttgaagtatggctagtgttatagatgttactttttgtctgattattttgcaagaaaaaaaaaatgttggtttgagatatataatattagttggtctagtctgggacttgattagctgtgatgttccttctcgtaatgtaccataccacgaccaataacgtctgcttcgaagctggttcaactctctattatgaaatcaaaaggttttacttcttcaatcattttgttctcttccatttctgttttataatatgaaagttagtagtggtgacgtgtaggaatcatgcatgttggcataaggccgataaacagtacaagtatacaccaaatacgttacgtgcaaatatacatctctcggatcgtccaactttgatttagacacgaatgcaacttaagggacaagttggaagctaaatcggttgaaccatgagccagcctttggaagagtcagacaattgttctgagttcgataaggactatatttgtttttgttcggatctatggtacgttcgaagagatagataaatggatttcaccacgatttttttatttcaaaagagttgatataataaccaatcaaatctttagattttattttctgaccggtcaaaatgtgatctaacgctgtcgacccaagtccaatgtattctaaaaatactaaactctctccatatcaaattattggtttcttcacattcattagcaacgagttatctctctagatcacagtttgatcgtttatgaatttttgttgttgttgttgtaattatctcctaacttagacacatgcaagaccttaattatctaaaattgtattgtgaattgtttcgtatgatttcatagtcattatattatctgatttaaaatttgtaaaaagagtacaacattgatcttccacgtagataattcaattgatttattcgtccttgtgtatgactatctattgtgaacagttggaaaagtcgtatttcttaaaatcatttgtgataatcaaatcaagaatcccatacacacgtaaagaaaatccacaaacttcttctctatatgaacaaatcaagcgttgaaattgacgacggataccgaaaacataaatacatgaatctagtatatctctctctctcaatagattatgacaaaagaaaaatgaccatataatatgttcaagtgtttttggtcccccaagaagaagaagacgaagatgaaataagaaagaagatgaaaagaaatgaggataggagataggaacagtgtcacgaggaatgctttggatcttctcggaacatatcttgtctatatgtctccttgttttgtctcaccagcacgtgagattacagtttcttcctcttcgtttacccaattatttttctctcgtttttcaaagttttgtgtgtgtcacactacacaagcggcttatccgtattaagctttggttttgttgcctaatttctctatttgcattttgtcggttatattcggtatagggataagagatcctaggtgatgtttagaacatcttgagtttgaatttgtctccactatagtgtgtggtttacattaacaagaaagatatttttgtttccccttccccttatcttgttcacatatagctttagaatgccaaattaggttttccaacaaattctaatgtctctagctgatttatgtaaaataagcattggtcaaatgacttcaaacaaaaaaaatggaagaaacaaaagcaaaaacaaataaaattaattattttaatttgagtcaatttttgttttaggtgttgtcattttttggttttaaaatttgccatttttttctcgaatgcactcgttcttaattcctatatacatatgcttgataattagttgagaacgaatttattcagaaaattttgactttttcctctagctatttggtaactcctagtgataattttcaattcagggattagggtcctacatgcaggtaattctggcttttttctagcgttccacaccaattatctcactttacaagccaaataaataataattgaatgtttaatattttgactatagtttggttgtaagatttggatctagatgcaatgtaaccaatgaaatttatctgtgcatgtacccccaaaattttcttgaacctataaatttacagaagaggaaaaatgatgcctaggcaaatctttttgcctgtctttttgggtgaatatgtcctttgctacaataattttaagcattagaatatctttttaagaatatatttttttggtttggaatccatcttgtctctaatgttatagggtctatttaatatttaattcctttatatataaatggcaaatcttctgctacaaagttgctgcaaagatatgggcaattttgttttactaaaagtgaattactttaaattggtccttagtctataactctatatattcgaacttaatgcactttcttatacattccgcttacatgaaaaccatagggttgtccccttccgcattatagactacatttatgcagctttagctataatgtgatacagcgatagatatatgtatctaccatatgatctgtgaaaaaaaaaaaatctaccatatgatcttataatgaaaatgaaaatgcaaaagcaatgtgattagtacaccgaatttctcggagtttaagttagtgtatgggtcttgtataggttaggcgatttatttgctaagtgtgttttctcttttgttgatttcttatacacgtttttggtttgccaacacgtcttgaagcattttaataaagtgtgtttgttgccaaaagaaaaaaagaacacggaattaagcaatgtgtaatctttgatcttatataaatcaacatggattaatagacaatagacatatattgatagttgccaaccagaaaaacatatatatgatgatgatagatatatgtcttgacagcaaaaatgatacatatcatgtctcatttggtttctgttttatattaatggaaagtaactattaaaactttagaactgataaaccatggttgtaggcgatcaaattaagatatagaatttaaagatttcaaatattcaaaagtaaattactagtaaacagctcatatgattatttcaaatatatacaaagatcaaatgttcagtaatgcatttacgtttggattaatccgcattatacgtctatacgagacgtaaccgtgatgcactcctgaattttgtaatactttttggatagactaagttttgaaccctagatcttagcgtcaagattcttcatttttgtacttaacccaatggtaaaggataactgcaatttttctaattagaaggattaaaattctatgtcatatatttctaaatattcccacttttttaatttataaatattatattatagatatacacatttctatatcatatggcatatttatacatgtgatagattgtagattgtcggtattttaactaatcctacagaaaatgctgaagcttcaggacaaacacaatgatacaaaacgaaagaatatgtagatcacgaaatccacctacttataatatattttgtaccaaaatgctatattgatgtggtgaatcatatttggtttccttctttttagctcgatttaattatttgactgacaattatgatacaaaagagttcaatcatgcatgatgacatctccgtatgatctctaagacaagaaaagacaaaatatgcacaaaaagtaagaatattcaaacacaattggaccagaaattaaaagtaaacatgggtaggcacttatagtttttaccccatatataaaaagaaactatttaacttacatgattggaatatacacatatggagaaaaaaaaatagccaagaaaatctgaaaatattttcttgattctgcttgcagccccatatatatttctataaatgtgcccactcatgtaaaaaaacaaaaacattcttgatccacatcagatgacacattcacatggatcattcacatcaatctctttaattcaagagagagaatcaacaaaaagacacatcacaagttgctccctctctttctctcccactccatgtgtaacgtgttaatgcaatttgcttattctctcaagcttaatattctccatctctacttctaactgctcctcttccatggattattcttcttatttctctgttaaaattaacataaaaacagattaacaaataatcataaacaatttataaactaaatagaaaatgttaagtatattatctatttcgtaccgaatgatttcttgcaatgaagaacggcttcgtatatagagctctcagagtcacaagaccttctccaataataatcatcagcaacacttattcttggcgacgacgtcatttcatcagaataaactctgctcctacacgaagtcgttacacggatcctcgaatccataccgatacttcccgttgttacagcggatctacatctccttaatctcttacacaatggcgtcaagaaatcaagatacttcagcaaaacccatttggacactctcctcagctttcttgaagaagtaggagaaggcttgctgttaaggccacgtgtatcaatcttctccgatgttgttgtatccaacggctcagattcttcctcggtagccgcggacgtgggctttaatcgataaggcataacgtagccgtcacggaagagctcgtcggcgtgaactaaagagtgatcttcgtcggagaaagagacgaagttatcgaacttgaagctactttcatgagatgttttgatgaagaatcttctagaaggaggcaatcttggatccatctcaatgaaggaagaagaagaagatgaatcttcgtatgtttgatgatgatcatcaatggtagcttctaaagaaggaaagttaactaaccaactgtaagagaagctgtcaattggaactagtggcattgaagcttcttgcttaccttcttccatggctgcttctctttttttttaatagcttttttttgttatgggatatgttgttgagtgtgtgcagagaaatttgtttgagacaaaacaattttttgaattgggaacatatgtttcagtgtttatatatagagagggacatatacacataattttattttaatttaataacggtaatatataaatatatatgtggttagtttggtaagaaacaatagatattaataattggaaagggaaaaaagaaaagaaaagaaacataagagtttgtgagcccatactaacctctcattatgtgctgttgccttcactcctttcctttttttttttagtttttgttttctcttttcttttcgaatatagggttattttaattatattcccggtggcaacataattatattttaattaggaagatcatgatatgaatgacgttatctcctctcctagagcatgattattttaatttgtttagagagttatccacaaatcagaaaaagacgatgcatgttaagtattgacacatatctcatggaactaattgttttgatagacaaagaaaacacaactatgaaacgaatatgtataggaaaaagcaaaaatagctgtataacgttttaagaagaaaatttccagagcattaatacaaatgaagaaggaccacgagttacaaatgggagaaaagaaaactaaaataaaaaaagtctatttcgtgaataaggaaaaaagttgagaaatgggagaggagaggagaaagagagggggagagacagaggtcccgggaaatgtcggggtgcgagacgaatgttgtcgaaagattaggggacaaaagccgaaatcagaaagtgacgtggagactcatcaaagtcttatctctggggccatttttgcatgggttacgtttgagagaactcgaaataaggttttaattagtaatactccgtatattgagaagtgcatttaatgatatgaatctctcaaatctccaagggaatgtttgttgttggtcgtcttttgttaacacaaggtataataattaataacctcgagacataaatatctccctacttttagatacgtttattaattatgcatggtttctacaacaaccaatttttttttttttttaaagatatttaatagcgaaaagaaaaaacagaagatattcaattttacaagacaatgtctaataggttattttggatttaggcccatacaaatctctttagattccaatccacatacaccaaatcggacaaaaccaactccggtttcaaacagtgtaattgttccatttaaatgacgatattataaaccttaatctatcaaatgtgtacatggacattattgttgcaaacttggatccacacttaggagaaggaccaattttgaagaaaaaaataaagactgataatgaataaaaaagagagactgaagtttgaatcattacagtcaaagatggaatatttagtctttttttgtaagataaatgatttagatcgcaataaagattttcatttgtgtccagtaaatttaatctttccctttttattcacacgccatatgaaaaaacactaaataaaagcagatagtatagacagctttttataattgtaaccaaaaaacaaaaacagcttttcaaaaaacccaccgaaaaggtggttattagcttgaccacaatcaaatatactaagaacgtattcgttgcattttcgacttcgtctagtgaattactaaacctttgcattgtaagtatatctctaaccaactatatacatacacaattattattttctactatgacacgatgggagattcaattcaaagtaattgtttgataaggttctatacaatttagacccactcagcaaaagtattcaaagaagaatgtggactatatgtattcaaagagtttaacatatctgcaggaccggtccattgtcttacgcaaataaaatatttatgccttctattttttttgcataatcacaaataataataatctataaaagttatactaaaactttatacaacagttttttttaattttatgagtattttgtaagcaaaaattgaggaaaataaaataaaattatattctttaaatatacctctatttagatttttgccggcaaaaccgttcgtgaaattcacataatcgaattttttaaacatagttgtcttaatgaatagtaaagccaactcatttatttgattaatcaaaatcttttttttttattttgtaatcaaagttcaagcaccttacaatagaaagtctttgattttttattttgtaatcaaagtcttagagtttaagatttatttttcttaaatctaaaattttactaaactaaatttattaacaagacattttattaatttaaagaggttaaagaaagatagtgaatgaaaagcttaacaaatataaatatatagaaaatgccaatgccaccaactagaaagtcggtgagaggattatttcatggtctactaaatcccaattgaagcattcctttcatcgcttatagttcataggtgcacttaccgctcaacataatctaaacaaaacgaagctttcacaacccccaaaataagcataattaactttatggtaaataagcagaattaactttaccgtgaaactttcgcaacccccaaaatatatgagactcttgacggacttctgttcccttagatcctcaataaccgcatcacatctgaacgattcgcaagtggagagaaggtagtgaagctgctagacacttgaacttgatatatttgtctagatcaatttgatgtggaaacccaatttcatctatccaatgtccacttttgcttagggatttagctgatctcctaagaaattccttcgaggtgtcttccatgtccatcaaacttgattttttgttcaataagaaagaattcagattcctataaacttgctgcacaagttaattcaaacaaaataaaccacatattgagatcataaactaactgacatccaggccctaaagcatctgctttaggccacctaatggaaaatatatactaaacgttaggccacacgtttgataagttcactttagtctcttggttatgatgtacctcctagttgtaattagttaaagagttcgaatctttggtaatacaatttttgttactcttttttcccattttttttgtcagttctcgtttattaagttttactttaatttttttttttcgtcttaagttttactttaattaatctttttttttaaccaataaaatctctaaatattttatttaacttggcaaaataagccttattattatgttcttatttcttcaaacaaaactgaaattttctatatatattttagtatttaaatgataaaaaaaattacgttaatttttatataaaacattatattattttactatgttttaggccacaaaaagcttaggagcggtcctgctgacacctatttgaagtcaaagaacaccaatccatcagaaaatttcaaacactgttttcaattaggaaaaatcgagtgtatccaaggtaaggtttatttagccacaaacaatcaagaaattaataaactagaattactgcatgttctcatatactcgttcaactatacttaaaattaagatcggtgtgtgccaacaatcaaatcacaattctgacaataaggttttatctagacagtgaacaaatacagaggaaagaagcccaaaaacagagaatcatgaagccaacgtatattttaaaataataatttcaagttatgattatttatgaagaaaacgtggctatcaagcaaaacacattaacttgcgttggatttgtaaagaaatgaacaactaagagcttgcttcttaaaagctcgataaaagagtttccagaattgataacaagtcaaaacatagagcaacaatatgacaaaacaaagactaaaacaccaactattttccaatgaattacagtatattactaaatgtaacatgaaagttgaatttctggatttttttattattgtgagataccttgcatttatataacaaagatatggatataatcatataagtcttgttatcttcaatcatcctcatcgtccttatcaagtaccatcttcagtttccttctactaagcgggctttgagtgagggaggcaccaccagctgcagagtcatcaccccaatctgctaactcgtcatcctctagttcattatctgatgaaaggtttggatcttctggcaatgaagttgaaggaccattgtcgctgatgtgaacgtctgtttcagattgtctactttccctggtgatgtagctttgatcattgtcctcttcttccccagcggtaggctcatgcagactagtttcattcctaattacaaaaagtgtgacatttatgagacttactagtgagatctagctcagaagttcgttttagttctgagttaatcttgtctatagacccgatgagaagtcaaaatgagtggagagttttacctttctgtgttgtcttcagaacctcctggagtgatctcattgattgatcctgtttgctgcttgttcttctgatttttcctgctcttcctgcagaagaagacagctctcaagcatcaattcacatagttcaagaaaccaagtttgatcttgttataaatatttagttacctgttcttgaaggctagtaatgtttcatcctcggattcatctgctgaagaatcatcatggtcatctttcagcatcatgccagcttcagacttcttaccacggggaagacggagaccaagttgctttaatttacgtgaaacctgggcagtagtatatgtattttcagagcccaattcactggcaatcaaataacaacagcgcttttcgtccttgaacctgcacatacacaacagtagaaaaacaatggagtcaataaaactcgtgcacagaagaaaaggagatgaaatttgacactcacttcttgtataattccttaataagcgtttcttgttctttgctaaaggagctcactctctttctggtgtttctgtttcaaaagcagtagaggagagccgttaaaatccaaaactaaatgagtgaagtttggaaattctgtaaactctaagagacactcacgaaggttgtgctaacgatgttgcatccaggtgatcagtacctccacgccgaagccttttccttgtttctagacctagctgtttaagcttgttggttacttgtgcagcagaaattccaccatcaggaaccaaattttcagcaataagccggctgcaatttttatcatctttgtacctacaaaaaaatattcattataagcaaccaattgaaccaaactatagcatatcatagctcatatgcagcaatctggagtttacaacttccaatgctcataaaatcaatgcttatactactaaattaagaaatagtgcactttatagagaatgaattgtgttatatttccttcaccaactacttcgcgcatcaaacaaaacatacctgtcatataggtctttaatttttatatccatatcaccatcaagaacaagtcttcgctttcttttagatggtcctgcagatttatcttccaccatgtcatcatcctcactgcagcatgaaaaagtcacaagcgttagcaaataaaaatgaaaagtatctccagctgacataaggtataaacacaagtatcataaaggggagattctattctatcaagtgaaaccatttcttacttttgaaatccttgatcataagaaattacgacatcagcttcatcatcacctagagcatctgctaagcttctgtgagcccatcctttgtctgatgatgtaccaaattcctcagttcctgagaacttttcttgattacccatttgttttcttagatggccaagctcatgcaacatatattcagcatttatgtaatggcattctttgcgagtctttgagaagagaatttccacaaagagaagaggctgtgacttcattttcttcaacatatttctaaccagatctgtcaggaaggtaactatgttctcatagtctttgcagggacaaactttctgctcatcaaggatcttatggaatgttattagaagtgacagctgcaaaattaacccaattatgtattaaggaagatgcaaaacaataagaaataaatgtatcaatctgggagattatttaaaccctaacctgatacaacatgggagcgagctccaagtcttctgtaatccttcgtaaaatgcttattacgtggtgattcgtctgttttggattgcttttgtaaaacttaagcaaccagcataggttttgaataatgctgttgctggcaaaagcagaaataaatgtggaaaccttaaaatcaacttcatctgttgcagtttgctcttcgccatcagaagaatcatcactgccgctagacagatcatcaaccacattatttgacttcgggctgtgcatttgttgagtttcatcagtttcagtctctaggttcgatgcctctggtttattgggaggcacatccattggtccatcctctgttgaaactgttgaatcaaccatcggtatgctttttgctgtgctagcttcgtttgaagtacttggatgattttcagacagtttatgcactgtggcctccttatttcccttgggttttttctttcttgctttccttgatttttttgaaacctgtggcatgaaacagacatttggttgaaatattgcattagtaacactttacacatgttactaagctttgtatatcatccaatcggagtttcatatctaaccagttacataccctcaaagttccacgcccttgaaggttttccataaggcctacaattatatggatgctttccaccagatctccaagctcactggcaaaaaacaaagcaaccacaagcaagttaatttacgaagttaggtaactgtcaagtacaatcatactagaaaaacattaaaatgagcttttcaactgaacatttaacaagtctaacaagcatatacaggtttacacaaattatatgtatcacatattgcaagatactacatgacagcaaaattctggaattataagaaacagaagcagaggccaacctcttaggttgcttgtgcgtgtcaaaacttctcaccagattcaggatgaactgacacatcccttgatcagtctggtcataaaacaacttatacagcaagatgcggacagtaaaagcttccttagagtcttcaggtagcaatttgatcaccagatctagtaagcaaagctgcattggaaaaaccacgtgaacaatgaacaccatgagtatactagtttctggataaaatgcagaaggaaatgactatcatttctccatttctccatctcataaaccaatgatacttgcatatgtctaaagaaaaagatgagctacaaaaaccatttaaaaagcaaataggcggcagaagaacagtcttagggaactagccagtaagagattaaagcatgcatattgcataccatggttttcacaagagagcttgctgcagatagaaacttaaaatctttagtttctttcagaccatcaaatgcacagcgccattttgaaatgacaagcaaaaacattctgtcgttaattgttgctgcaatcggcgcacaaatgtcactcttggaaaagtttactccagccttctggttggtagtgagttcagaggtttcctctgtttctattgctggctgaaaaaaaagccagacaatcataaaattaccgagattcagccttgtcgaaatgaaggaaaaataaatgcatagcaacttagaccaatgagagacaaaaccaaagtagctcaattactcacactagaagccgaagacttgtgaaactgaaaagaggtgatggactgagcaacttggaagaaagtaacaatgtcgctattttgaatggagggatgctccttttcaatatcttcacataatgactgcatcagaactaagagatatggtacgctggcatcagcatcagcatcaggatacttaaaaccaagtataaacaaaagaggttgttatattgtgtcatctaccattatatccgcctgacataaactgattgatgaaatcatgcagcaacttcaaaactttgtcatttgtcacagacattggtccatgttcccagacaatcttttcggtggctccacgaccttgctgaggcttaagcattgtgctttccgtagtagaaggtattccctttagtacagctttagtgccatcctatcaaaaatctcattcaagttacataactatttacataaacctaaaattttaagcatcattgcgagaaacaataccatggtaacccgggtgaatgtcccaccaaattgtgaatgacgctgattcatattattgagtcttgcaagctttcttttaacttcctcctccttcattaatgtcttcaaactatctacagaagcttgtttcccctgatccaactgcaaaacaaaacatgatgatcgacgtcagcatcaataccaacaatctcaggaatcatattgatccagttgaatcattaaccttctcaggagcctttgcaacgagctccatgtcttgacccaagagaatataatgataaatctcaagcagaagtaagttgtcatgcctcaacaaactattgaaaccctcaatagtctgagttatcacaagaactatatccatcacattctcacgagacagaacttcgagaaactgatccctcaacgacaaaaagtaacaagtagactctccagctttctgaatcggagatacatcatgaatagcaagtaaattcctgaataaagtaagcacaagctgaaccaatttccaatcttcctcattgaatacatctctgtaaagcataaataatatcagtaagaaagaaaaaatcgttttgcattacttaacacaacaatgagtttcgaacttacaattctaagttctcaagaggagcttcaagcaaagacacaatcactgcaacaatattactaaaagtaattgcagatttcaatccccatagatactctaactgctgaggaatatcatctgaagaaggctctataggcattgtaagaaacaccaacactttaactgaacaaaaacagatcacaatctcatcagaaaaattacaaagcatcacacttttatttaagggcaacagagcaaactcagtacctgcatttaaaactaagttatgttcatcttggtaatgctcaatgatcggaatcaaatctttagagactatattccacgcacagacttgtttgaaaacttctctgctctcaggatcgtcgcgtctcagaaatctcagtaaatctttcaaattgtcgagacagtactcgcttttcgagtacccaattcttcttctgtcttcgtcttcctcgggaagacccagatcgctgcagattactgataatccttccaaatctatcttcttcttcgttgagattctctcctccacatccattttcttccgcggaatacaaaaatgaaataaaaaatctcaatgaaattaagaagagatttttagcgaatcaaaacgtaaacttcgagaaatcagaattcgaaaaggctcagcttctctgtatcatcactaatctcaagtgattagggctcttgtgagcgcgaatagctccagacagtttcccgccatttcgcaatcctcaaaagttacaagtcaaactaaaacaccgagatttggcccacatggtctaaatgggcttataaattggtccaaaagtacgagtttaaacgccgtcgttttgggttgtgtcttattttgtttttttctaaaaattaatttaattttccaactacttaatgatttgtcatgcttcttcgatacgaactaagcacttcttctccgccttcgtaagttccgccgaaaagaaccaaatccttcactactctgtctcagctttcgacctctctcttctcattcctttgcaacttctcacttctcgaattccttctcttcaaaatcagaaatggctcaagtggttgctaccaggtcaattcaaggctcgatgttatctcccaacggtggatctgtgtctacaagatccgagaagctattgaaaccagcgagttttgcagtgaaggttcttggcaacgaagcaaagagaagtggaagagtctctgtaagaagcagaagagtggttgatactactgtgagatccgctcgtgttgagactgaagtcattcctgtttctcctgaagatgtgcctaacgtatgtgtaagcttatgttctgtattgaagctgcgttttttatttctgggttttgagttttgtagtaattgagatagcatttcaatttgatgcgttatgtaactgtttcaatctgtaaaattgaatttcttttgtctttatgtgagctgatgataaatttgttgtcttacaatgtggattagagagaggagcagcttgagaggttgttggaaatgcagcagtttggtgatacatcggtagggatgtggtcgaagccgacagtgaggaggaagacaaagattgtttgcaccgttggtccgtcgaccaacacacgagaaatgatatggaaattggctgaagctgggatgaatgttgctaggatgaatatgtctcatggagatcatgcttcacataagaaggttattgatttggttaaagaatacaatgcacaaactaaagacaacactattgctatcatgcttgacaccaaggtttgtttttgtttcctatttatctatttacttgagagtctctatgtccatgtatcgcctttgacgattagtttcattgttcatagggtccggaagttaggagtggagatttacctcagccaattatgttagatcctggtcaagagtttacctttacaattgagagaggagtcagcacaccaagttgtgtcagtgttaactatgatgatttcgttaatgacgtggaagcgggtgacatgcttcttgttgatggtatgtacatcttattatttggtgtacaagggttttacatctgctttagtcttttccaatatattgatggcgcttttactatgttgtaggtggtatgatgtcgtttatggtgaagtcaaagaccaaagactctgtcaaatgtgaagttgttgatggtggagaacttaagtcaaggagacacctgaatgtccgaggaaagagtgcaactttaccttcaatcactggttcgaattttctgtttaccctctttttcactttttcttgttgctttggttgaagtgttgcatatttaagtctgaaagatcttactctgatgcttattttttgtaattattttcttgccgcagagaaggactgggaggatattaaatttggagtggagaacaaagttgacttttatgcagtttcctttgtcaaagatgctcaagttgtacacgagttgaagaaataccttcaaagtaaatacttggaacctattccatcctaagtgaatgatttgcctatgatatttcctttttggtctaaccttgagattgtttgttacaaatatttgcagatagtggtgctgatatacacgtgatagtgaaaattgagagtgcagactccatacctaacttgcactccattatcacagcatcagatggggtgattttttctgtcaaccttgtctattttgttcttctgacttttatatgtcttacagtatgtaatctccttatgtgagagcaactgattggatgttgttttgtgaaacaataaatatatcatatggttggaatggctcttgtgcatgtgattgtctaattagatttgtgtatgtcttacaggcaatggttgcaagaggtgatcttggtgcagagcttccaattgaagaagtccccattcttcaggttagtacttgcctctcatttttaagataacccagagaaggagatttagaacttgttgaagttgaaactcttgattttaatttgttatacaggaggagatcattaacctgtgccgtagtatgggaaaagctgttattgttgcgactaacatgcttgagagtatgatagttcatccaactccaacccgggcagaggtctcagacattgctatcgctgttagagaaggtgctgatgcggtaatgctttcaggagaaactgctcacggaaagtaagtggcagtatcttttcatgtactctattgatttagcttataatggcattgaatgtttattatatgcatgaatctcaactttacttgatatcaggttcccattgaaagctgctggagtgatgcacactgttgcattgcgaacagaagcaaccattactagcggtgaaatgccacctaatcttggtcaagccttcaaggtaagccacgcctgatttccttgtcttgaaactctgcaccattgagtctatttgttatctaatccaaaataacaagaacatttttttgctactacagaaccatatgagtgagatgtttgcataccatgcaaccatgatgtcaaacacacttggaacttcaactgttgtcttcaccagaaccggtttcatggccatattgttaagtcactatcgtccttccggcacaatctatgccttcacaaatgagtaagtatttcatgtttattcttttagaacaatgtattttgtcgtaggaactcacagtagaggttttgctctgtaggaaaaaaatacaacaaagattagctttgtatcaaggtgtatgccccatatatatggagttcacagatgatgcagaagaaacttttgctaatgctttggctacattactggtaaatttttattgcccctagcttttgttagtgttttattggggctaaagagttaactttgggtgaaacagaaacaaggaatggtgaagaagggagaggaaatagcaatcgtacagagcggtacacagccaatctggcgatctcaatcgacacataacatccaagtccgcaaggtttaaagcttcttttaagatgggatgtctttaatatgtagaacctcgtttttggttataattttcgttgcatgtctctcttctcttgtactattcacacttgttgtttgctgtatcttcttcttcagtttgctttgctacgattgtggtttttggagacattatagctcattaactgtttgtgagaccaaatgtgtcagaatccgctattacacacctagttgtcaacattcactacaaataatatggactttaacgtcggtttaaggcatccaataaaactgacgttatgtttctctttcctcgttttgtcgaccaaaaaaactgaccctaaatgtaaaaaacgaaatttactactagtaaaaaatgccaacatacaactgacgctttagtaatgacattttattatcattcatactaattatccagagaaaaatcgtttaaaattaattaatgtcacaataaaatagtacatatagagatcaaagtttatactttaattttaaaaatgaccataagaagtggttagtcttaaatctaactgtttgttctaagctccttttttatagacacatataatcggtctgataagaaataatcttattaatatcgtaagtatattttgatatgctatttgtgagagtaagaaagtttctctttaatgaagatttcgtacgtgaaaataagagatttaactaatttggtcttttttttttgtttatgtatgttagatgttattttgttaaatgatagggataatgttattttaacttaagaatcgtatattttgttaaatgttgaactatttatatttattaatttactctcattaataaaaaagaaatgcaagcttaattttgttgtataaatacattacaaagtttaatctttaatatatctactatatataaagtcaaggttgttgaccaaatgggtagatcaatggttcacaccatccatgcggatcatgtgagaatctccttgcacgggctttgtactttttaaattgactcctaaattcgtcaaggttgtggatgcaatgcactgcaaatggtttattaattattagtagagcaagctttagttccacatactcccaaaaaattgcattcattttcataattgacatatgcattatatgtgtttcataatcgaataaaatggattgatataaaagaagtcacataaaattactttcataattcgtatttttattatatgtttttttttatttatcaattattgatttttgaaattatcttatcgattttctttaatttacttttctagcatcagttccgaaagaaatagacctgtaataaaacaatgatgaagagtaggtgtcgcagcgattttcaattgtcattaactgtttgtgagaccaaatgtgtcagtatccgctattacacacctagttgtcaacattcactacaaataatacggactttaacgtcggttaacttaggtgttaacgtcggtttaaggcatccaataaaactgacgttatgtttctctttcctcgttttgtcgaccaaagaaactgaccctaaatgtaaaaaacaaaatttactactagtaaaaaatgccaacatacaactgacgccttagtaatgacattttattatcattcatactaattatccatagaaaaatcgtttaaaattaattaatgtcacaaacaattcaagataaaatagtacatatagagatcaaagtttatactttaattttaaaaatgaccataagaagtggttagtcttaaatctaactgtttgttctaagctcctttttatagatacatataatcggtctgataagaaataatcttattaatatcgtaagtatattttgatatgctatttgtgagagtaggaaagtttctctttaatgaagatttcgtacgtgaaaataagagatttaactaatttgtttttttttctttgtttatgtatgttagatgttattttgttaaatgatagggatattgttattttaacttaagaatcgtatattttgttaaatgttgaactatttatatttattaattttctctcattaataaaaaagagatgcaagcttaactttgttgtataaatacagtacaaagtttaatctttaatatatctactatatataaagtcaaggttgttgaccaaatgggtagatcaatggttcacacaatccatgcggatcatgtgagaatctccttgcacgggctttgtactttttaaattgactcctatattcgtcaaggttgtggatgcaatgcactgcaaatggtttattaattattagtagagcaagctttagttctacatactcccaaaaaattgcattcattttcataattgacatatgcattatatgtgtttcataatcgaataaaagggattgatataaaagaagccacataaaattactttcataattcgtatttttattatatatatatatatattttttttatcaattattgatttttgaaattatcttatcgattttctttaatttacttttctagcatcagttccgaaagacatatacctgtaataaaacaatgatgaagagtaggtgtcgcagcgatttttaattggtttcaaccgttagatttaggcattatgttttaatgtttaatgttttcaaccgtcatatttaggcattatgtttaatgttttttgcatccaaagtttaattacgttgttgtaaatcatctttgagaagtctacgttgttatgcttgcatatttttatctactatctgctcgaagttgtaactgaggctgcgatggaggccttaattgttgttgctctcatctgctctcaaagccagggagagttttgtttaacatttggacatgaagcattacgatttacacttgtatggtttacagtgacgtataatgctaatgaagatggagaattgttagacagtggagtgcgtttaatgttgatgctcattacaatgtcactcattccccaagaatctccaatttatgtggattgcacttaaggttttgaagtccaagatgaaagggagtattagagtgtatatagttggtttagttatagtttagattggttagtatctttggtttagtttgttatgtatttaagcttaatcatgtatcacatttacgtttaatgaagatttcatgattattgaaatcactgtcttggaatcttggtacagacgattcttcaagcaatttggtggtattcaacagaaacctttaccccttaaaccatttttctaatggaaatattttctggtcgcccagttttactgaatgttatcaagttcataaaagcccacttctcgttttctaatgtgttgaccacattaatctgttatatttctccaaagttttcagagggtactaaaaagacaagtcaggcaggagccgacgtttagaatcgtcaacacatttattgggcctgggccttcgcatcgtgtctacctttacgggccgggttttgggacacggataggcaaaacgggcacacgcattgatttgagacaatacatagttaccattttgaacaagaaaattatttgagccttaaatttggaagttggaaattaatgatttatttagtggagaagagaagagaccccacaaaaggaaatatccaaagacttggtgggcacggtgatacctctgtattaatgtagggtttttagatggagaagataaccaaattactcaattaataataatttcttgcttcccattaagaacagaaatcgtatttcgtattaattcatgttgtctctgcgtctcagccgccttgtgaaacctgcgaccgtgagatcatctcttcttctgagtctcactagtagtggcttctcaactacttcctcggtgcaaactcctcctttttccatcctccacgctagaccttgtggagcggatctcggcaaactcatcattttgactgctactggggatctcaccactttggataagacagtgccactcgagttgatgaaggaaatggtaatgataggggcatctcatggctggatagctactttgaaggaagatggaataatgcgtctccaagacgatctcaacccggttgcatctgattcagatcccaaacacattcccctgccccctcttgtgactctgcctcattgccaaacccaagttgtcaccaacgtcgccatgtcctcctcttctcctgagcatgaagactgtgttgtcgctgtcaagttcttaggacctcagctgagcttatgtagaccagctcaaagaaactccgagtggaccaacatcagaatcgaaaaccaatgtttctactcctcccctgttatgttttcccagaaagatggaatgtttcgtattcccggatctggaggtaacctcattggatcatgggatctccacaaacacaagaagaaacccaagattcagaggttgcgattcaagaaccttcccgagctcaccaagaccaaaagggagcttttgcattcgtgttgcacaagccaacacttggttgagtcaacaactacagatgagactttcttggttaggtggtacaggaaggccacatccagtggcgtcgtgaaaatgaaaacaaaagctgcgatggtcttcaagctagacgaagaaggaaacgcagtctacactgaagacatcggtcatctctgcattttcctgtcaaagtctgaaccgttttgtgtccctgctaactccattcctggcatgtgccctaacatcgtcgatctttttgatttcgatgaatccgccactttcggactggatgagtcctccctctttagttctagtcatacatacccggccccttatcatattccaccacaaactatcttggactagtttagtttggattatgagtctgtctttcctcctaaaccatcttctcttgtaagattgataaacatatgctaagatgctcttggagttaatttgctatcatctctcataattaagtctcccaacttattatgtttaaactttataatatcctgtttgcagcaatatatcatcattcgtgtagttttgaaagccaaagcggataagtacatagaacagaatagtgtgtgataaagaatccatttaatctctcgaatgtaagtttaactgactgattttactgaatcatattactatgtttctaatgtacaagtgtattgttcttgcttatgtatatatcatcaaattgaaacttgataatcttgggaaaataatgttggactagcatttgaacgaatcacgatttttgtaagatatttttttggaaaattatgtcatgaccaaaatttgtttaagatagaaccaagcattttcatccttatcaaaagatgtactgtcttcacttttaactcacaatcaggaggagatataaaccaaagtgttggccaaaatagagagatataaagtttccacggattaatcattaatttgagtcgtttatttagctttaaaagtaaaagatagataaaggaacttaatgatacttgttgacataatggaaggagaaatatccaaagacttggtggagaatggaaagccttggtgggcaaggccattcctctgtattaataatggagggttttaggtggagaatataacaatttcttcactcattagggtttttaggtggtgaagataacaaattcttcaataaggaatttcttgcttttccattaagaacatccatctaattcatggctatgcttctcagccggctccgccttgggaaacctgtgtttgtaagatcttctcttctccattctaatgccttgtcaaattccttgctgcaaaaccctccttatcacgtcttcaccgctgatccttccggaccaagatacccggatctcggaaaactcattattttcgaagctaatggatatgacagcactcatttggaaaagaaggtaccaatggagttggtggatggaaaggccagggtaactatcgggtcctctcatggctgggtagctactttgaaagacgatggaatagtgcgtctccaagacgatctaaacctggttgcatctgatacagatccgaaacgcattcccctgcctcctcttgtgactctgcctcattgccaaaccaaagttgtcaccaacgtcgccatgtcttcttcttctcctgaggatgaagactgtgttgtcgctctcaagttcttaggacctcagctcagcttatgtagaccagctcaaagaaactccgagtggaccaacatcagaatcgaaaacccatgtttctactcatcccctgttatgttttccaagaaagacggcacgtttcgaattcttggatctggaggtcacctcattggatcatgggatctccacaaacacaagaacaaacccaagattcagaggttgcgattcaaaaaccttcccgagctcaccaagaccaaaagggagctcttgcattcgtgttgcacgagccaacacttggttgagtcaacaaccacaaatgagactttcttggttaagtggtataggaaggacacatccaatggcgtggtgaaaatgaaaacaagagctgtaatggtcttcaagctatacgaagaagggaaagctgtttacactcaagacatcggagatctctgcattttcctgtcaaagtctgaacccttttgtgtcactgctagctcctttcccggcatgtgccctaacgaagtccacaccttggatgttgacgaacacgcacttgtcgatctgtctgattcctccatcattagtgggatttgtacattcgggtccccttactattttccacctccaaaaattgactcttagtcttaggctggaattgagttcttgtcctagaagagtcttgttgtcttttcttagacctttcaaatatcaaaatctatattatatattttctgtgagattgagatgcatatgctcttggatatagcaaatttgtaatatctgcgatgactcgtcttcatgatcaaatgaatatgatgaactagaactctgctctttggaaaatggttcttttcctacctttgtcaaagatgcacatgaataagtacatcttgtcctttgtgtcgtgataagtagacttgatttgaatctcccaaacacaaccaatgacctttgtttgaaattggaaccaaattgattcactcattcttgtattaatatctgattttgtaaaaaagtacaatgagattccatctacgtatagggtttgaattactaactctaacaaagaacatcccactcaaactctaatgatacattttcttttcccatttttaggcttcattcacttgtaagtgtacctaagaacaatcatcctgaaacaaagcctttggtactgaactacgaggcaaagtctcacattcgtagtcatctttgttaccagttcgtattcgtttggtctctattgttgtcattggtgtctcacatactctatcatattccactgatctttgctccttctttcttttggccgttctctgttgctggtcggccttgcctttagagttcttcgtttgttttggtgcccagactctacaaagatcaggcatccaacttgtgaaactcgagaatcttcttgccctctccctcattccttgtgcttcaacctctttcttagcttctctgctttcctcagtgtttttctgcttactcgtaccaggaacatcttcattactttgactatgatgatgatttttgaaattgctatggatattttctctccctgattgactactgtcttcattgttcatgaaactatcttcaagatcctcatcagtgaacatgagcagatccatctctgtatatattatattgacagctcctcccagaatatgctgatacctgagaaggggcaaaagtaagatgcgttagcatgaatacacataaccaagctacaatatacgtgctgagaatggcattatatacctggcttttatagttttgtctacatacttatcaaggctccattcaccaaagaatccgccatctaacttgcactgaatgccctcaaggaacatgcaaatctgttttgcaaacttctgtgtcacagattcttcatttcccaaacctttcttacatcttagaatctccatcctgaaaagaatctgcagctcgtatcttatagcttattaaagaaaacagaacaacaatgccaaacaattcagcttagataaatgaaaagaaagcatcagtaaatgaataagttggctactgtaaccaaacagaaagtaaaaggatactctctaacgatcctactgggtccagcttcatcacaattccgctcactagccactgatgatgaatctttctttttgaacttggcaactaaatctttcggatctttcagtaacatcttggttagctcgtcaatgaccaacaagagggttccactctcacagctatagtccttctcagctctttgagaggagtagaagacacaagacttgacaagccgctcggcaagagctgacaagtctatttcttcagactctatcccttgcttgattttactaggaagactaacgaagaaattctctgatgattctgatgcatgaacatacgtattactttcctgctttccggatatacgatttccactcaaagcaatgtcctcttcagctagaggtaaaggagaactagctttatctgtctcttcagaggagttgttcttttcctcaattggatttgcgtccacatcctccaatgcattgcaattactagccacggataagctgcaacctctgggtttactaatctgtttcatccagcatttcagaaacttaagtttcttcgacttgctatacttgaagaaataaacatcttctagatctatttgaccataatctttcactgatctgcagaactcctcccagctaatgtcattaagagaatttttccttggttttcttttatattcgctacaactgactttcttcctgctatcttcatgatccacagtttgaggagacactccattgtcaaaaacacagattaaggccgaggaaaaagtgaagggcttgaggattcctgtccgcaaactaccattgctatttgaaaaagataccaatgctgagaaaccttccctatagagataacttaataagatctgccaaatgggtgatgatcttttggctactctctcacccgtctcctttcctaatatctgaaaaaccaggtcagcccaaaacgcactctcctcctcctgatcttgatcagagtcctgggagacttgatgaacaacaaaagtatcgcaagtatacctctctagttcaataagatcatcacacatcctcaaggccttaatactgagtttggtactcccatcacaaaactgttcaactagagagtcatgattgactggctcagtcccactagctaagttgataaactcatcacacctcttcccactaaatatttcagaagaagaaaactctaactcaccaccacacttgcattccataggtttaccattaatatctgcaatctcaagactagcctgaagggtaaatttctggctagtagatagctttggggaaataccaattgctggatatattaatccaaagggaacaactgaagaaccaaaaacaattgaatcagtagaacaatgcccccaacccaattctctaatcccactatcgaaaaacccagacttcaatcccaattcacatctttcatctccagatttaacatcaatccagcttaattgaatatctctatcatcaaataactcattcacacaataaaaaatctcccttaactttgacttaaacaaatccaagtcgctaaaacactcatcaccactcttaacatcaagaaactcagaaacccaatccaaatccctagaaattggggaaaacatcacaaccaaattcgacctcacaacatctaatccaccatcagtaaatccaggaatcatacctatctccggatc

SEQ ID NO: 887 - DNA, 46872 bp, Arabidopsis thaliana
tcgaaccaccggttcccaagcgtaatcataaacaatctgtcgcaaattcgccgcgacattaaccccacgaggcgatgccgccgtcgccaccgtggagctagatcgaagttcatatcctttaaccgcgtcgatggcgcgtttgagagagacgagtgtagggttaggaaggtcaaatgaaagcggagaagatgaaattgagagtgacgagagctttgaggatgataagagagaagaaagagaagaaaagaagaatttgaaagagaagagagaagcagataaaggaggaaataagagaagcttctcggcggcggagatcacgacggctaggtattgctccgaattgggtttgatcagaagcggattaagatctatcaaaagcacaaaacgctgcgttttggcgtataacaaatctccagccattgaaatgaagcagagagagagaagattcgattttggttttgaggttgaagaagagaggagggagtgagctacgaggttatgtttttggcgggaaacatattgccacgtcattagattgtcaatttattgggtcttgcttactactacatcataaggccattaatggcccaacaagagttttaatttggtgacgtggcaaaattgaagatagaacaaagattacgaaaacttcctccgcttcagatttttcctttctgcaagaattttcctgggaaaatcaggaattttctcggagaaaattctcgtaatcatgaactgtgtttctgcatttgaatttgttccttcaagtgctctatttccatgtgcacaatcatcaatccctgcgaaatttcttcacattttgagctcaaaagcctcgatttctcccagatgtcgtagtttcgcttcttcttcttcttccacaattcggaggaagcctctaactctagtatcttcaaaatcttcagacgcggaggaggtgtcagatacggaggacgaatggctgaagaagctaccagagaagaacaagccactgtattcgcatagcttaccttgtatcgaagcgtggctgaggaaattagggttttaccaaagtaaagacgatagagctgtttggttgattcagaaacctgattggcatgctcaactatctcttgatgtcactgatctctgcattaggtatgaagctgattgcttttgtagtttcattgagttcctgaagttctcagctctgagatgttgttgataaattcctgtttttagtatcctaaatgaatgatttcttaactagtttaagtgtttgtgattgtgtagttaaagctagttgtgttaacaatgaggatattgatgttgagaagaagagtttgtttttagcttggataagtataaaagtatagcatagtgtgatgaattaacctcttgaagatgattgtgaagtgaatcctagttcagtatttgtagtgcggaaccgattgttatgcggttggttgcatccgctgttggtgctatctaatcttgatgttttagtccaaggagttgagaattagaagctaatttaatgtctctgtgtatcaatccaacagaccaaataagttgatgcattgccatgttctctgatcatttcctttggagtttctctatgtgtaatcccgccaagttggactaactagattgcttgttatgtaggtacatgaaaagtgggccgggaaatctagagagagacatggaaagaaggtttagctatgcgttgagtagagaagataccgagaatgccatacttggaggaccttaaagaataaaaagagtttgtttgagtatctttgttcttaaactttgctttttcagtagtttctcgttatatgatgcatttgcttgtttgatccgaaaaccatttttatcacaattctttagcaggtacggtctttcaaaacttgaacaatgaatgtgaaaattatacgcatttggaaccagtaggtagataatcttactgcatcccacatgaagaacctatgcattatctaagctattactaatatgtgaaatttggtgtgtaggcatcggtgactttatttactgatgcataactttcacatcttctgtttcaaacctttagcaagactacatttacgttagtcaactcaaagtaatgagagaaaattaatacatcaaacttaaacatgagttacatattgaacacagaattaaaagtgatatgttactcttgatttatcaaataaagccttgtttcctgatactataaattctaagtttcttccgatatccaaaaccatcccaagcatctaagtctaacataaaaccaaaaagaaagaaagaaatacgtagaaaaaggattaacaagaaagatggcaaccaaaacttttctctcaatctctttaatggtttccctttgtgctgccatttttgtctctcaaggagtagctcatatgcaaacaccaccaacggttccaggacttctcctacctggcttacctattgatcttgtaaaatgttggtcgtctctcttcaatgttgaaggatgtgtgctcgagatcgccaaatcaattttctctggaaaattcgaaaatgtcgaagccgcatgttgcaaggcgttttcaaccttagatgctaactgttggccccatatgtttccgttgaatccatttttccctcctctcctcaaggacaactgcgctcgcattgtccccaactcccctacacacaactaagaacaagaattattgctggtctacgcttttaaattagtcattagctccaaagtctaataagtttcaatgtttattttgttagcaaaatgtgaactatatcttggaagagttctctttttatagtttttctcaatgacataaaatttcaatattttccttttatataataactcttataaatgtgttttgttggttgcacaaaagaaaaacattggaaccgaccaaaaaaaaaaaacattggaaccgaccaaaaaaaaaaacattggaaaatcgtacctcaaaatgcaataaccaaacaaaccttctcatatggatcctatagtatggttatttccggtttagttggttcggttctgtaccgaaattatatcgagcgttttaacgttatccagaacgaagcagagtaacgaagagtcatggcgatgctttttcgacctcctccttcacaatgtagaagcttctctccttttgtcttcaactacagctccagagaagtttcttcgtcgtctcgtctctccttgaaaacctccggcgacgaagaaaactgggtttcacgtttccggtcgaaatctctcagtttggtgttctctggagctcttgctctcggtttatctctatcaggtacgtttctttgttccttttgaccaagatcatttctttttgactcaatattgaacaacatgctctttgatttcagtaacaatgtggatgtgttgcaaaacaatctaaaatatcacaaagttagaatttttgtttactctgcaatctcaagcttgtgactttaattacttgttgcattggcttatcaaagtcagaattgtgaaatttcggacctagtctcttattccataactatgaacaatgcatatgcaatttcaagattttagctgtcaataactttgaatctctttttgcaggcgtggggtttgcagatgcaaaagttggtgttaacaaaccagaattgcttcctaaagagttcacttctgttatagatgttgctgatttcctctctaatggtcaggtatgcatgcttgtaccatccatctatttttgaggtttgattaaagcacttgtttcttgttaatgtcatgtggatctatttgcttattctgtagatttttagtgtatttctgattttgaatgttttcgccgcttttggttttcttttcttaatgatgttgttctttgagagttataggagaagagaattgctcaagaaatcgctaatcttgagaaagatacaggattcaagttgagagtcttggctcaaaactatcccgttacccctggtatgatatatgcttggaaaacaacatacttgatctctatagaagtttacttagtgacatttctctgtgtttgcaacaggactagcaatcaaagatttctggcaggtggatgatagcacaattgtgtttgtcgctgacccgacttttggtaacaccccaaacctcattgcttaagttcttgaagtatccaaatgggaaactgattgtgataaccggatttgacacagggaacatattgaatttcaatgttggagctacggttgatttagacatacctcgtagtttctggagtcgactggctgggaaatacggcaatatgttttactggaaagagaaggcaagaaagctacctcgattaaaaaaaccgatgatcgccactttctttgttttttgtttgcatgtctaaactgtttacaatatggcttgaaaccagggagaagatgcatctattgaagctgcagtgatggcgatatcaagttgcttacgagaaccagttggtcgaaacaactgtgcagagatccaatgaagtatatgaccccatcaagcgtatatgttattatcataatatcattgtatagattggcaccaaagagatacagaatttgtaagaatgaatccacgtctagtagtaacctctctccatttctcagcttcacctactcaaacaaacagtttcaattggttacttgtatcttttaaaacaaacaaatagagaaaccaaaatcaataaactggaataagatatttcaaattgtaacagcgaaaccagactcatgttgagatacatttacattagtcaactaacttaatgtaagaaaattcaatacatgaaatctctaaatgagttacatttttagacaacatttaaaattgatctgttacactttgagttacttttggtttatctaagaaaaacttgtttcgtgatcctataaatactacctttcttgctaaatccaaaagcatccaaacatctaaaccaaaaaggaaacaaaacatatcaaagggttaacaaagaaagatgggaagcaaaactattctctcagtcattttgattgtttccctttgtgttgccatttttgtcactcaaggagtagctcatatgcaaacaccaccgacgacggttccaggaattttcccacctggcttacctattgatctggtaaaatgttggtcgtctctcttcaatgttgaaggatgtgtgctcgagatcgccaaatcaattttctctggaaaattcgaaaatgtcgaagccgcatgttgcaaggcgttttcgaccttagatgctaactgttggcctcacatgtttccgttgaatccgttcttccctcctctcctcaaggatagctgcgctcgtattgtccccaactcccctacacacaactaagagcaagaatggttgttgatctacacttttaaattagtagttagcttcagagtaataacctaagttttatagttaaattctatgttggcaaaatgtgaactcatattttatgagacctctttataggttttctcaataaagtagcaatattcatcgaaatcttttctaatgtgtctttgtcatatatatacgaatagtaagtataaccacaaatatttttgagatccttaaagcagagaaaaggatattatagattaagatagaaatgaaaaagctccaattttatttaaacaaacttaaactccaaattttatttaaacaaaacttaaatacagtattgtgcttcttgtcttttgggtacaaaaattttccatttcaggcaggtaccaagctaaattctctacaaatctcttagtttttctcagtaggaaaagaatgcaaacaaagttctattgatttttcttagtagtgggagtgaacgatggagagctctgagtgaacgatggagagctctgagtgaacgatttagagctctgaatctgatcatctttagacgttttgattataaatagaagcgtttccacaagcatcgccagaactagtccaagaatcccaccagcagcactctgaaaggaaaagaaaaacatgattcacaaaaatcctcttgatggttttcagaatctgacaaaatgagagataccagagcggggttgcggttgaataaagctctgaaggaagcgtatccaaccaaatatccagtgaacatggtaagaccaacatgtaaacctataaaacgagtttgcaagaaaagcaaaatcttcagtaatgtgtaatacttttccaagaacaaagtaaccgagcgacaatgcttaccaaaaccgagctggtctttgtaagaagagaaaggctcttcgacttgtttctttggtgttatatctttaacaagctcagcatactccttcctctctgctatttctctgagcttcactaatctcagtttcagttcttcgctctatcaatcgaaaaatcagatcaaatcaaacatggcgagacatgaagaggtttaaacatagataaggaaaacttcaaagaaagaaacccagaagcatccttgaattacactcaatagaaccgcggcgacgtttcttcgattatgctcaacttttccaatcaattcaacagaattgtgcatattggatttgaatatgaatcgaacaaaactatgaaaccacaattttgtgctagttttgaccaagagataactagaaatcttccataaatttctctaaactataccaaaagacaaatctcttttgttgctggattgttcaagcaagttcagtatcatctatctttcagtggaaactattaacagcagattagtgagcagaaacagaatctaattaggtccaatttcgccggattccagattaaatgagcctgatagcgaaattccccagcaaagaaacttgatgtagaaatggaggttcgtgtaccttttctctgggtttgggactggtgaagacgaaattggagccggagaaaagtcccaacaaatccggtctggtcgacggatcggatccggtccatatagcgcggagcaatttgtacggaatggtgttcttcgagcgaagatcggaagcaattcctctgagctcgtcggagagacgacgatcaccggaggcgagagcgagaaacgatcgcagcggttcagtggcggagagaatcagaccagagccatttttcgggtcgggttgatccatctttgatcgggtccaaacacttgacgttgttcaggcgggtcggttctccgcgatgttttaagcaacgtccaaaataatatatttggattaggtccctgacttatacaagtatcaaatacaagactcttatccgacgtggcaatatttgatacgtggcattaccctagcacgtgtgaattactcgaatcacggcgacgaaagcttagtatgggggtattatcgtaaatttcaaaaagtgagtcattaaacaaaatattctattgggctgtatctatctttttttcgtttcgtcttctccaataatgatctccatttctgttattttccctagaaattttcgcaaaccctaaaaagagagagaaacataaaaatctccattgaaacagattggattgagcaagagaaagagatcatgtatttctaaaaagagagagaaatcctctgatctcctctctgattcgatcgagatcgcatcatttccctaatgatttcaaaaacctaaaacgatctcttcttttttttcgcttcgatctccattgaaaaggatgatttcaaatccaagtttattatcgtacacttgcattgcgaaaggaaccgtagttctcgcggagttcgtttcaaggcaagagccaggaatcgaagctatagctttacgatgcatcgagaacacgcctcctcatcattcaatgttttctcatacagttcacaagaagacgtatacattcgcaatcgacgatgattcctttgtttatttctcgatttctgatgaatccatggagaaacctgaatcattctgggttttgaatcgtttgagatcagctattgaagatctgattaaagacggtggatctgatgttgagacgctgattaatcctgtttctcattgtcttcaattgaagcttgatccagttttcgctgagattgttggtgttgttgatttggaattattggatatggatttggttggatcaccgaggagtgtagcgagagagagtcgaaatccgagtattgattcatctaaaggaagaagagctgctttgatgccacttttggggaaaccattgaaggcgttgaagaagaagaagagattgcataatgaagcaaaagggggagattcttgtgaggttggttcgattcaggagatatcagagaagaatgttgatttatgtgggaatggtaataatggagtcttacgcaaggaactgagaaatggtttgttgagtgatcatcatcatagacaaaaggcgaaacagatttggaagaaacatgtttgggttgtgttgatgtttgatttctgcatctgtgctgttttgtttggaatttggctttggatttgtgaagggtttcaatgcattcaagggtaaaagttatcatcatctgtgtacatctccaaattcatattctttgaatctgcatcaaaatttgatcatttgacatcttttttctgggtatccgtttttttggatcaaatctgatcccttttgttatctctctgttcttgtcaacttttttcatcttctttgatttttaaagtcgcaaaaagtgttgtttccaggaggaaaactagggtatagattgaatcctggtttacatgttaatgatgttgttaattgtactttggaagttaaatcattcacaagcaaaatgtgtgttgttattatctcttttttttttctcgcttctcttttgttgtttgattccataaatggtgctgtgattgaacgtgggttacacaataatagaggacaacaaaagatggtctcagatccagtcacacgttagtattttactagatatatacattgtatctttagtagtcggcgtatttaaaaataatattcccaacgaaaatgaaagtgaatccgtgaatccaaaatctgtaagtctaaggcttaagagtagaaagatgattacattacagacattataataagtgaacgaagaggttttggaaataagaaacaaaagagagggagaaagtgttaaataatgtgtgtctcggtctctagtctcagccacaaggtgtgagtttcttgttacctgcaccgcgaggattatcatccttccaatcatcgaaagctctagctttcatcacagcttcttcgtcttcatcatcatcttcctcgtcttcttcttttcttcttagaggtttatcattgtaccatgaggtggttgcttcttcaatggcttttttcgtctgctcttgccaatcattcattatgttcatctctgttaacccagcatcctctatgcacattgttggcatcctacaaaacccaagtttaatcaccatttttaaatctcaaaaaggattaagattttgtaatgagcaatattttgtgtctacctgtgacttggttggaagacctgagctatcattctttctctctcggtagagagcggtccacccacgatgcttgctggaccgaatataagaggttggttcttgtgttcgtgaccttgtgataccgaagctcttccttctaacacatcttgtgcaaatgtggcacaagtgattggttgtgccggtttagagtactgtatccttgcagcagcgtctctgtgccaggtttcagctttctttgtacgatcatcaagagcatcccgagaaaatccaccctctccatcctgatcaaaatatcataacacgttttcttcttttatatgtttatcaaatagttttgttcgcacctaaaaaaactaacaccacggtaagctaccttcaactgtctttcctttattgcagagagcatttcctcttctctctttagcatttccaacagatcaatagcctgtaacgaagttcaatcataagataatgcctcctcaacttgtgacaaatcatagggttctaatgaaatgatttttagacaaaccttacaaatagccaagttaattgaggagagccaggcctgcagaggaaagcaataagacaagaaagcttagaagaaaaaatcgaattagagaaagcagcaaaacaaaaagtgggacaaacctctctctcttcttcgctgtcatcatctggaatatcatcttctccagattcaaccggagtcgacaaagctgatgctttagtggaacgtccacgtcgctccttcctctctttaatttcaagaagctttgcctctgcagccttttgacgtttgaaccgagctatctacaaagtaccataatcatgaagacacaacacgcatttcaaaatccgaaaactttaaacttcattctcgtcagaacataaacaaaagaaacagggctgaatctaccttgagagcccttcgatcagcaggtgcaccagaacctcctcgtgaagaagcctccaactcctcatccggaacaagctccattgcctcacagaacgaaaagaactcctagacacaataacaaaactatacatcaatctcaaaaaaaatccaaccaaatgctcattcccacttgcaatagcatcaaagggatacaaaaacatgtaaacactcagcagaaaactaaccttcaacttagcatacgaggctttgacaatctgaatccggtcctcctgtatgattttctctgtcaactccgcaagataataaggcacctataatcacaagacaatataatccctcgtcactttatagaaatgtcaactcgcaacacaatcttatgatctcaacacaatcttatggtctccacacagagtaagttcaatggaaaacgttacaatccaaaatctcagactccattttgaatttcagtcagtagctaaaactagaagcatcaggacaagctaaagtttttcactttcagatctttccacaccaaaactaataacaaaactagaatacaaacaaattacaaaaatccaaacaacagagactcaattgcataccaaaagatatttgagattgttggtgctaatatcttctttagtctcgttagacgaaaacagcgccagcttcccgatcatatcttcgcacttctgaaacatctcacatcctttcttcacaacatcctaacaaaccaaaggaaaagaatgaactaagcatccccggaaatgtccaattcagtaaaaactcgcgattcggattcgaaatacccatttcagataaacaccctaatcgaatctgtatataaaaaagaggtagaagcttccacctgatcaacaccagactctgaagcagcaagatgaattttcctagcttgctcgaatagcaccgataaaggcatttcctccatagccaaaccacccatcacaggcaacaattcaaaattccttaatgaaatcgaatccacaagaatcgagtttcttcgagaagaggatcgtcttttgaatttttttagggttccaaatcgaaatctgactaatttaccacgagtacacacagacagaggagagaaaatgttaaccgcgaagagctttataagggacggttgagattttgccgcgtcaggtgaagtagataactcgaattctattagccgttagatctgtccacaacctcaaaagtcaaaaaccgactcagttgtataaaaatatcaagtcaaagatcaggtgcggcgggtgtagtgtaaaaccgccacgaatgtgattgtggctatggtatatgaatgtttactgttttttttcttaatttgaatggagatgaaattttcttgatttttgtacgagtaggagtatgaataaactagtatcgcacccgctgtctaagcagcccgaattgtcgtagtgttattgattcgatcgacctatagcagtaaggaatggtggataccgataactaaagccacctcaatcgcggtgaatcagctggatccaaagatttaggaacatccaacaaacaattcatgaatcgaaaacgaagaggtgcattgattgaacagagcttactatatatactatatatgactgtcacccattacagtctacatagcttgaaagggaaatggatacagaacttaaatgtttgactttcacgcatttcactcgacatatcttcaagaggaaaatgaattgactgaataaactgtagtatgctatatacacagcacaataatccgcattatttaatctctcacgcacacccgcgcagagaacaacagcctcctaagcgaccaaagctagagggatgcttcaaaagttgacctgagatgagaactgcaagttgagagaaactacttgccagatctaaaataagatagtcatatgcgattcattaggagactttgggagtgaatggttcttacttcttacgagaattgagccatacggcaagagaaatctcagttacgatgatattggatggctgggtaagggtagcgagtggcgacttggctgaaaaaaggttaaatttacgtattgagaaaaaatgtgaagagtaaaaaattaaagaaagtagttgaggatgtttatgagcagaacctgagtaaccccaaaagacttgtcgtcacccattttttcaagtcaatgaaaatgcctgcgaacttgatcacgattatctgatatgaaagaacagaaagagagtatatatggtttagggatatataagaaaagacaaatgttgtgttcacttgtaaagaggacttacctgagatatgatagttgaggttattgtaacgagaaacatattctctctaaggacttctttgaaggtttggtctacactttggatttcaaactcattaaaaacctgcgttattttagaaagatagagagatgatcaacatatgaactctaattagaagagtgggaaaaaatcagatattaccaggtagaagacaaaggaattgaatatcaatgtgttcatcattttttcggcattgcccgtctgaccatgcttcagcttcagtagcttctcagaatttatgagtaccagcgagagcactaggtaaaatacctggaggaaggtatttcatgacacaagcattattagaggtctccaaaccagtgtgtttgtctctaatctaaataattaattagtttaatatcaccaaggaattgtatttgctccttggaaactatgaaggtgtgaaatacttaatctgacattaacgtccacacatgatcaatcgaggattttaccctacatacctgaattatcatcttggaccacatcgtcttggttataagaggatctctgaaaaacaaaaaatgtacacatgcatatgtactatcagtttgtgtatattcacctagaacagatagtgtgttttaacaagaattgcaaaaccaacagtttcttcaaaaccttcagcatcaatacattaatgtctctttctaagccaactctatattgacttaataatcaaatcttatccttgatcctattcagaatttgtaccttataccaaccggtggctttcccattaggtggtgatcagatcttggtctgtatgccaaagctaatgctcctaagatgtcgataattagattaaccaacagaaactgcatcaggaaaaagcaaaaactgggttagggaaaaggtttccaatcttggaaaagctggataacaagatgatgaagtaacaaagggataacattttgaacctgcacggcgttaaggggaaatgcatcataaactacaacctcaaccacacagacagccaatgctgatacactgacagtgaggcggaataggatagatttctggacattgttgtacagagatcgagaccatatgatacactgcattatccaaacaagcctctagtatcttatcaaaatgatttaaactgccaaaaggtcaacgtttgctcatcatttttgtatgcattctataaactgctactgcccaagttcgccatttcaaccatgcatataataaaccaaccttgacaatcgtagcaaaattatcatctagtataatgaaatcggaattctcttttgctgctgcggtccctccaactcccattgcaaggctaacatcagcctgtgcaaggaaaacacgaatcataggttgtagtgatgataaatatgtctttctatatttacaattcatattctctttgaaatagtgcgatgagtttttagagttttaataagataactacggacctcgcgtagtgtttttggatcatgtattcccattccagtggctgcaactatatggcctcttttcttcagtgcttggacaagcagaaggttgtcgttgggagaagattgagcaaaaaccttcacattaagtagtttcttagttttaggctccatccagttcttcaaccagtcggctaatacagacctatacaaaatttataatagcaatctgagcaacatagttagtttcccatcaatatataggtgtgcaacaagttcactcagcaaagtgtcacagtgtgacaactgatactgaattccatgattccactcatcaatgtatcatgatgtgcacagatgaatatatatgttaaaaccataagtatggaagaatggattcatactaagatgtctccggcaatctgctctctttctagatcggaaagttcacgaaattgggctcctgtccttatattacggccagatgcatccgttagtatcccacattcaattgctattgcctgtgcagtcaaaccatcattgtccgtcaccatgcaaacctgaaagtcaacatattccacttagaaagtagaccgataaaaggggttgacacaaagaaaagaaaaaaaattcttaaacattgtcttccgcaacaaatatcaaaggtgtcactgcatatgaaaagtgcctaatagtcggttttgcaattccgaaaatattagtacgccaaattcagttgcagagaacaaaaatccagaacgagtagaaaaattctctctactaataaaagctcaaaaacctcatgtgtcattctcatacatgaggaagaatagtaatacaggcactagtagcataatcacaaaaacaaaaataaccatggcaccttaacacttccggaattgcacagttggatcgcatcccttgttcctggccggcaaggatcctgcatgttattcaaaacgttggataagtaatgacaatggaaagagcttcggagaaagtggaatcaggtactaattcttattgatacaaacttaagttttagaatgagaactggaaatgtacctttataccaacaatagccaacaaaacaaggtttcgaggttccgtaatggttggaagacttcccagttcacagggttgataagcaagtgctgcacaacgcagtccctccttactcatattttctattgttccttcaaaagactaaagaaagaatggactcttatataaaaaacagaacaagaaataatagtgtacttttgaattagtcatctacgttcataaacaaacctttcgtttctgttcattaatagctctggagttgttggccccatccatatacccttcgcatgaactcagaatagtttttgcagatcctttccaatgaacgtgagcgtgtgtaccaagctagaaataaatgatacgaagtgagaaagaactacagaagaatcaaacatagcataaaatatgcaggcagattacagtcaaacaattgcggagttctaacagaaatatactatatatatatatgtgtgttgtgtgtgtgcgtgtgtgcacatatatatcttctcaacaacattgtagacaaggttatgttacctgtagtgccacgcctccatatttctttttcgggttgaatggtatagtatgacggactaatgatgctgacctggcatcatcaaatttcattcccaactacaacatacgagtaactaagtgtcattaattataaacttaatcactatagcaagtagtaatgtaagatcagaaagaaactaaaccttattcccaaagttaagaatggcttgttctgttggtgatccataaacctctggttcagtgactccctataattaattacgaacataccaagaagagctcatattaaaacaatcagactacaggaatctaaccaagtcaacagtgtgatccatgaaacaattaccgtttcaaaaacaacactgccatttgtgttttgggcaatgccttctatgattagttctttaagaaacgtgggcaactgtgagacatcgtccatatcttgcattcttattcctccagcccagacatcaaccaccgacatctgcttagcagaaaataaatgattaaaaagtgggtactcaagaagaagaataagcggaagcaggaaagagctgattgcatataaaaggaaacaattgcctgattcaaagttacaattccagtttgatgacacaatatagttgtaacagatcccattctttcaaatgcagagggtgattgcacctgaaaaacatttacggaagttaagcacttgttgatgctctaatgactttgaaaaatttggaatttaaaagtagagtagtaccaaaactttgtctttcctcattttcttcgttgtcttagcaaagctgatgaaataaggaaaatgataagatgagaaacaaacagaagtaactgtaaaaaaaattgaactgcaacgaagcatgcatactttaaggttttgccattctttgaacagcaatagagtttgcaaccttattaccagactactttgccacatttacaagaaacctgggtatttacttggctttttctgatatgtgttttgtttaaacagactttcagaaggaaaagagacttacttcaagcgaacggctatagaaagtcctacaggcactgccactactattgtcgcaatctgaaaaattcatattttggcgacgaggttacaagaaaagaccacatatcatcactgtagccacgaaggtaaagttcaacattcacgtaccccaaaactcagggatgtgatcacaaattctattgcttcatcggcagtggtaattccgtagataaacattggagttccatctgattttttggtcacaccactaaagtatctggaaataaaacggttgttaggtccttgccaggatggagctgaagatctgaatgcaaaaaataagcgcaatggtacattttaaaagaaggaccgacttacccgcctacttgaatactacaggcaactgaagcaaacaaaacgacaaaccagctggcagaaatcgcaagccatttcaggtacccctagtaaaacgaattacagttgatatatgagcatactatcataggtagcaaggacttagaatccaataaaacggacctgaaaaggcttttcttcatcagtcttctgtgaaacctccatcttcaacccccattcagtgttcattccaacacttgtaacctttaaaagacggggaaagaattaagtgaattagaagatcaagaacaatgtacagagacagaaatccccgaagctaatcttctaattgataagaaagaaatttccgcacagaaatatcggctcgcataaaaaaaaaacttttctagattaattcttcttttatctcaattttactttatccctgatagaaaacagaaacttcaatgttttgcttatctcattttatggcaatagaagaagagtcagcattgaggtaaagaaagagaagctgtttgcagaaacacggaaaagcttccaatgatttatttttgttgtgaagagtctattatagttacagtgtttgttaacgtgacatatccctttcaagatagcctcatctttaataaaagtagctataataccatctaggagatggatgtgtgatgtgtcaagcttaaaacaaagctatgagacgtggctcgagagcttaccagcattgtacctatgccttctatcagttttgaaccagataacagaaacggatttgtttgaagatctttttgaacctgctaattgaaaagagagattagaaatacaggggaggtaaatgatacagctcatcaacaggggttacatcatacaatttcgtctgaggcagttacttcttgctcggcaactttcaatgagtttgcaacaaacaggacaccatctgctggtacctgcagcattgatcaaaattcacacaaattgtgaagctcaagccaaaaaagatttctgttaaaagttgtaatgcgtacctgacaaccgttcttgaggggtacaatatcgcccacaacaatatcatatatagaaaccctgactcttctgccacctctgataacctgcaaccaaaaaagttcagtattgtgcaacaccccacacaagggacgaagaaaaccgtctgcatgaacaaacctctagatatacggttctcttctcctcagtcaactttataaaccgacaagattgcttgtactcagcgacagctgccaaaataggagacaaataaaacaaacatgattgtttccatataatctcttctgaaagtatgaagacaacagcaactcaagcatgaaagattgtactacgatacctatcgcaatgatgtgaaaaacagtgaccaaaacgatgcaagcttctatataccatccatcaagtataccctgaaagtttcatgtacgtaagatacagaaaatttgaggagagcacaaatctaaaagaatcccccagacaaaatgcaagagagccacatgaatcatgtggcatgatatatggataaagtaaacgatgaatctacaccaaagcaacagtattataaccagtctctctaggagacaagaaacccaacgagacagttagagcgtggagaacaacatactaatgtacaaggaaaggtgattagatcatcttgtagagaggaaaataactcacctttgttttaattcgcagcagcgaaaagaatacagcagcaaacatgataaccagcaaatgagaaaactggctagctctccagagaaagtactacaacaacaaccaatggaacaaaaattgaaaagctttgataaaattcgaaaaacaaatttaacaagtaaacaaactttggtcatacccagaaagtctttccctttttgcaaggataagtgtttgacccatatgcgttcctgcgaagtagtatctcatcatcgcgacgatctatgcccactttcaagtcagtcttcaacaaatttgataacccatgaacctatgaatcatcatcatcgttcaaaatggtaaatcagcgattaaatcttcaaaatcataagaagatattgttaatcacaagtacttaccccattatatcgattcaaagcttcaaggctacgttctttgactagttgaacgagttcttccactccaatcccaaaccctccggatgttgaagcttctgtgcaaacaaaacccagaaagaaaaaacgttttaagatctttcggtttagttcggtttgagtaacgggtttagtaaaaaaatccggtaaaaacggaggaaacaaggaaattacgataagagaaacaaaaaaaatagtaatatataccatttgatgattgttctgtttcttggtgatcatcatgtacaagctttattacaaggaaaatcaaaaagattagagaaaagtccgtagtcaaaaacagatctttatttatatctactaaactgtgaaaactaatatgcttactgcttggtcaggtacggttcctgttctgttcctcctcaacatctggcaaattaccacttgataaaatgccactgatgctctcttcaacgtcctctgtgaaagaccaagtaaatgagacatgtgagataaacggtatcattcaacgtgtgagtaaaagtatatataatagctcaccaccctcctccagcgatgggtagtaacgtgaccggcctccaaatcgtgtggtgcaatattctcaagtgcagcttcagggtcaataccggcttccaactcgcttggaacatcttcagctaccggagggtgtggaattacaacatcatcatcggcgagggatgatgagtaaccgccgccgagaccaatctcaagatctcccggccctacattgggtgatggcctcttccaaaacctgaacattgacaaattaaatacaaccatcgaattcgaacgtattctatttcgataggattggaacgtataataataataagaagctaaagaaagaaattaaaaaacgtctacagaacgatgttttttcttttttttggatatgtgagagatgtttggagtgtgcaaaatgcctagcgaagagagtttatagagaaggtgggtcaaaggaaactaggaaagtgttcagcatcaaaataatttcagcatcagataatttcagtttaattacttttttaattagtgattgtaaacctgacattcgatttatgtcaaataatttcagcatcagatagtaatctcaaaatttaaaagtacacaaataaaaggattggtaacataattatagaaaattcaatcaaaatcatttaaaatgaatatattagccgaaaactaattcacttaacgatacgctgcattatgtaaacattttgtaagaatgagatttctctaaatcaaaaatttttaaattgttcaatgagataccttaaccgatcggttcaataaaatcttcgtaatttctgtacgaaaagttgtacaaatcaaacaatcaaacgtccaccatttttaaaaattacattgtttcactgctaatttgggtctttgcccctactagtttgcctaatacaaccaaaacatcctaaagattttaaaaagagggacaaaggttaaagtgcaaatattttaagaagcaatatttttggggaggaacaaaaagaattaaagagaaggtttagttaaggagattaagacaaaagatgagagattaagataataaggaggacagggtcgcacgtgcaacaccgaaatcttcgaccagagaaacgttatgaatcaaaagatgctgcgcacgtgcctcctcggtcaaagatatagagatatcagataccattgctaataccccttggattcaattttctactgatggtaatttctgatttgtaaaacttgaaattctggtactagattatgatatttctgtgtttacatttatgtagtttagaagtacaatgtttcttcagtttagatcttattcaaaatagacaaatctaattaagcattgcttgccttatttttgatgacgagatttaattcaagttaacgaataatgtttactgaatatttgcttcatatacgagcaggacccatcaagagaactagtttaattttctcaaaggtgcatggggtgtttaatttttgtttgtgtgtacttgtaatattaattaaccagcaaatctgtgtttttttcttcttcttatatatgaactagtttaattttttttccttccccctcagatgcaatggaagaagactagagtgtgtgtgtgtttgccaatcatggagagacggttttgctagccaaagctttgaacagttcagcgaccatctcaagtctagagatcatatataatgaaagtaatcatatcattgatgacttgctctcttgcttgtattatatcatcaatataatgtacatttctcactgggcctaaactacactactaagactagttaagtagtagtgtagtactaatcatgatcattttcaaatcataagttgacgaagactttttttatctacattggcattcatatcaaaagctcttttgtgtaatccgatcgtatattttttgtggttaaccgttaacctcgcctgatcattttgagagtggtagttagaaactttcagacgagtcaagttatcaacaaaaacaaaacagtagtagaaagcaaaggccattggaaaagtgaagataatttcattgggctattaatgggccggatcagtagcccattatccacgaccggtgggaggaattcgaactctagttgccgtcttctctgttcatctagttattaaaaaaaagaatggtactctggcaattacataaaaaagttcccagctttacagatttcgaaacaaaaaaaaagcttgattggttcttgaagtaagatcccaagaaagagagaagcttttgtatttgcatagttgtcatgatgaccttttatactaaactatgcctttcttcctcaccaattcaacactttacttacagaggtacttcagttttgttatccttttcttcttctatataaattttcaaattgtttaaacactgacccagctgcttgatttgtctctgttataatatactgaatcttctttgattttcactgtttgattggggtaaaaagtttagaatttagaatgagtgatgggtgatttgttttttcagcaatggaatgatatagttctcaagttgtttgtaataatgactcaaagaagaagtctttttgttacaacaacaaaagaaaattcaggatttcttatgtaaaattacaacaaaaatgtaaaggtgttagttaatgtcgatagtgaaatggaatgattgaatttacatggtccactttgaatatctctaatcatttctgtggtttcaatttctttcatatccaaatcatcgatcacttcataacagcttgatgaagagtatttatgtcgttgatacagtttttacccaaatgggaaagataaaaactcttttcatattgctgtgtaaccttttaccttttgagtttaaaaagtttccttttttatgttttcaattcaaaactataacattagtggtaatttgattatgtatttctcagtaataaagattggattttactttaaaacctagttaagttattgtttgtttgatggcttttgttgacaattattagtttgatcttgttctcagtaacaaacaatgggtagaaaaatgaattggagataaacaaaaatgaagcgattattggaatgaaaaagtaagagcaagtggggacgtgttaaggggcctttgtgttaacataaaaccaggagaagcatacatttcttgctttatctacctgtaaggatgatgatctcttacatgattctttcaatgtgtttttacatgtgtgtcagatctttcttttattcaccaaactttattcctctctgccatttccatctggaaaaataaaaagctcatgtaactcccactcaacaatataacatgctataccacatgtactttgcagttttcttgtgcttagacttgcaatttcactcaacctttttttaatgcttgcttaagatctcaggcatcctctgttttttttttttttttttggtaccatcttgaaccattttggcttttgccttggatgttttgctgattctttgctttctatttcactttgatttttggttttcctatcagatggatgatagtaggcaaaacgcttcttgagattcagatttagtcatctctgctaagattgattgtgttgttgccctttgtttttttttgtaagagcaaccaccatgtccataagagatgagaaacagtgtgagatgagaaacgaaatgatgctatttggtttactgattaggagaatctttgatgaggagagtggtaagcttcttcagaggcttgaggatgccaattgtgaaattacagagttgaagaaagtgagaaatgatgatgcaaaagctaacgagaaggtagttagcataatcgcgtctcagaaacagaattggttaagggagaggtatggattaaggctgcagattgaagctctgatgaaggaactaaggaatatagagaagaggaagagacatagcttactggaattgcaagaaagattaaaggaaaaggaaggtttattggaatctaaagataaggcaatagaagaagagaagcgtaaatgcgaattgttagaggaaaggctagtgaaagcagaaaaggaagttcaagatttaagggaaacacaagagagagatgtgcaagaacattcttctgagctgtggaggcaaaagaagacattccttgagcttgcttctagccagagacaacttgaagctgaactgagtcgtgcaaataagcaaattgaggctaaaggacatgaacttgaagacttgtcattagaaatcaataagatgcggaaagatttggaacagaaagatcgaatcttggctgtgatgatgaaaaagtcaaaactggacatgacggagaagcagatgacattgcttaaggaggcaaagaaaaagcaagatgaagaagaagcaaagaaatggaaaatgaatccaaagtcaagaaaacacgagagacggtcactaagaagcatgtttgcttttgaagccacaagtaagcctaaaaccaacagtgtaggttccattactcacattgaacatctggattggaataaagatcctgatgtcgtcccctactctattggtgatctcagtgaactaggtaagtcctcgaaaagattcaagcttcatttttagtttctgtttgaaatttgaattgattctaaatctccattggtacattttgaaggagtcgatggaaatgcaaagaagcgtgagaatttggtttttggggaggaagaactttgtattagagtgatagggaacaagcaagagatagagataggggattttactgagcatatgaaactaaaagatgaaaaggttgaaactctgtgtttgcatctgatgaactctgagttagaatcaaagcggttgcgatcttgtattgaaggactgagccaagaaatgttacagttgagacatgacaacacacagttagaaggcatggtaaatcgaagaggggaggagtcggtttccctgaagaatcaagatttcaagactcagccaaaaagcttggttccccacaagaacaatatgagttgtagaagaaagaacacaaaaacagaagcacgaggagagcaagaaagagaatttgattcaagggatgtttctcaggtaaatgctaccgagaaaggaagggaatcatactctcctgatgaattgagacatttgactttgaaagctgctcaatctgatgctgaagaaggatctgaaaacgaaagactcttaccagagaatgagtgtaccaaaagagaaaaagcgaatagtaaggagagtaagagcctaatatcaagcacaagcaatccaccttggagaatggatcttcatgctcttggagtttcatacaagatcaaaaggctgaaacaacaactgatgatgcttgaaagatatattggtaaaccggagagccaagagactgaaaaaaacagcagtgataccggaaaaagggctttgttattgctcattacattgctcaacaaacaagttactaggtatcaatcactacaagagaagattgatgatttgtgcaaaagaatggtaagcaatcattttctcataccaattacattactatctctgttaacataaactgattctctttcggttaaccattatgtatagcagcatgtgaatgatccgcagaagattagcggaaaaaacagagcaaatggggaagccaaaacatcactagagcatttcttagatgagacatttcagctgcaaagatacatagtggcaacaggacaaaaactgatggaaatccaatccaagatcgcttctggctttgttgagtttctagtagacctaatcacaactgaatcctcctcttctagtagcagctttgatccagaacgttttgcagaaaacatcaaaagtctgtttcaggaagtgcaaagaggtcttgaggttaggatatcccgatgcataggtgatcttgaagggacattagctcgtgagggaatgatacatttgaaacgacgggccgacatggagctacgagtatgagaagctacaaaatgtgtaaattatttacttcctcttcagctattattgaagtaaatgagagatattagcttttgtatatagattttacttatatataggggaccagtggtcatatttaaactcctgaaatcttagttaatagctcaatcagattattgaactatcgaaatttcggtttggtgttggttagcagcttgattagaaatccccatccttatataaaggaccacatgagtattataaagagaatgcaaggtaaggatgcttaaattggatgtgtctatctcttttggaagttgatagtaaaaagtagcttttggaagttgatagtaaaaaagtagcttttggaagtgatagtaaaaagcatttctatgtgtttttgctttgcctctttgtggaagcttcaaacattcaatccacaatgttttgtagttgccgtcttgagttatctcctccaattaaaatataatgtcataccaaaagaggaaagagattgttatttgtatatcataaattcataatacttagaaagtttgttttttctttataatcaattagaaattattttaagtaatatcatatccataataagtatatgttatgttaatatttttatattgtttgtataatatagattcttaggatttagcatacgattagattttatgggttttgtttgtacagttattgctagctttttagtgagcacgagtaggcgggctcgcccgctagagtcaaatttatctcaatttttcattgtgtcgggtttggcttcttcttgtagacttttcaaaagtcacttttgaatgtagggtgacgttcctataaggtaaataacatggtgacgttcttaaggcaaacaatatggtcaagatggtcttcgagaaaaaaaaaaatgaggattgtacttgataaaaattttacgatcaaatagggatttagtttaacttggatctaaattataaaggtgatttggtgtttagatgaacttaaaatgtggtttcatagatatatagatgaagtcttcttctgaagaaactagaggtctccaagaggtgatagggttgggaggattggatttctaaccagaagttttgatgaaatcaacaaaagagaagtggtatcttgaaataagatcatagaaccttttagtgcataactttctaatttaatttatcaaaaaaaaaaaagcaaaatgaatttaagaaaatgttgaaaatttgagaaatatttttctccacaaatacaaatttcattctaacacttcacgtttcgtaagcgcaatatcgaattgctttatgataaaaactaaaaggcagacaagtgccaaaaataagaggccttcgttatggttatctttataactccccctttaaattcttcttttatttcttgatggatggcatataattttcacattttatatattaagtactatcttatactatcaaacgtgaaagaagaaagtaacatttcactaatgtcagtggtctctcaattcgaataacctaacatgttaaattcaaaagcactcctcaattctcatcttacgaacgtgacttactttttttaaaatacttttctgatattaattaactaattagaataagatttaaccataacatataagtaacacatttttttatatggctttctattcaaaattttgacatataccaaagcttaagtatataatccgtgtgcaaataaaaccccaaatgcgaaaaaggaaattccactaaacaatgagactcctatcattttcactttacggattcatatacatatatagaaattgtagggcttgtaatcatgattgtaatatgaattggactgcctgtaatcaatccagagtcattctacttgactgtgatagttataataatgagcaaccaacttataatcatcataaatttccaagttagctgattaattttaaagtactagatggtaggaagaaaaatggaactatcaatcttttacttagttagtgtaaaattcgttgtcatttgcggtaaaaatttatgactcagtataactttgtaaaaaagatatttcaaaacttgcggtgtacgtggagagagatttcatacggttaaaagcactttttgcttcgtttattttcttgaaatatttgttgttgtttgacctaaatcctaatgaataatcaatgtaatataaacaaagtaagtgatctttgggatatattccaacaatacatgcagtttcaacatgttacatatatacagataaactatacttaatagtagtatacaacaaagtatcgcatgattattctcctaatcttcgcatttcgtttctacacaaaagtcgccgcaacataactcatgcaacgacaaagcgggatcgagggatagagagagcacacaacacaaagagctgcctttgactttttcaaaccctaaaccaaattgaccgtaacgtccatcaacaacacgtcccctcaacgtccatcgtgattacctttattatttcttaccaacaatatttttctgtttttttctttttacaaacactaattctatacattatcttacaagatttacactgcctaaaacaaactaacaaaacatgtgtcttctaagtgataacaatgaaattttctcacgtgtaacgtttcatactatagtttacgtacaaaaacaactgaaattggcataacaaattgattagatatttattggatctatcattcatccacgaatttttgatagtgaaggtacttaattaacaagtcgttttcaataataaacaaacaaaatgccatagctcgtgaacaaagaagcacaaaagaagagcgtacgtttcatttattttattaaattcaaaattttcaattcaattcattaatttattatcttttcttctccttcatgtcttctctaacctctcctcccactatacatcgtccttaacttttcctttttctcgttcaaatgaatccaattcctataaagctttctttaatttttctctcctatttaacccaaacccatttcatataacgtcaaaaaaaacattattaggtcttcattaactcatctccaagaaaacgaaaaaaaatggtttttgttaatgatcatcaagatcggttctgttcttctacacgtaagcagcttcctctgttttcatatccaatgaataacattgcatatgaaactactccgggattagctacacctccggttaacatcgctggatctgttccttttctttgggaagaagctccgggaaagcctcgtcgtgttaaaaaaccggcgaggttgaatcagaaaggtgtcgtgagaagtcttgagcttcctccgaggttagttttacccggagaatcaacgacggtgaatgagccttctccgactactgttcttgatggtccttacgatttacgtcgtcgttcactgtcgcttccgagatcagcggctgttattaggaagttgagaggagttccggcgccggcgccggagaaagaagagagattggttggtgggtctagtagatggggaagttttgggaattgtaaagaggtgtctgagggtattttcgacttttcacgttttagagatgacggttatgattgccggcgggattgggccggtggaggaggagttggtaacttcgccggagacgcaaaagtgaaactttataggattataaagaaaggaagcttttttaatctctctcatacaacaaagtcagatttttgggtaagtttttatcaaaagtttcatactttttcctaaatttctaacacttttttttaatttttggtttaacttgatgattaagtaatgatcacattttattggatgtttccggattatgaagattaaccttttcattggaatgttaatttttttgcaacaacaaaaagaaaaattattgtcaacatttttataataagcgattaaattttgtgtataatatacttttttttgggtacgtgaaggaagtaatagtgtaacacaattattccatagttaaaaatgcaggcaagggtttacgaagggtttaagcaagtgattccatggaagcgtaagcaagagaatctggaaagaacaaactcttccattgtttaaatatcgaatctctttaatatatatagtttgacgatatatactaattagtcttctattgtgtatactttattttatacaatctgtcaaggaaacactttatattataatttacaatgacaattagggatttcatggttgcacaaaaaaattgttttttattttatcttccatgcgttttctttttataagttgctactaaaattgtattgatacacggatttttgttaaaaaagatgcagagataatttgtttaaagtaataatatgaacaagaaaatcagccaaacattatcactgatgtgaaaagagtaacaaaaatgaaacagggtttttataatatatctttgtctatatttgacttcgctagcttgtgtaaattttgtcgaagttgttaaaaaatggcagttcaattatagagtacacactttaatacaatcattctattaatgcgtttgtgaaattcaattttatgcaaatttataactttattcaactcatcattactaattccattcatcaaaaataattgataaacaagttcaatgaggaaaacctaaagaaacattccctagataatctagattgaccaattgggtcaacaagattaaaaaaaaacatcagtctaaaagaaaatgaaatcaataataatcatcaccaagtgattttcttctcttataattggctttgaaacaagcttgccttagcttcttggttccatcactgagttctgcatcaggttcttgttcaataagaaacctatgttcctccaagttcttcacttcctcttccattccaacattctatcaccaaaaacatgaacaaactattaacctttcgaaatcaagaacgtaatataataaaacctaaaacgctactcgtgaatcacaagcaaatgctattaataaattaatgttgttgcaccttgagattctttataagagagtttagactcttgagcttccggtgaggccaccggtaaattcctaattccctgcatcgcttcttcaacacagtgagtcccacgttcagttctttagccgctttcatgatcggcctatcgaaaaattgtttgatctcagacatctccaatttgtcttgcctctttttcttaaggttcctcttcttcttaactgttaccttttcaactttcacgttggaaatgagaccgtcgttttggatagccaatggtgaagaggaagaggagtcacttgagaagtagggctcttgtgtcaacaagtgaatatcagatggaattgtgttatccacttcaatgttttcgaagaaatcttcaaagctattgtaatggaactgaaagtgcaaccctgcatttggtttcaaatcttccatatctaggagagaatcaagcggaggcaacctgtagaccaaaaacgaatgagaaaaaacagtaaagaaaagagagataacttgtttagcaagaaaaagtatcaaagggtttccaacttacttatctaacatgtcgtataacgaatctggttcatactcgttttcgatttttggagaatcgagatgatgaagagagttctgatccatttgttgaagaaacagtgatagaaacagagcagaatagttaaaaacagaggaatgttttgacgaactcatatatagtctctgtaaaaacaaagatgaatgttcatagggattgcaatgtaatgggagttacgagtcccaaagcgtattagaaatcattaaatgttaatcttaattaattaccgtgtgactttaattaagtatatatgatcacgggggctgaattgtgtgtaggttagttgcttctttaatgatgatgacgattatttttttctacttcctctagtcaaagtcaatgcatgaaagttgataagatcatattgctaaaaattcacaatcgatattaaatgaattgagtttttgtgtattatcgcattagatgatgcacgtgttatatgttacgatgatagatacatttgatgttgaagatgattaagagataatgagagtctccactaagtgataatttacttagtaaatgaaacaaagaaaacgtagtcaaatcaaaagctttaaatgtaaccatctttttttcacttctcaaatcgagttcgcactacataataatactcccaataataatcttgggagtacattgtttgaataaatctgtgaaaaccccaagatgatttgagctcgaagaagaaacaccaaaacacaatgtaattttgagttcttgaagagtaatgagaaagaatcaagcttttttctcttcatattggtgttttacttttgaccaaattcttgaattgttcttgtggccagtgtaagaacgtctacaaatgcagagaacgaagcgcgaagcagccttgcctctattgcttcaaagtgcctgtaaaattatccagtgagaaaagatcaaaactagtgtaagaagtaagctaaaaggttctatggacaagagatgtctaactaaagccagtttcaaatcgataagtgattcaacgacgaagaaggacttgaagaaactcacacagaaagcttgttgtttgatactgacataactcttctcaccttatcaggctgcaactgcattaatgttcacaacagaagaaactctaacatcagtgaaaagcttgttggaaattagattgtattcatatgttggaagtgaattgagaaatttcaaacctctttatcaacagccaatgatgtataagcaatcaaagcatgttcttctgattcaaaactcacatccaaattactgcacattaccaaaagctctgttacatcaatctctaacaactctcattgaaaagataccaaatttattaaagtctataacagtgtaatcctcaatatcgttgtccaacactaagccaagcactacaaaggatgcttagaagttcaaattaacctaattgagctgagcaatggaactaactaggtcgtattcctggtttatgtgggcaaagatcgagactttcgagtctattccttcaaatgtatcagacccaagatttttattatcgaatccgtatgttctaatttcagattcagaacaaacacgttacgaacaattgaaacaaagagctgaatcattagagagaagaatcgaaattttcccaaatcagagaagcaaagtaagagaatttacagaacataccaactaaaatcccatgtttgatcagaacgagtagttgcaggaacagtggcagccatatttgctccttccttccttcctgcgtcaatggaggttttggggaaaaccttaagcagagaagcagaatttgagtgggctacaaaacgggcctcattttttgaagcccaagggccaagacttttcatagcgagacgaattgacgagaatgtccttttccggaaacaaaggtatgagaagggtatattcggagagtatatcttgcatgaaggaatattactttgagcctaaactagaatctcgtctactcatttcgctatctcttctctatctctaattctgaagattaaacaattcagctacataacatcattcagacattcacccaaagaaaagctttaagctgtggtttcagacagaagcagtaccactgtaccaggctccaggcatgtcctcttctcatctctttcttataattctgtgtttgtttctgaattagctcgcttgttcatgatcttgtaataaatattgtttcgtaactagaagctatccttcatgaatgtctttgatacattaaaaacatgttgaaagattcatggaatctggaatgtttgttttccaagttgtatatgacttgtaattcttgattttaggctagacaaaacagttatatatgttccataggtacacaaaaacatacgagtctatatttgagatttcgatgtcttatctttacatattatgttcgtagaacaaatgtttgacatggagtgtgacgttgtaatgatcctctacacgtgtatatatcaacagtttgtatcacctatccatgtaaaagcactgtctccttctcttagcctctatttgcagcaataatatctttaagcccttatgtctcatcagcttgatcattgaagaactggctcattgcttgtatgaaaatatctgtcgaacgacgtcagattgtgatagatctagttgttaatgttctatctttgatataattaagcagtgaggagcttacttggtcgacaaattgatatgtgaagggttgttgttatgttagagaaggtccaactttgacggggtttacagccctgaaagctcttcttgaatactcaaatgccaaaaccagaagcccgaagaggaaaagtagaaagccatggaacttttccgctatgaaatgtgcaggagaggcgacattcttgccttccgttgagcttctaatcaatgttagtctcctcttgaaataacctaataattcgaagagcaagcaaataacggaatgttgatgttagtctcagaacgatcttcaaagaagaagaatggtctaaaagaatggaaattgggtatttctataccaggtgtttccatggtgaggttagtccaatcagttgatattttcttcatttctgacgccttgattaactcgagcagagctttattaacctgaaattgattgaccagaaggtatgttattcgaggttctgagaataccaacatgagtaaggaaaatgtgatccctcttccacattgtagcaatgttgttccttaaagacttcaaagcctgtaagtctttatagttttcttctatcataagtaaaaatgagatataagtaacggtataatcgcttacaatgttcgatcagttgctacagcagtcaagtgtttttccaaataggtttgcctttaaaacgtttctccatatacgattaaatcagttcatcatattcatagtcaacttattcttattttcagaatagtctgattctctttcggtcttatattgttcctgttaagttacagtaatctgagtatgacattcattaacatttactgcaggttggatgagattaaagagcgacaaagactttagttattaagtcttacattcatcagacgcaagagagacagagaagttaagacctagctaaataagacagaagtacctcttctgttctctcgtggcttacaagatgacctccatgaagatccaccattctagcgactggatatagcctctgtgccagtcttcttgcgtaacatatctgagcaatcacatcatgtctgcatataacccaacacattctcacattaactactgtgtaaaggtaaagatgctttacaagatcaacaaactcaagactgagtgcacaaggtgactttgattctaatttctttggtgttccgtaccttccatgaatgactgagacaagaaatccagccgagcggattagttcaatctctacttttgtgattttgtgtaaccaacaagcgttaatttggccatcaaacccgtacttggactgcattccagtttctgatattccttttacatattgctgtattgcatcactcaaatataagtcaccttaaatcgttcactagtgatatgcttatatgtcattttcttcgcataataaccagtaaacccacctgatataaaattgcccgtcttgtattagttcctacagattcttctaggtaatcctgcatatataaacagcatgagaacataatcactcacaagtttcatctggacagtaatacgccagccttagattttgttaccaaattactctactaccataattcttcaagaccaatgagttgatctctcaagtctcaaccaattctaaagaacataaatcttcaagaccaatgacttgatttctctaccaactttgttataaccgaatagagaaaacagcaccaaactttgcaatatagaacgaaagtttcaaatgaaacacagattcaacaaatgcatgccatatttcaaactccagtcgttgctctattaactatagttctaagccaattttgttcttagtatttcagtacatcgaagagcaaactgaaagtccccacctttgaataatgtgtgtccaaatcaacagctgccctttgttcaggggtctttgctttcagaaaacgtatcgcaatggaaagcgatttccggtcaagctgaagcacataaaaacaacagtgcatggtactcagaattttgtatccaagtgaaacatcaccttgtgacaaatcatgacaaataagaaaacaatagtttgtcttcatgataagaaaccaaccgatatacacgtatgaacaagtcattgctaccaaagaaagaagattcaacaacaacgccacgtatatcattcaagtaccttagggaagcattcaaaacctccacctgtaacattaagcaacgccaaagaaagaacccgttcaggcgccattgcagctaacttgcaagctatcattgctcctgttaatcaaaaagccaagagagactaaataatttggctcagaaaaacaatcaatagtcacttgagtgatcaaacatattacccatagaatgaccaattatgtgagctttcttccaacccaaatgatccaacaaactaattgaatcatttgccattatcgttgttctgtaccaaaacaaaacccaaattgagtgaagaagctaacaaaaccaatttcacaggaaattgttaaaaccgagattaagaacacaaagcagagaattttaagttcttcagtaatgaaattggctcacgtgtactcagatttgtgggtaggcacagagcttcgacccataccacgattatcgaaagcgcaaacctcgatgccggaatcatcggaaacaattcctccgtcgtcgtcatcatcgtcgttgggtttatccgttcccgtcaatcccatgatttgaggaccccatgactcatgggttccggctaaacctgaacaaaattagaaaaacccaattgaaatcaagctcggaattgctaaggaaactaatcaaatgggaaagatggagattacaacagacctatgatgagaagagctttgataggaccatgaccgtacgttctgtagaagattttgattgcggcattgttaagcgtcgtctctgggccgacatcttctttcacgacctcgcaaaacggcatcgctttttttgttctcaaactctgatatctgggtgggatcagattttgaataaccggagaggagaagaggagaagaaaggaaaggacttttctatcggaagagagagagattgggtctgtggtgtggttcggttcggttttttgggtggaggttaggactgccacgtaggattggtcggctggattttattggcgggtaatatctaacaaaggtcaacggtcaaattttttacacgagaaaactatgttgtatagaaatatagcacgtgaaaaacgctagaagtagaagtagtactacgtcaatggaattcatatgcatcatatataagagaagcgataatgggtctgaacacaagtggagcattaacctaaaacaatagcaacttagaccatttgttgaagtagtcactacactattttaatctccggttcaatttgttgaactttataatgttttgctattttgatccgcgttgctttatattatattggtgtggtttcaggagaagacagatcgagacacaaaacaaggcaagatcgttactgacattttatgctggacactagataattgttcaccaggacatgtgataataaaacctccatgacttcgtggctgctttttcattatatatagtttaggtcaccatcttgtcgtagcacaacctgaaaacgcaataccttctcctgaaacggaaaatatttgttgggaagacctatcatttggaaagtacttatgcccgtcaaggctcacaatttagacgaaacgatccaccaacaacttaagctttgagtctttgaccataagtgcgagacgattttcttgtattgttaatttgttattgcttgtttttgtgaactgatccttagttttttttttcatcaaaagtgatcatttagttaaagacttaaagtgcaatgagagtttggtttctttatttttaaactcttgaaaaattaattttgtcaatgaagcaatacaaattaaattgctgaaaagggatagtaaatcgttttttgtccttacggattggtgatgaaaatggtattcaacggatgcaatacttagatgcaccaaatgatttttaccatatgctaaactttaacactaaaccaattatactttacctggtaaatattaaaaggattttttgttttccaaaaacagttttagtatatgtacttaattacataataccgcggttaataaatagttaaaaattaaattagaaaaaaacacatacgtgtctacagttttagtctcgtacataacacgaaaaatcatctaattggttacgtattaatcatatcatttttacctattagaaaaaaattatttatacatttttagtatctactaatacgttacgtgagcacaaaaattcatcttcatcagtgctaataactatgcgaaaatctgatgacgattcatttgtctaacaatttatttagcttaatacgagtttttaaagatgaagcatacccaaatttcccaagagaccaaaacgacaacgtttgggagtagctaatatcgtagttagcgcacgccactaacatcacccattgcacggtctctctctactctcaaacttcaaaaagctttggctttttagattcacaggaaagaaccctcaaaacacacaaaaagctggtgatttttgcattgcaccgattcgcctccatcgattttggacattcttgaattctccctccaagtattcctgtgaaattgaccggaaagttccttcctttttcaatttccggtaaaaaggaaagtaattgggtactgtagacttccttctagggcttgtgaactttctaatccttcagaaaaccctcgaattcgaaaaatttgctgcgagattgataaatgactagttaaagatttgaactttgatttctgggtttgcgattttattcaaatggagagatctagatccaagagaaactaccactatgaccaagactatgacggagattccatgcctaggtctaaacctcgctacaacaataattaccactttggtggtggcggcggaggaaataacagataccgtggcggcggcggtggtggaggtggaaatggccggccatcgaagtctcatcctgaaacgatggcaacaacgacttatcgaatcctctgtcacgacgctaaagcaggaggtgttattggtaaatccgggacaattatcaaatctataaggcaacacaccggcgcgtggattaacgtgcacgagctagttcctggagatgcagagcgtatcattgagatttctgataatcgtaggcgtgaccctgatgggagaatgccgtctttctctcctgctcaagaggctttgtttagtgttcatgacaggattttggagagtgaagctcagtttggttatggtggacctccgccggaagaggaggaggattacggtggagttagacctggtggagggagagttgtgactagattagtggtttctaggatgcatgttggttgtttgttgggtaaaggtgggaagattattgagcagatgaggattgaaactaagactcatattcggattcttccaagagaaagtaacttacctcgttgtgtttcactctctgaagagattgttcaggtctgaaaaattgctattttgagaacatatttgaaatggtgaatcttgttgagattttgatatgaaatgtagtcagtttattgaaatgctagataatttaaatgtgtgattgtgaggttgaggttgttgacaagagttgaatcactcttatgtagttagcttggtcattatttgttatgtttaagctttctttggtgttttctacctatgggaaatgcatttataatgttggttctttcagattgtaggtgaactaaatgcagtgaaaaacgctttagccattgtatcatctcgtctaagggagagtcagcatcgtgatcggagtaatttccaagggcgttcacattcaccagaacggtcgtttgcagctgcgggggatgattacatgccacagctaagaagacaatcatccgataggtttcctcgtggtaattttagaaataacaacttcagttctcgccagtccaactatgcagaagaagctccagcagttccagttggtgagaatgtctactccgaagagcttgtgttccagattctctgcccagctgacaagattgttcgggttgttggggaatcgcaaggaataattgatttgcttcagaacgagatcggcgtggacgttagagtatctgacccagttgctggatctgatgaacagataatcaccatttcttcggaagaggtactctaaataccctcagatcttcttcaatattatctgttacatttacaattgtgaacttgaagttttgtattcttactttgcttaggcacctgatgatccatttttccctgctcaagaagccttgttgcacattcaaactcagatcatagatcttattccggataaagataatttaataacaacaagattacttgtcccatctagagactctatatgtttggaagggaaagcaggatcagtatctgagatatcacgattaactggaacaagcgtacaaattctagctagggaagaaattccccgatgtgcttctatcaatgatgttgttatacaggtatgtttgtctatttttgaggagtcgagcattttctaaacaacttctggtctcaaaagagaattcttatgtgaatgtcgatgtagattactggcgagatcagagctgctcgggaagcacttgttgaattaacattactattgaggagtcatatgttcaaggagctctctcaaaaggagacaccaccagcttccacatccacaactggccctctcgaaggtgttgcaggagtaatggaggtagcttcatcaaataacacaattcaatctcgtgaaggtcctactagttcgaatctgaacttgcagcaagttagcacaatcttgccacagtttaaggtttttgttctcatcaacaatcttttcaatataaaggcatctgtaatcagttagggtcagacttatttttgccatcgaaacaatgtaatattactatcaggctatgcataattacctgaatacttggaaagtagtctatggttcttgtccattcgtgcaatgtccctatatttacatatatttttctcttggtttttataggaaggtttcggatcagttgcaaaggcgggtgaaagtgaacaccgggaagaggttcctgtcacgacaagcaggtagagaaactcccaaatttgatatattttcccaaaaccgtacaagtgcttgtttcacacctttccttcctgctttttgtttttttctctagaatggcggtaccacttgttactagaagcactcttgaagttgtcttaccagaggcggttgttcctaagctcgttacgaaatcaagaaacaagcttgcacaaatcagtgaggtagaactctttttaactggaactagattggtgcaaatcatgactctaatcaaaatctttgacgctttgtcttatctctttcccacttgatcacagtggtctggagctagtgtaaccatagttgaagacagaccagaagaaacacagaatatcattcgaatttcgggtacacccgagcaagcagagagagctcagagtttgcttcaaggcttcattttgagcagtaagtttctctctttccaaacttttatatccgtattgtactgatctataagtctgatttccgttccttgtttggtgcagtacaagaggatggaccgtgaacttggaccagatcatcagtcaacacagagatgaagatcaagaaactgagaaatgtggagttatgtatgacttgttgaatattaggatttcagtaagcagtagtttagatgaacattccacattttgaccatcactctttggtttctatgttgtctattagtcttctttgtttacattgttctgtaacttatttaaaaaagtcattaaagtttaatccgaatgactaatcattaaagactcatctttaattcacaccacccctatgtatattggaagaacttaaacgctgcgtttcacttgagttaacatcattgagattggggtgtttttgccctagataaagtttagggtgaaaacatagataaatcttaagtcgtattttacaaaaatagccactgctaaaacctcacctgcggcttcacctttcttcgagttcgtgaaaaagagacgtcgcatcgcaccgccgtcgccatttccaccgtcgtagcattgccgcttcactggtgattgattcttccttaacttctctttttgttttctctgttctcttatatccgtcgttttctagggttttctcactccttgttgtggaatctctctttgtagactgtcgcactgaatattgttgaatcgagaaaatggcttatgttgggcaaagtagaaacgtgattcggcatgtagtctcgagaggaacagcttatcacaagtatgaaaatgcgattcatcatcctctccttttcgcttgtcaaggagttcgatacagaaaattagaagttattcttacaacggtgaggtttaatgattctgaaaggcatgatttttatcgtttgattttgaaatttccttcacatttcgttgggttgaattgaaatcagatggtgggtttgttttgatttgtcttgatctttatctgatctggttttgttagggcattgagaagcttggcaaagctggtgagactgtgaaggtagctcctggatacttcaggaatcaccttatgccaaaacttcttgctgtgcctaacattgacaagtatgcttatctcatccgagagcaacgcaaggtactaggctcttaattttgcaaaatagatttagtctgatattaggtcgtacaatgctagtggttttctcctcttgttgttgtggtatctaggttgtgatcttgatgatgtttagttcttgatgttaagggtaaaacagatacttttgacataatgtgatagtgatatggtattgaaactattttggtttagtgttagtggcttctcctttaatttgatttcgtgatgggaatgtcttcagatgtaaagggaactgcagatagttttgactttccctgataatcattatggtatcacagttaacttggtaaagtgtttgatttcttgatgggaatatattcagatgtataatcatgaagaagtaaaggaggaggttaaggtggttcataaaacttctgaagtccagacaaaagagtatgaaaaggctgcaaagcgtctggcgaatgctaatttggtaagtttagctaaccctctttattcgcactattcagcattcttgttcttgttgaatatttaaaatggtgtaaatatgggatctatttgtttgattaacaggtattgaggaagttagttgacaaggaaaagttcaaaaaccgctcctcaaaagacgacaaacctgatgttcaaactcctatcacaaaggaagagatagtctctgaggcaagtgttctttccttttaagtgactactagttttgtaagtaggtcttataatcattggttgttgtgtcggtttatgaaggtggcgaggcagctctgtgtgaagattgatccagacaatgtggttttagcggcgcctttggaaacttttggcgagtacgaggtgcctcttaaattccccaagacaattcctttgccacaaggaactgttcaatggattctcaaagtcaaagtccgtggccattaaatcttccacctttgaaagtcctccttcagtgatagttctcttcttcaatatgtttcaatatagttttggaattgcagaaacataagcaaacacaaatcagttacatttcccttgactcagtttttttttttttttttttgtagttgtataaaccgggtttactccggtctttaatttaaacaatgactcgaattttgcgaaaaccggactcgtccagaagacggataaatttaataagttttggagttttgtgcaattatctgaaagtcactcgcatatgtctatttggctttatttaaaacatttgggcctaaattgtaagattcagttacttctgagcctctgataaaaatacttcatcagccatattgatagattccttcccggcattatttctctactcggcgagtcggcgaaattgcggccacgagaacgaagagcttcacactacctccaatggtgttctctaactctctcctctcttcgaccacttcgcttaccacatggtaaataattcatttgtccttgtgccttctcgcttagagttttctaagccttttagtgaaaagcttagtcttttggtatcaaattacggtaaagtagcttaagtttgatccaaggtgacttgatttagctcaatgtatttctgtaaatattgaatatccaaaaaggtttggcttttgtgtggttgctgaatttgtgattttgggttttcagggcaaatcaatcaagttctcagtcaagtctttccccgagatattcgacatggcagtgtgtttgtttacgtaatcagaaacgcaaacctaagctctacttgattcccgctcgccattttttatcgactccaattgattcagtctcctcctcctcaataacggcttcacgttatgctacttctggcgtttctgaagttcaaaggtgagaatttgattgattcttttgatgttttttgtttaatttagaaaaacaagaatttttgatgaattttgtctgtctatgcaggtctacttcgagcaacaatgttactgagatggaagagtttgagatggagttgcaagagttgtttaatgaagtcaaaagtatggtgaagattgggaaggaaagtgacgcaatggaccttcttcgagcgaattatgttgctgtgaaagaagagctggattcgggtttgaaaggtatcgaacaagctgctgttcttgacatcattgctttggggtatatggctgttggagacttgaaacctgtccccgcattgcttgatatggtgagtctaaagccaggtatcggaaaaaatcattgctttaactggattgtgttgtatttgtctaaaacagttagttaacaaatgcagataaacaagattgttgataatttaaaagactccgaacctcttttggattcagtacttatgcatgttggcagtatgtattcggtaatagggaagtttgaaaacgctatactcgtgcatcaaagggctattcgtatattagagaatagatatggtaatgatcttttaaaaccgtttttgtttttcttgtgtcatctttttccttttcatttgtccttaaccaacaagacttctatgtgctaggtaaatgcaatactttacttgtcacaccattacttggtatggctaagagttttgcttctgatggaaaagccactaaagcgattggtgtttatgagcgtacgttgactatcttagaacggaatagaggttctgagagtgaggatctagtagttccgttattttcactcggtaaacttctgctcaaagaaggtaaagctgctgaagcagaaattccttttaccaggtacggcgtgaaaaggacttgttgggtcaaagtttttgcatttcttatttacagatgatgtgatccatttccaacttccttctttctgctagcattgtaaatatatacaagaagatatacggagagagagatggaagagttggcatggccatgtgttcccttgctaatgctaagtgctcaaaaggtgggttctaaacttccccagtctgttttgatgtggtaactacgagtttttgttgaagagatggtcttgtacctcggttttcttaacaggtgatgcaaatgaagctgttgatatctacaggaatgctctacgaataatcaaagactcaaattatatgacaatagacaacagtatcttggaaaacatgaggatagatcttgctgagctgcttcatttcgttggaaggtaaaagtttttccactaatcttcttcctgtgactgaggaacttaattaagccactaacttttgctttgcgcacaggggagatgaaggacgagagttactagaagaatgcttattaataaatgagagattcaaagggaaaaaccatcctagcatggctacacatcttataaaccttgcagcatcttattcgcgttccaagaattatgtggaggcagaacgattgctacgaacttgtttgaacatcatggaggtatcagttggctcagaaggtcagtccataaccttcccaatgctaaatcttgcagtcactctttcccaactgaatcgtgatgaggaagccgagcaaatagccttaaaggttctacgcatccgtgagaaggcatttggcgaagactctctccctgttggtataataactctcttccataatatcatcaatgaaatttcttgtatggattgaagaagtttcaaagtttgttttttcgaagtgacggtaaaatctacaaattccatacgcaggagaggcgctggactgtttggtatcgatccaagcgagactaggaagagatgatggagaaatattgggtttgctgaaaagggttatgatgatccaagagaaagagtttggtccttcagctcaagaactcattgttactctccagaagatcattcatttcttggagaaattggagatgaaagatgataaatttaagtttaggagaagattagctttacttagagagagatacaagcagagtcttagctactagaatcttactatagtgtttcttgcgttttgtcttttaaatattattgtggtgccagattcaatttctaattgatgttgttaatgagatgatatataatattaaattggcaaaaaggaaggcaaaaaagtgattagcgagaagtccgaggtgtgagggggactaatttaaattaatgaaataatcaaatctttaatcacgcaaatactgtttttgtcttttctctgaaacagatc

SEQ ID NO: 888 - DNA, 62420 bp, Arabidopsis thaliana
tctcatcaatcatctcaagaaggaagaagaagatgagcagtgaaacgtcgtcgttgacgaagaagatgaagaagaagaaggaaggtttgggatggatagagtcaattaaaggatggagttgtgtgttccacgagtttctcttccagagattcatggcttctcatctacagaatccacttcctctaccttcactgaatcacctcacctgcattgtcactggctccactagtggcattggtcgcgaaaccgctaggtttgattgaattcgtgttggtttgatttaaggattgggaacaagaggaatgtaagattttacttgttattgtgtgaatttgtaggcagcttgcagaagctggtgctcgtgttgttatggcggtgaggaatactaaagcagctcatgagctgattcagcaatggcagaaggagtggtctggtaaaggcatccctcttaatctcgaggtaaagtcttatatgatcatcacatagtagtatgacatctatatttagcatgtgtttgcttgggactaaagcctagtcaacaatgtgtaaccagaaactgtgtaatggaactagaattgtttgataagaatcgatacatttttcggatattaaccatagtgaatgtttatttctgttactcaaggctatggaacttgatcttctctctctggattctgtcgtcggattttgcaatctgtggaacgcgcgattatcccctttgcatgttctgattaacaatgccggcatattttccatgggaggttggttttattgcattgtagctggaaaaaatttgagctttttcacctttattggcgagcttaatgttttgcactttaataatctggtggtataatatccttcatattatgacttggtggacccaacttatgaaatttgcatctatagttagtaatctttttggtggttttcttgttcatattcatttcactctctcaagtgtttgtttttacattcactgagcttcagattgctgcattacatgttgacgcaaaccaagtaagttactactcactttgatttatgcagaggaacagaagttctcaaaggatggatatgagcaacacatgcaagtgaaccatttagctccagctctgctttcactactccttttgccctcacttatccgaggctccccaagcaggatcattaatgtgaattctgttgtaagtatcatcgtcgctgaaactgccagctgcatagtttttcatattgttttgcagtgatgttggaaagtttggatattcttggtatacagaacctaaacaaaccgaaagtttgaactttgtatatacagggttaccattgcttttctctctgtgaaattctgctgcactgctttgattgaatctaaatacgaataacaacgttctgtttatcatctaaggttattcccatctcatgcaagatcattgtttgttgggtttactcttttggtagatgcactatgttggtttcgttgacccggatgacatgaatgttgtttctgggaaacgaaagtttacaagcctcgttggatattctggcagcaagcttgcacaggtgagaacttacacaaaacatcattcaatacttttctttcttttgttctttatctcagaaactaatggatttactttctatttccctggtcaggttatgtttagcaatgtacttttgaaaaggctgcctctagaaactcgcattagcgttgtttgtttatcccccgggattgtcctaacaaatgttgtgagtattactttaagtctcactccattgctcgttcttcataacttatatcacattaaaccattttgaacatccaattatgcaggcgagagatctgccgagatatgttcaagttcaatacgcgttgataccttatttcatcttttcgcctcaagaaggctctagaagcacacttttctcagctacagacgctcagattccagagcattgtgaaaagctaaaaaccgaagataagcccgtttgtacattcatatctcaaaattgcaagcacacaaagccttcagaagaagcacacaacgtagaaacagcagaaagagtatgggaaaagacgataaagctgatcggtcttcctcttgatgctgtagagaggcttatagaaggagaagaggtccaatgccggtatgggactcatcaacaataaagtctttctcacaagtctctatcttctttcctccaatttgtacttgttagatgtttctagaacttgacctcaaagctgcattacactacacagtctacactatgcacattctaaacgatcaagtattagggaatatagctttcataaatcaatctaacggccataaactcacatttattataccatcattttaaacacataggttgcataacaacaacgtaaacgttacctgaaaaaaaaaaaaaagagaggcaggatcttgataaaccaaagaaatcaaataaataatctttctataacgtgacaatggagtgaaaacaaacaattaagacattcaagtcgttactaaattattcaaaattctaaccaagaatttgcaaacacacatattatacgaaaaaggcgggttctcatgtagtaatagtaataacaataattagtactagtaattagttaatggtcaattaatgaccaactaattatattgttgtaagttgtaacggcagacgaagtacgtataccaacaagtccgaggcgtcacaggctttaactaacccaaaaatgtttatcatgttccttgatttcgacgtaataattatctttatataacaggcttttgtctttaattctctctatagatgtgttgtgatttgtgaactctagagagaagaagaagatgagtagtgagatgaagaagaatgatggtttagggtggattcagtggatgagaggatggtttaatgttgtgcaagagattcttttgcagagaataatggcttctcacttacaaattccatttcatcttcctcctttaaaccacttaacttgtattgtcactggctcaactagtggcattggctccgagaccgctaggtcccaaatcgaaaacataaactttcctttagcgtcttattttgtttttgtttttctgttgttgtgattgtcctgtgaatcttataatgcataatttgttgtgtgaactttgttttaggcaacttgcagaggctggtgctcatgttgttatggcggttaggaacataaaagcagctcatgagctgattcaacaatggcagaccaagtggtctgctagtggtgagggactcccacttaatattcaggtaaaatttttgattaatatttatataatcatggcgattttcaatttttttttggataaaaaatatttaaataatccatcaaatttatcaaaagtattaaataaaaaattatatgaagagaacttttgttttgttcgtgaatctataagaaaatattttcaacctcttgttaaattttctggaaagtgtcaaaacgaaactatttgtgaacggatggataaagttgtataggtcatgaaattatgataactaattaatagcttagttaagaactaaaagatttcatttcgttaagattcatgtgcattcacgttctagagaaaatgcatgttataacttataagaactataagctattagtaatccctctctaactgattggataaaagacaataagttttacgatatcttacacaacatccgaattgttaacattgatactatgttttttgtttcctcaaggcaatggaacttgaccttctctctttagattccgtcgtcagatttagcaatgcgtggaatgcacggctagcccctttgcatgttctgattaataatgccggcatgtttgctatgggaggttagtagtttctaatttatttacatgcatttttaatcttcttcctgttgtcatattgctattgatgaggtcctaaagtcatatgcttttgcaccattcatatttcaatttcatcatatgcaggggcacaaaaattctcagaagatggatatgaacagcacatgcaagtgaaccatttagctccagctctgctttcactactccttttgccttcgcttatccgagcttcccggagtcgaatcattaatgttaattctgttgtaagtttcatcaatatcatcaaatcaaaaaagttcaatgattatctctatgaaattatgccttgtttgggttttcgtttatgtagatgcattatgttggttttgttgatccaaatgatatgaattttgtttctggtaaacgaaagttttcaagcttgagcgcatattctagcagcaaactcgctcaggtaaacttatagatgaaaaaatatcattttagataaatttgaaaatgtttctataatctgtaacgtttttatcttgttttgtttcatttgtcaaggttatgtttaacaatgttcttttaaaaaaactgcctttggaaaccggcattagcgtcgtttgtttatctcctggtgttgtccaaactaacattgtaagtacgagtatactagctaactttttagttgtgtgtactttgcaaaaaaaaaaaagttaatgaacattttgagatggcttaaattgcttcagacaagagatcttccaagattggtccaagatctttactcagccttgccttatttcatcttttcaccacaagaaggttgtagaagctcgcttttctcggcgacagatcctcagattccaaaccattaccaaaagctaaaaaccaatgagaaatctgtttgcacattattcatatctctaaattgcaaactcacgaattgttctgaagaagctcaaaacgttgaaacagctaacagagtttgggaaaagacattagagttgatcggtcttccttctgatacagtggaaaggcttgtggagggagaagtggtcaagtgtcgttatcgaactcgttaattcagtaaatgtttagtgaactaatctgtgatttgacttttcgctcaatgtgaatactttcttatatgatacaatcgtaattgtgtagaaaatacaatattgtagtcgcattatctattatgcctgaccactagaaagtctttagaattttggtcatagtcatacactcttacttgtttagttgtttggaaagagttgacttttgtaatcccttcaataataatcatctatctcctaattctcttttcaacaaaaatatttatataaataatgattcaaataatcaaataaataaacaaaatcataacaataatatagcacagcgggataaacaattaatcaacttagttttgcattttaagtaattttttggataattctttctagaactcaattctcacttttataattcgattttctcttataatcccaaaacttatcattcaagtgaatcttatttttgtgattttcctccttctcttcttttacagagatatactcgaaatcttttttacccttttatataggtcacgaacattctatccatcttttacgtaatagatacacacacaaaaatacagtaaaatattttaaaacgaataatataattaaaatgattacgtacactttgggaccaatccaattacaaaaagggtttcgtcactgctttagtttccaacaccaaaccaaacaaaaaaatggatttaacaaaattaatatcattctctctcttgtttctatctcttctaatcccgacgacgacgacgaccacttccaccgttacatgcactaacgccgtttgtcgccgtgacggcccgatcatccgttttccattccgtctaaaacaccaacaatctcattcttgtggttacgacaaaggcttcgacttaacgtgcgatattaacgccggtaacagaacaaccataacgttaccgttttccggtaacttcaccgtggaagagatcgattacgcagctcaagagatttggatcaacgacccaaacaactgtcttcctcaacggatcttacagctaaacctcaactcgacgccgtttagtggcgtttacatgcgtcagttcacgttctttaactgtcctacttcagagtatctccgttttaggccgttgaatccgataacgtgtttgagtggtaaaaacagcacggtgtttgctactccttcgcctagagtgataaactacttgtcgtctcaatcatgccggttaatgaaaaccgtttatgttccggttcggtggccgttttatgagcaaatcgtgtcgtcttcggatttgagtgataacctctggcttacttggagggttccaagatgtagtaggtgtgagattaaaggtggtaagtgtgggattaagagtaattcttctcgtgaaatcatttgctctcatgttcataaaccaggtaattaatatttctttgttttcaccctaattttttcatttttttaattatatttagttttaaaatttctagaacgttaaacgtatttgtttaaaaaaaaaaacgtatttgtttttataatgtgaagatatgattttgacgattagagtatattagtttgacgtagaccatgacgaaattttgtttgaatgagtcatgtgtttatgtgtgtatacaggtttataaatttcgttgaaagacgagctacatataaccaattatatttgtccgttctggttgtttaaatatgaaaactacatgagactattcaactagatatttttgactaatgaaaccaataggcgaaaaatacatcctactatattatttgggaagtacattttaaatataaccttaatttttgtaagtaattacataggtatgccattagaaataaaattttaaagagtaaattaatttatctctttaacgattaaaaagtcaattactaatttaattaattaaatttaattaaaaaacgaaatacattattaattttcaaaaataataaccaatcaaaatcaacatataagatttaatatctaaattttaattaatttaatttaattagaaaaacgaaatacattattaatttctaaaaaagtaacctattaaaatcaacaaattagatttgatatctaaattatcatattaatttttttattaattattatagttcacttctcatctttatatgattctattttttcaaaaaataatatcatcattataaaaaaataattagagtttttcgcatatgccataatttgaatttttgaaaactaatataaactgttcaatacatgaaaaaatattataacgggtgaaaaatagatttaagaaaactttctactgagtaacgggtcataatttgaaatatttatattcaatttcatacatattatattgaaaatttataatcttatatactacaataattaataacatattagatttttttatgtgtatgatgtgattcaatttttaatacaagctggaaaatcctagaattaacgggtttagatcgatattaatacaagatggtatattacaggtgaaactcttaaattaacaatcaaactacaagtgtataatcttaaacactaaacaatatagataatatcaacaaaatatatacaactcacagtttacttttaatattttatatacaaaatcaattaaatcttaatcacataaaaattagcacaaaaaaaagtattcaacaattaaaattttatcaaatctctgtgttatataagttttgatactatattcgaataaagtgtaatataccttttcaatttgtattctttaactaatttaagctaattaatatatttactaatcttatacctatcaaaaccgactatcgtttcttatttctatagtatttttgcaagacttttttggtggatttgggtaaaagtgcattcggtcatatggtacattcccctattaaataaaaatggtatactcctatgttattagctaaaatgtttagattataattcagagtcatatcattaataaaattaatattaataaaataaatggctttttggcaagacggatttggagtgacgggtttttgaatcaacattaataaaaaaataaaatataattaatacaccgtttcaatacgggtttagaccactaatattaaacatatcaaatcatcctaatttagaaaagattatataaaaccaaaaatgttatgtggtatgtataatgttaccatatataaaatataaatgtattagagaatgatataatttgcaaaacttttatctataaaaaaaattcttaaattttaaaaattactactttaaaaaaaaatcacgggacgggttaagaaattatagaacgggttttattttggaattaagttatatggtagatgtatttgaatcaatatttataaaattttaaaatattattaatatgttgttttaataggggttacaacttcagttttttaacaattgtctcatagattcgtggtatagccttacttaataacaattataaactgtaaaatataatttttttataaaaataaaatttgcaaattttaatatatattacttttaaaaaataaatcgtcccgcgatataccgcgggttaaaatctagtgtatatttattttgtacaaacacaaatatctgattgaataatgtacataaaactacaatatacgaaaagtaaaacgataaaactttcaaaggtcgtataagttaccaaagtgactaagcttatgaatgtgaaaggcacatcaactaagcgtttatggttttcctcaacctttttatcctaaacaaaaacttcaaatatacttttcaaaaaataacaaagaggcttatactatgacaaattggtaaaatttaattcagaattttctatatcttttcttgtcttacatgtctttcactttcagtaagaaaatatataaatcagaaaggaaaaacacacacactcacacattaattgagaagaatgagaagttgggcgatagattatcagtgaagtcgacaaaagggtcggtggcgtaataatgaaagctccaatgcgttgacttatcatccactttaatttgcctttgccctacttctctctttaagtcaacgattttaattgttacccattttactaaagagtcttctcttctaccaattacatttttgagacattatttttcttcttttatccttatcttttcattacacatgatttaatcatgattaaagataattaatcatatctttagttattttcttctaactagtcctcttttattttcagctattccgagaagagctcgttacgcaatagccgtaggcgccggaatcccaggagctttaatagtctttggtcttttctgcttcgtatacagcaaaatcagttcatgcattaaacggcgtcgtctcgtcccaaccccagagatcaacaacgctcaagcccattatttacattcaagtgtcatagtaatgggtcttgatgggccaactatagagtcgtacccaaagatagtattgggagagagcaaaaggttgcccaaagttgatgacgctacatgtgctatttgtctctccgagtatgagccaaaggagacgcttcggacaattccacagtgtcaacattgttttcatgctgattgtatcgacgagtggctgaagttgaatgggacttgtccggtgtgtcggaactcaccggagcagattttgccgcctgcttaagctattatcttttgtgttctctttttcgttacatcatttgtactttttgtagttagttcaatactccgtccgttttatttaaatgtcgttcttaagattttttttaatacatatcataaataagagtttttgtagatttttaatgtatatattagcttttatagaaattaatatgctttcttggtttggtgtgaaaatgataaacgacaattatagttaatgttttaagtacaaattccataatttttgtagagttatcacatctcacaataaaaaaattactttcatatgtaatttcttgtcccaagaacatgcatagcataacacatgtttgaatttgggtggttatacatcaattgcactagtacgaacctctaaacacacatcatgatcatttttaagaagtaccactattgttcccttaaattatagcacctacaaggtttggtccaacgtaacattattgtgaattcgttcataagaaatatcatttcaaaatttggatttatgtggtatttcatatgttacatagatttttctaatcaggaggacgtaccaaaataaggagaagattctcgaacgatggaaatgatccaatgactttggtttagtaaagacaccgacatctacccattcattattcgtgggaccttcttcattttgggctatgaattttttctttaagatattcaagtaagcttacgtgacgtcttattatgatgttcgatgaaaactccaaatattcgttgacgttaactaaacaagcgacgcgtggtctcatctttgtgaatactatttatcagataatgacattttatctaccaattattcctattggtgaaacgttttaaatccaaagagataaaactgagattttggaattgacaagacgtaattgtgaagatagtgaaatgcaaataaggaaaccaatcgcattctatctactgcaaagacttgagtcattgtagtgttagaccactataaggaggagccgagtcggggtattaaaaatggataaaaatcgattagataaaaaagtcttacacgggtttatcctatcagattgtgggtacaaaacattatagtcaacaatttaaatatggatttgatcagttacataaaagcaatggcggatttcgttttcaagatctccatgaaaacaaacttgagtagtcatgtagactaatcaatccataatctaaacgattgaagctcaatcggttttatgaccgataacacttggaattttaaaatatttctaaattctaaagtttaaactatattttaatattaatataaaactaatttatggtttcgaatggtgatcgaaccgcacaatgaaatacagtttatatagtaacaaattatatatatatatattcgttattatttaaaccgtatcattcagttgaaccgtatgtatttactcgtattttatatattagaaaagaaaattgcataaacaatacatttgaataataaaataaataaaaaaatagagaaaaaggttgtttttagtctgtcgtggggatcttctgagaaaacaaatagagacctttctttaacacagagaaagagcctgagagacaagtgagaaacgcaacaacaccaccgaaagagagagtccaaattcgaaagagaaaaagaatcaaattccttcttcttccttttttgattttcaattattactttaatcttctttcccgctctctattcttcttcttctttaggatcaatcaccgtttagctttcttcccatacgtctctccgtttacgaccaggtaggtctctcattacctctccctctttctcagtctctctcttgttcgcatttgagcttttgattcttccgatgtttgatgaagcttgattgttggggttttgtatccggtttgatttttctctgttgcgtctcttgatgattgataaaggttcgattttgggatgattctggattttacaaaccctattttactgttctttctacaatttaaacagaaaagtcgtcttttttagtctacaaaatagaaccattggctggtgcaatactaaaaatttcgtcgtttttttggtagatgaatttcctaagtgatacacttctataatcggaccaaccgttctctataaagtcttcacctttccaatttgtaagattcgctaattaatgttgtgaagattagcttagtgagtaactttcttgttgatttggttctagggttaaatactaaacctttattagttcttctcttctgcagacgaatgtttttggtttcgagaatttgctgaaatctattcaacggtgttagttttttaagtctttttgatttttgtgccttcaagttgtgtgtggattctcatggtttgctgtttttgtttgtgtagtatacagaggctggagctggggaagaaaaggattgtctatggagggagacgtcggaataggtttggtatgccagaatactatggatgggaaggcgagtaatggaaatggtttagagaagactgtaccttcttgttgccttaaggctatggcatgtgtacctgaggatgatgctaagtgtcactccactgttgtttctgggtggttttcggaacctcaccctcgctctggttagactttgttttcttttcttgtcaagaagctaccctattttcttagatccgatctcttattttggatcttgttcttaattggatgcagggaaaaaaggcggcaaagcagtctatttcaacaaccctatgtggccaggtaggttacctcttgataggcttgttgttgttgctttccattatcttactaccttacgttttttgtctttgaatgagcgcctacttggtttagatgctgaatctgtatgttaaagtttgtgagttgtagtttttcagagtgcttgctcatgtgactgatgcaactggtttatgtttaattgtaggagaagcacactcactgaaagttgagaaagttctgttcaaagacaagtcggattttcaggaagtcctagtgttcgaggtttgagatagcatctatgcttttgtccgattgttcttatcatctgagtctttcttctattaattgaggctgttgttcttctttttgcagtcagccacgtacggaaaggtgcttgttctagatggtatcgtacagctgaccgaaaaagatgaatgtgcatatcaggagatgatagcccatctgcctttatgctctatatcttcccctaaaaatgtaatttctcaccttaaaaagtttagtctctctggtttcctatatcttgtagcctgttgcaataaatcagtcaatctaaaagtatgttcaatttgtgatgaatgtgcctctttttggagaatatgttggaacacaatgcgattgcgttgttgtagctctcttcttcctatatgatctcatgagatagctcttatcgcaaatgatgactcattccagtacattgaaatgtagaatcagctcagattaaaatagggaattgtcaagcttacacattttacttgcgtattaatgctggccttcgctgtctaaatatttgcaggttcttgttgttggtggaggtgatggtggtgttcttcgagagatttctcgccatagttctgttgaggttattgatatctgtgagatagacaagatggttatagatgtaagtttttggttttgtgcttgccatatgtatgaacaatttttagttatgttctatctcagaaagtgggatttctgtggtcttgtaggtgtctaagaagttcttccccgagttagcggttgggtttgacgatcctcgtgttcaacttcacattggtgatggtaattaagcattcttctacttgttctctgttcacaaaacgtagtcaaaaatttgcttgtgttgatatcactttcctctggcagctgctgagttcctccgtaaatcccctgaagggaagtatgatgccatcattgttgattcttcagatcccgtaggtatgattcatctgcaaaactctttggatatctgagtgattcttattttgtttttctaaatcaaaactcggttcagacttcagctacaaactctcacgttttcactctatataatcataggtcctgctcttgcgcttgttgagaagcctttcttcgagacactggctagagcgttgaagcctgggggagttctttgtaacatggcagaaagtatgtggctccatactcatcttattgaagatatgatctccatttgccgtcaaacattcaaaagtgttcactatgcgtggagcagcgtccccacatatccaaggttaactctacttttcttctgattacattgtgtgatctcactgaaatcagaaacatgaattgagcaacatatcttcattgcagcggcgtgattggtttcgtcttgtgctctactgaaggaccagctgttgacttcaagaacccaatcaaccctattgagaaactagacggtgcgatgacccataaaagagaattgaagttctataactctgatgtaagtttaacacaactatgacttcctcatttactgttttagattaacttaaagcaaaatcctgatctatctttttactaaaacagatgcacagagccgcatttgctttgcccacattcctgcggagagaagtagcttcacttctggcttcttgacttctgtttggctctaccatatccctcatatcaaactttgtagaactcttgaagaggaataataaatcattgaaggctttgtatctctaagtttactcctttataaaaagacttatatttatatattggctctatggttcgcaataaaatctttcatatacatatatgctaattaattaatcatcactgttgaaatctggctctgctggtttctgaagtagcataggtggcattcgttccggcatccttggtttccttactgatccgctcctacgtattgtgcgcaagatatttgcagcaaaccgtgatgcgtatattgtagcaccgaggcttggggaacttccacaagcttctttagccaaagcatcctgcaaccgattctcttcttctttaagagactcttcgagtttcttcttaatgtatcttctccaagcggcttgtatgaagcaagcggcccaagtcttccattgttgtgagtagtacctgaaagtatgtcttagctgtttgctgtgaagacgtctgaactgggaagccacgaatttgaggtcatcagctttaagtgcgaaagcttcaacttccatgagagctcgaacagttcttgttgagattgggaggtttgaggatgagtgtgggtctaaagcccaggttaaaagctcctcaccacagaaatcaccggctccaagatactcggaatttaaaaaaccggttcttccaccgtttgttgtgattgttagaagcttcccgcgcattatgaagagcatttcgtctaccggatctccttctcttactatgtagctttcctctgtgtataacacaggttgcaaacggtcacagagcgcatcaagaagctgttcgtccattttctcaaacatggggacctagaaccaacaaaaacaagatgcggttacgagtgatgttgacaataaatgagaaatcgagtaaagagaggagatgatttcttctttacccgcatgagaagggcgagacagagatgacgtttgatgtcgcgtctaagatctttgggaagattactaagaagattctcttcgtcaacacctcttgtctcttgccatttgtactgctcgtatcgccggattctttttctcaagttctcaggtagcaaacggtgtgacatccattgttctgcgtctcttctctttaccctcatctcctccaatctcgtggtagtggattgcagatacgtctgccatttaaaagaaaagcagtaagtaatcgatttcgcaaacactatggcatattagatgaaatgagactaacctgcatatttccaatcaagaaggagaacaaaaccagccccgcaatagaaatgaacaccgcgaaacagatttcccaaatatatgtacttgttttaaggttctgaccgagcgaactggatcacgaaaacagaacaaagatgcaagaacttagtgttgaaacttttcttcataagaaacggagaaaattttgctgataaattctcaatacctgaggttctgcagaccccaccagaaacagtaaaaaaacttttgagggaaatcttgagattccactacaccggattgaagtgcgtcaaggaatatcccaaagtcgaagagtgttgtgtttggtgtctgaatcggacaagactcattgaggaaagcattgcctcctgcagtttcagggtcacagtacaacaacttcgaaatgcacggagggttattcctctcacaagcttgtttccagcacaccgtttcgcgttcgattgagaacaaataccagaaagcaccaaacacctacacatttacaggtattgaccaaaaatattatatatctaaactctgaaactaaaaaggttgggacagttagaaccaatttggcactcacatgactagcaagcatgtagaggaagagattgaaagcagctccagcccaagctgtctcagtgagtatgcctgaagttcttgtaacttccttgtagagcggatatattcttataaacctcggtatatattggaagaaaacaataaacttcaacatattcttcgtgttcaaagacgatgaacctctcatatgtggaatgattatcaaaatcaccatctgaggaaaaacacaattactcacattactcaaagaatcaagctaatgatttggaaatgcaaacaaaaccaatcaatgaatcacctgcggaagcggaagaacagcaagaatgtcaattatgaaatgtgaggacaagtaacgtttagcgatctctcgcttgtcctcaacaagaacacctctcccaaaaacacgagacgaaggagcgataaagccagtacggaactggaaaatgatgtgaaggacataaaaaacatcagtgaaagagcgcaaaacgcttgctgttatttccattttcttgtcaataccaagacatttcttagcatcatcgatgataggcacgtagaagaacaaagggtcaagcgagacagcgatgatacaagctaaaacaaagatcttgttccatctctgaagaaaaggtccttgtgggtcaagaattttgtgagtagaaccaatcccttttgaaacagcttctttaaaagagtaagacttgtaagatcttttgaatagtttgatccttgcagagcttgattcaaagcttctgtaaaacttgtcggagattgagcttattgttctctggaatattccagtttgaatctcgtttttaccggaatattccacgtcggaggaagtcttatccgacttccaatcttgaaacctgatccgagaaagtgaagaagaatcgaattaagcttcacgacttagaattcaatgagacaaatctggaacactgaccttacaaacttctcttgtcggaaattcatagtttgagactaataagattcaatacaaacagagatttcactgcttcatgtgtcttcttcaccaattagagggaaattcataaccctgattcaacaaacttcaattcaattcaacaatttcgatttcagtaaaaatcaaactcaaatttcaaaactttccagtgtcaaaaacgcaattcgactaaacagcaaaaaaaaaggaagaaacttgtttgaggtaaaaaatcaaaccgaacatggacaagtgtgtttgcttccgacaatcctgtagacttttgaggagaacaataagaaccaataaaagggcaaaagaagaaatcactgtttaaacccaccaaaaagaaaaatcaaatctttgttttgtttttcctcggaaagagcgaaactaaagtgacccagaaactaaagaagagaggaagctgataaaatgaagaaattggagaaagagagagagtgatgaagaagaaagaagaagaagagattgaatgatgaaagtgaagcctttatcagaggacagagaggacggggaaggagtttccacgaaagtcacaaacttttgctattttatcatttttttcttcgattttcttaaattttgtttcactgtttttgttaatttttttaaagttattccaaaaagacagttatacctttgcagtctttgatacttcaaaaagatttcggaccaaatttaactttgactattaagtacgaaatcttttttaaattgagtttttaacttcaccttttagtagaaaaatatgttctgaattgagttgtcagttttttagtagacgaatatgttggaagattacagaattcacaggctcacaacaataatatatgtagttttcaaaagtaaaataatgctacatttcctgatcctctcatccatagatgttgaaagaaatatctttatcaatcatgtattttttttttgtcaatcatgtatttgtttgcacacaaaaaaaaagagtcaatcatgtatttttaaaaaaataatgataattttttgacaattccatatacttaattaaaataactgtttatgccatttagcaaagtttcctataattttttttatagcatatattataattaatttttttagattgcttagattttttttatatacattccatatatatgttgtttggttatgggatcaaatcaacttaagcatgtaataaattagaatttgctgacaaaagaagacgtagttacggagttaatcaaggcatttctttattacagtcgaagacattaactgatatcaatgtttaggcatacaaaaacttcataatgatgtatcattttcgtggcaaacttaaattctgtaactgactattgttctctatttttgtaggtttgatttttgtctttgtaatacgtcgaagtttcgtgttgatgagataatgtcaaatttcgtaaactcaggctttttgttcgtatatttcaatgcacagtttcatttccgcttgtatcctttttaaaatcgtgtatatggtaaatcgatttcatagatttgaataaagttacttaatatttagttttatgttaaatcacgaatgatttagattatagaaggagatgacataatttgggaaaaaaatatgagcctttttaacatttgagttcttaagtattttcaaactgttagtcctaactccttcatgacatgttttcttttcttatgttggtgaaacatcctttgatcaaaaaacaaaaaaaaaaatggtgaaacatcatctcttctttttttcatcagcaccaaaaatttcaaacttgcaaacgcagacgaaaaaagaaaatcacatttgcatttgtagctactaaaaccatgaccatgattaaatttatctccaccaaatttcttttgttaagaataaaaggatgataagttaaagatatagcccgtgagtacttgtcgatcaaccacgaaccaacccacgtgtcctcttcctctttatcttctcatttttaccaaattttgttctccacaaatttagaccgttaagtttaaaattaaatttgaacgtctattatattactcaattgatagtttaattgatactgataattaagtgctaatagagaccgttgaccgtatcgtgtccctgattgtacgttgtcttatgaatgccaagggaggttcctagctgtcggatttggagaccagtctcaagattttatcattgttactacttcataatccaaatttgtctaaacattgtcaactcttatttaattgtttatacgaataaaatactattaacatcgaattcaaactatcaagacctttgaatatggacgatatgagtcaaagtcaaccatcttcccacccgtaaaattatcacaagaaaaagacatttgtaagagtatctttctcttcttcggatttgaatgaaaaatgacataatgctgttgctaatgcagtcatgggatctactccttatattccacctcctgcaatgactgcatcaagtcttgatctcagtctttttacgacggatcaagtccattctttaatacaacaactcaatactcatcttcatgttccggagcagtcaactccctttccatcagctaccatcactgatcatggagctatggcaactacttctacagctggtaatgtttctattgaatttccctcaacaagtttacgatatgaaaatcattctttcacatttcaacatcattgtctttcatcattatattccattttgcctcatgatgcttggatagttgacagtggagctagtagtcatgtttgttctgatttggcaatgtttagtgagacttttcctgttactggtattacagtctcacttccaaatggcactagagtacccattagtcacacaggcacagtgcatatttcatccacattgactttgcataatgttttatatgtttcaacattcaagtttaatctcatcagtgttagttctttacttatgcataataaatgttcagctcatttctatcatgattcatgttatattcaggaccatactcgggacttgacgattggtagaggaactctcatacataatctttacattctgaagaaagaagatacattgcattcatcaaatttctgtggatccttgatagttgatgatcgtctatggcatcatcgcctaggacatccatcatctgccaagttacaacatctttctggtattttacctatgactaagtctgctattcatgatcattgtgaagtctgtccattagctaaacagaaaaggttaccttttagttcaaataatcatttgtctgagaatccatttgatcttattcatttagacgtttggggtccattctcagtagagtctatagatggttttaagtattttctcactattgttgatgattgtactagagttacttgggtctatatgctaaggaataaaagtgaagttactaaaatttttcctgtctttgttaaatatgttcatacacagtataattcgatcattaaggctattcgtagtgataatgcacctgaattggctttcactcaactcgttaaagatactggtatgatacatcatttctcatgtgtatatactcctcaacagaactctgtggtcgagcgaaaacatcagcatttactcaatgtagctcgtgctcttttgtttcaatctaatatgcctttggtctattggagtgaatgcattcaaactgcagtatttctgattaatagaactccttctttgattttacagaaaatatctccatatgaaaagcttttcaaaaagaaaccagattataatttcttgagatcttttggttgcttgtgttatgtgtctactctagtcaaagataggactaagtttacacctagggctgaaccatgtgtttttctaggttatccatctggttacaaaggttataaggtgatgaatttgagtacaaatgttatatccatttcaaggaatgttatttttcatgaaacatcttttccatttagaaatgttccttctaacttgcctactgaggatttatttcatcacattatattacctatgtctactcctgttgctcttgatactttacctgtgcatcatacactgcctaatcatgcatctgcatcatcatctgcatcacactctagtgccacatctgttacactagagactgtgatacctattacaggacaaggcgatcttcctattgccaagccaaaacgcagtactagagcaccaggttatctctctgactatcattgcaatcttatagaaaccattcacacacagcctcttcctattttaccaaataaaacaacaccacctcagtttctaccatcaccaaaaatagctaataatccatcttccaagtcgaaaaaatccaaagtgccacaaacacctattaaaacaccttctgaaacaccttctgttttgtatcctatatcttctgttgttacatataatcatctggagcctttctatcagtcctttgttctttcttgttcactagaaacagaaccacaaaatttcaaacaagccatggctcatccacactttcctaaagctatggatttggagatttctgccctggaacaaaatggaacatggattgttgagtccttacccccgggtaagaatgttattggatgcaaatgggtgtatacaatcaagtacaatcctgatggctctatagaaagatataaagcccgcttggtagcaaaaggttatacacaacaagaagggattgattatattgacacattttctcctgttgctaaacttggtagtgtgaaatttgtgttaggattggcatctagttttggttggaagctaactcagatggatgttacaaatgcctttctgcatggtacactagatgaagaaatcttcatgagccttcctcagggctacacacctgcaaatggagcttctttacctgaaaatgcagtgtgtagattgaagaagtccttgtatggactgaagcaagcttctcgtcagtggtatcattgcttctccactgtggtcttaagagctggttttgagcagtctccagcagataatactcttttcacacgacaatctggtacatctttcattgccctcctagtatatgttgatgatatcatgattgtctccaactgtgatgtggagttgcagaagctgaaagatgcattacatggtgcgttcaagatcaaagatatgggtgctcctaagtattttttaggtcttgagattgcaagaaatgcatcaggtatctctgtctgccagcgaaagtatgcattggatttgcttgctactactggtttacttgcttgcaagccgtcttctgtgccaatggatccagttgtgcatttgactaaagacagtggtaagcttcttgatgatggtaggccttatcgcgagatcattggacgcttattatatctcactttgactcgacctgatattacttttgcggtgaattgcttaagtcaatttctctcatgtccaacggatgtgcatatggctgcagcttatcgggttttgaggtacatcaagaataatccaggtcaaggtttgttttactctgctaagtctgaaccatgccttaatgcttttgttgatgctgactggggaacatgtcaagatacacgacgatctgtcactggattatgtgtatatctaggtacttctttgattagttggaaatctaagaagtagacagtggtgagtcgtagtagtacagaatcagagtatcgtgcaatggctttaggaacttgtgaattgttatggttttcacagcttctccgagatttgaaagttaaggtcacatcttctgcaaagatgttttgtgacaacaagtctgccattcacattgctcataacccggtgttccacgagaggacaaaacatatcgaaatcgattgtcatacgacaagagatcagataaagaatggatttcttcggctgtttcatgtgactactgataaccaacatgcagacatcttaaccaaagcactccagccaggtccgttctactcgttgttgaaccggatgtcaatatcaaacctctttcttcccaattctggttcagtttcagaggtttgaggggggtatattagatatatcatatagtgtatatacttaggcttatacatgtaattaatgtccactatataaggtgacaatgtacagaactttatgattaatgagaataagaagtttaataatctcaatcttaatagtctaataactaattagatggtcttcttcgacaaattaaaaccggaagagtttaggttacgtataaacaagttgtggaattgtgaaaaaaaaaaaaaaaagaagttgtggaattgtgacctaaataacacggccctttagtttgtttcctcaccggtgacaaattcgtaaccacgcttttcagtgtaccaattttaccaggacaatatatatgaccattttaatttttaacaattaaagtgcattctcttaagagcttattcttgcataattgaatatgatgctcacggtcacgggtttcttagggataacgtacatgaaatctcaaaagaaccaataacgtagcaagagtaaaaactctcatggagaactacgttcagatctccttggtctaacacgctagcaacttccaatgtattctacagtttggatagatctcgcaaatgaaacctaatttttacttataataaatcgtaaaagtaaaaccatatgtgatgggttctttagaaaattgaaattgtaaataatttcctaaatcacgatatataaagaatgtgtatcaattttagttttgttattcagaataatattacttaattatgatcacaaattcacactgaacatattctaggttccactgtttcattcaataattgtatctgtatatgttcattacctctaaaggtaatatgtgatccttaccattttcattcttggtcttcgttttgggaccaattgacaaagaacgattgaaacaatctctcaacgaattttgcgtttctcttgtgatgatcagatttcttggcactacaatgctcatgtacttgaatgccaaatcttatgcgagatatattggtagtatcttttgttgttttgtacatttaaagctgtacacatgtgacacaaagtggttgaatatatttctgtgtgttttcagaaattctccttgattacatgcaagttctcaaacttatgatgtacatagtattcttaaaaccaaatttatcttattgatcatggtattttccaatacaacataacctatgatgacataaataactctatttcgatgttgtttatctcaatgccatggcaacctttgggctcataaacataattttctttatggttgaggttttcgactttattatacccataatcttcttctttttttgcctgacactaacctttgattatacaataatacttgttaaatcaataatacaaatttaggtgacataaattaataattctctgtttcgcgaaacgtatcattccaacatattaacacaacttaagaaaactgtttaaatttatattttatcttttacaaatacattagaatcaaagtatctttcttattaataacccaaaataaaagagactaaaaagatatttattttcaaaaagtgtatagaaaaaaacaaaaagacaagatttgtaaaacaaaaataaaattttaaaacgaccctattgataaaacggaaagagcataacttataccaaatagatacaccactaccactcaaaactataattttttttattttcaaaaccttagttatatgagactcataggataaagaatgaatgagccagctatggttatagtataatttgttttaattaggtttataatacaatgaaagtggctaattttagctaattgtttaaaaagttgattagttggaataaagtgaggtaatcggtaatccaatggaaaaagaatataacaaaacctagtgggagtatataaatctaggatgcatgactagtgccacgttgccgcttctgttcggtgtcctctctctctttcactactcaccaccactctctctctctctccctccatctctcttggattctctctcagattccatggaagctccaaaaagctgattcgttcagccaatttttcttcactctctctcagattcggatccgtggtcagatcaaccaccgtgtgttttccgatccgattcgattctttttttgtcagagctctcagataaatactaggattccgtttccaccacagatccttgatttgatttggatttatttcttcttctttctctcttcgagtttgattccacaagataccttgttagtttttctctctacctttgatttgatccgttttcgttatttgaatcgaaaatttgcttaggaagtagagattctggatcgtgttcgttattgttcatgatttgcttgttgaattctataatcttactcgttgaatatgcaggatctaagtttaattgaagaatttagaggttgaaatcagtttaacaacatttctcaacttatccatacagatagatagggtttgttatcttaatttgggttttaaggatccaggatctgtattttagctcttatgttgatgatgatcatgttctatgttgttgaagtagctcgtatcttcgttttctgatttaggaatcgtattattactaatgacagaatgaattttttctatatgcaggtcctgcattggagaaactaatttaaggtaaggtttgactacttagatggtatgcagcagtttcataaggagtttcattgttcaagctggttgtcgtattggggtgttggctcaaggaagacatcagtttattcatattaagaagactttgagtgtgggttttggatttagaactagtgtgattggatttagaacaaccagtggaattggatttagaactagtgcgaagatgatggttgatacttctgctggagagaaacgtatatccttagttgatatgccgcctgagaaagttgatgatggtggatacatcggtggtgggtggaaaaagtgagttgtttctcgtttttttagattccgtgtctttgtatcgttgtgctgaatgtagcaaatgccttaggtatatatatagggctgttaaaatattacttgttttgaagatatcattttatattttaagtgtgaaatgctagcaagattgtcatatctttcaccaagttattttgttatacggatgattatgtcatggaagaaactaagttccattatacgttgaagttttatattgttatgtaggcaatcgttaattgtctatatctttggatcaatgtgaaagtattgttttctacttttttcttttgtttttaagtggtctttaatatatgttacgtgcaatgacagtgatgatggaagcttgagctgtgggtactgtagtttcagagggaaaagatctacgatggaagatttctatgatatcaaagcttccactattgaaggccaagcagtttgcatgtttggaatatttgatggttagattctatgtttccttccttttcttttggtatagacgaatacgaagtgttagtgtgacttggggaaggtatttgatctgttttgaagcctagttttcaactttccttattactattgtattatcgcaatgtaaacatggctgagctaaaacacagtccagcttcatttgcagaatgacagttaagaaagatctagaattaccttagttagagtccgtatttgtacatacttatttaggaaaattaaaggttgcagtgcacttgaactagcaatatgcgttcatataatactcagaaacagaatcatagattgttgacttgatctctatttttcctcttctaatatctgaagctttaatcatcacaggccatggtggttcacgtgctgctgaatacctgaaggaacacctgtttaacaatctcatgaagcatccacaatttttgacagacaccaagctggcattaagtgcgtctatatctcttgacataagatcttgttataatctaagaagtatgaagctcataagtcatctggtttccttcttacatggttaatttggcagatgaaacatataaacaaactgatgtagcattcctcgagtccgaaaaggatacttacagagatgatggctccacagcatctgctgctgtgttggtggggaaccatttgtatgttgcaaatgttggagactcgaggacaatagtttctaaagctgggaaaggtcagtatgtcgttgtgatctaatacaatgtggcatatcatttaaagataaaatcgagagcttcaaaatgagtttaggaattggagttatactatccttatagaacattgaaatttagttaatagtgaatggattcttatgattggtcacaaacctttgttgtgttctttccataaggactcttttcaaacttcgtgctttatgttttgcagcgatcgcgctatctgatgaccataagccaaatagaagcgatgaaagaaagcgaattgaaagtgctggtggtgttatcatgtgggcaggtaatctgatatataagaaattgtccctcgtttgtgtccccctaattggttgcttgcttctaaacatgacaaagtgagatcgcagatttctctcttgagttagattactagcttcattattgatttactcaaaatgcttgatatctccttcgcgaaattgaatatgacaatattattgttggtttttttgtttctccttatttagatggaacaatgacacacataccatcttatctaggcattctatttgtcgggttagggttattcatgctttaaacattcagtgtcagagaaaaactagatttcctgaggcatgcccattaagcatccttctctgaatttttctttcagccctagacttgataataatatcatcttgatttttacttgtcaggaacatggagagtaggtggggtgttggctatgtcccgggcctttggtaacagaatgctgaagcaattcgttgttgctgaacccgagatacaagtaaccgcttctaactgcaacttactgtttttgtccaagggtgtcatgttgttctcatcatctgtagtatcacccatgtgaaatctccgagttttaagtttttgtgaacatgcttctgtgcttatttttcaggatctagagatagatcatgaggccgagttgcttgtgcttgcaagtgacggtttatgggatgtggtaccaaatgaggtatgactcaaataaattcacccccttgtatctgtttctgaatggtttgagggatttaaatatttgattttctacatctgattcaggatgcggtagcccttgctcagagcgaggaagagcccgaagcagctgcccgcaagttaactgacactgccttcagccgtggcagtgcagacaacatcacgtgcattgttgttaaattccgtcatgataagacagaatctcctaaaatcgaaacaaacgccatggctgaatcggaacctgaactgaaccccacaactgaactggaacctgaatcaaaccccagtactgcattggaaactgaatcaatccccaaagctgaactggaatccgaacctgatgctatacctgatccaaaacctgaaaccgaaccagagaccaagggtgagaaagctggtgagtaaggtagcagccggggaaaggtgtccatactgttggggacatgtggaaacagatgaatataaaattgcttagtaagttgtgtggtttgtggctacctgtaacgtgtgaggatttgtgttttttggttttgtgttgcattcatgcacatgcctatgcctgccttgaggacgacgacgacccttttgacatgtccccgatttttgtctattcattttaccctattttgtttttgttggtgctactcacaccaaaaacagcacatttgttctctgtttctcctacttttttctatcttttatttaaaacaccgtccattccaataaacaatgtttttgtaattcttccccatctcttagctttcctcgttcgtctctacgttattagtagatctcaagtatcaccataacaaatttgtggttatttgaacaattaactccttcgcgcataacttaactgatatttggcttcttctagtatatccttccatgtttgcacttcccttgtctaattacaagatatggaaatggtggacaacaaatattagttgtgaatcaagaaaatttatcaaatggctgatgtgataagtatagaaaatcttattcatgattaacaaacttgtaagttgtaaactattaatgagtcaacattatattccagatttattttggaaatatgcatgtgtgagctgtaaacgatagaattaccatttaaaaacgatagaaagataagaaaaatattttatcatttaaattttcagtgtaggtcaaaacttaactatggttgaataaccatatttacaaataatgacaaagtaaccacagttaagtaaccatagttaaataaccacgtttaattaaccatggtcaagtaactatagttaagcaattatgggtaaaactggtataataaagtaactttattatttttgaattcaaagaggataattagtacctaaatatattgtttacatttaatttataacctaataatatataattagtctaaatctaataaattcaaaaacagacatgtgtaagttgtagaccacagattaagaagaaaataatttattttcatgtttataccactcttaacctactgagtcaaaacttaaccatggttaacttaaccatgattagtaaattttggatttttactttgaacaacttaataaatttcacacccaaatacattgtttttctcacattatatatttgaggtgttctcaagagagaaaaaaaaaaaaggaaaaaaaactaatatcaaagagcagggtttgtgagggtgtatctgaaaaaaaataaagtttggttgattcaaaaaatattcttatcctcggagttgcgatccaacgattggtatgttttctcctattttcatggtttcttcttctctgtttactttgtgccctttcgctttctcgctttatcactttatactagagaaaattggttttagggctttgaaattgcagtgatctataagggttttatgggtttgtatcacacttttggtgtctctgtgatggcgaaatttgggtttgattttagggtagtggaatttgtaccgtttgtgtgtagatccgtttgaaatgtttttgaaatggttacaattttcgcgggtctcgtactggtttgattgattgcattgaatgaaatgtgcattaggtttttttttgggttcgtagtgattatgagatgcaaatggtattgggagttttgattgtgggtttggtgaattgtggtttaggttaggttagatagaatttgaagatctgtgatcgtaattgtgtttatttggctttgattggttttggttcatcatcagtgattatattgttgttagatttcgaggggaggcttcatttaaatctggatacacctattgttaagatgtttgattgcattagatgatagattctctagatctttcttttatgagccttgtgtatctctttaaccataggttaagtttggtgaattgtggtttagtttaggtttatctcttgttagatagagtttgaagatcgtagttgagtttttgtggctttgattggttttggttcttcatcagtgtttaaatgttgctagattttgagggtcttcattttaatctggatattagttattgttaagatgtttgattgcattggattgatagattctcaagatctttcttttatgatccttgtgtatctctattatattcagctgattgttgcggaatctgtattccgtggatacgcgcaccaatatgtattcaacgggttcacgggcaaatttgtttgtgttttatgtggcttggatatggtaatttcataatatatggccaaagagtggttctctttatgtgtttttaaatgtaatgttaccttaggaaggtcgaaccgggtttgtttagtaaaattcggggtccttctaccggttgagaataatgctaccggataagattgattttcttgagctaatgatttgcatttatggttttacccagttggactagatctgcatctatatcaaattttgggaccttgtagctagttaaacctcatgtggaaacaaatctaccgtttctaggaaaatgtgtgtactcttttaaaatcatcagattctactgaatctgttctctttaataataaacatgatatgcttatataaacattccactgaatctaatattttttatttgcttctttgattttgcattgagacaggtttggaacgttccgaggagtctgttgaagatcctcgattctaaaaagcttccagaggacaataatttgtgacggagtaactctcgaggacatggaatgcaacaaggatgaagcgaaaagggcaatggatattgctgagaggaagatgacagagaaggattacactggggcgaaaaagtttgctaacaaggctcaaaacttgtttcccgagttggatggtctgaaacaattgtttgtggcaatcaatgtttatatctcgggagagaaaacattcgccggagaagctgattggtatggtgtccttggtgtagacccctttgctagtgatgaagcactgaaaaaacaataccggaaattggttcttatgctccatccggataaaaacaagtgtaaaggcgctgaaggtgcgtttaatctggttgcagaagcttgggctctactatctgataaggataagagaatcttatataacgtaaagaggggcaaagatgtcaaagcagctcaacaaagattcccaacaacacagagagagattccatcacaccagccaacttccaacgggattccaaatgtaagagagcatgtagtttcgagtgctagggctagatataagcctgctacccgtaagcctgctgcccgtatggatagatctcgcacgggttcgcctgcttttgtttatccgacacaggagagtagtaccttttggaccatgtgcaacaaatgcgacacacaatatgagtaccagagggtttatctcaaccaaacattgctttgtccacactgccatcatggtttcgttgcagaagagaaaactccgcctacaaatattccgaagcccccagtcaacatctcatctaaccaacatcaccggagttccaaaaaccaagcgtcgaacaagaactcaaatggttcttcttataggagagagcctgcaacatctgttaaccataattttcagtgggattcatcaagaatgggtggttcttacagccgaaatgccacaaatgaaacggcgaatgtagttcagcaaggacaagataaactgaaaagagtgttttgggagacgcaagaaagggaggcggctagaggatttacaaactctgatctggggaattttaagaggcagaagactgatgattcccatatgcgtggtccatctgcaggcaagttgtcgaatcaaataggtgcaagtaggtccagtactcctttttatgctgccaatgaaaatactgaatcttccaacaccataggctctcgtcatccgtatgtacaagcattgttacgttctgatataaagaaagctcttatggacagaggccagtcagagatttttaagagacttcctatgatgatcgctaaaatggaagggaaggtgaacccaactgaaggggagaagaacagtacgaaggcaatgagtagcaaggcaagtgaggttgaaaggagcaagatgagtagcacggcgaatgaggttgaaaggtcagttgaggtaattccccatgagtcagatgaagtgaaggaaatcgttgttccagattcagactttcacaactttgatcttgaccgatctgaaagtgcttttaaagacgatcaaatttgggctgcttatgacgatgctgatggaatgcctcggttttacgcccgcatccaaaaggtgatttctgtgaatccttttaagttgaaaatcagttggctcaattccaaaaccaccagtgaatttggtcccatagactggatgggtgctggttttgctaaatcatgtggggattttaggtgtgggagatatgaatctacagatacactaaatgccttttctcacagtgtcgattttaccaaaggtgcaagaggactcctccatattcttcccaaaaagggacaagtttgggcattgtatcgaaattggtcccctgaatgggacaagaatacccctgatgaagttaaacacaagtatgagatggtggaagttcttgatgactatacagaagacgatcagagtctaacggtggctctcttactcaaagctgaagggttcagggtagttttccgcagatgcacagagaaacttggtgtgaggaagattgccaaggaagaaatgttaagattctcccatcaggtgcctcattacattcttacagggaaagaagctgataacgcaccggaaggttttctggaactagaccctgctgcaactccttgtgcattctcttcagagaacgcagaggcggatgagaaaagtgaagctgtgaaagagaatgagcaaggtgaagccgtgaaagagaatgaggaaagtgaagctttgaaagagaatgaggaaagtgaagctgtgaaagagaatgaagaagtgggtatggatctagattaggggggtatgaaggtagtagcagtcagtacagtgtacaatggaggaagaaacatatcgtatcatctcattagggcacaggactaatcaatgtcaggtctgatcttttgcttttttctattttttctttcttttgtttaaggttgacccagaaagtagccatattttggcataagaaactatctataccggaaaaattaacctgagtatttcgaatattttttgggggggtcaatgtacaatcttttttggtattttggtatttactcaatagaccagaaagaatcttgtaagaactcagtttgggattcgaatatatatatggtggttatggttatttgttactttttttatctttgaagcattcattttgaagttcattgtcatgtttagtgaatttggtggttgtgaatttgtgattggccaaaccggtccattttgagaccagcccatttaagcatgcaccgacttggtccttgttttagaatttgtgcctcatatatgcaactgatatctctcaatctggttaagtttgtttcttgtcagcgtcttcttatcatttacttaggcatcaaacttttgtcggcatgccattgtgtttgagtaagaggccaactttgatatttcaagataaatttgtgcctcctatatgcaactgagatctctgtttcaaagctacaacgttctctgttttcgtaaaaaggactttaacagcgaacttttagaaattgtagactagtagtgagaaatttttgactcacatcatctttttctcatgtatctgaataaagaagaagtgtgagattttgattcataagccattaatggtgttcacgtttctatagctgaaatggtcaaaaacaaaagatagatgcaacacatgatcctcacttgtctctttattatgagtttaatttttttctttctattctcatctcttccacaccttttgtttgtaggtccacttctctctctctttttctcatcttctttaatatatttaattggataatactatttctatatatataatcgtcgttgtcatactatttatactaatatcgacacatgaagtgaatctaaacattcccactttacaaaggtgattgtccttttacatccaatcaatcgacttactatttatgagatactcacttctttgtccttaatgtaagatattaaggctcttgagtgatagaaatcaaacaagtgttttggttgttttgtttatgctaatgaatgaagtatggtctatgttgattgaaaggataatatctaagtatagatatttcatggtggtaatgtctaaacttgaaatgatggatttatataactttatatatgcaaccagcaagcaaacaagagcatatacataaagttatttattagcagagagcttcctatttgctcagagagtcatcagtcttacatgccaatgatgtcaggcactgagagtcgggttgcaaatggaaggcaaactcaacaccttccttgaccacactcaaaatctccgatatacattcctgagagcccacctgcaagctccaagcccaatcttaaaaagaaactatgggtatccaattttttttttttgtgtactttaatcttgaggtagtagtattttcgagaatactttagcacgttacaaagttagcaacgaattttctttttctagatatgacttataagagccaaacctttttatgttatagaaatctttgtcactttgagatacttttattcaggatttaataaagagtgttggataaagcacgtgggaccttttgctctctcgagattggctcttcgagtcaggaaaagttaagactgtgaagcaaaccctatatatgatactgtatacaatatattttttggataaaggattgtgtaaattaaatgatcaaactatatacttactattctggccttagtggttataagatactaatattatactgtaaatgatcaaaacaagatactattgtcagaatgcgaaaaaataaagcgaagtccaacttaatagtttacgaacttttacttcatattatgagtcgaatgagagtgaatactggaattggtgatgatgcagaaaaccggattagacgaaacaaagagaacataatacaaatcattggtatggaactgacaaaacgtacgaaacaatcgatgttaaatggttagaataaaatttggatgataaccataataactgcagtgcatgtataatcattaaattttagctatttttaatacttggaataatagatgtttactatttttatcatatacctaaagaagttcttgtaatttgtacttagtacctgatttgtcgttctaatcctaaaaaaagatttggtcctttgtagtttgcttcaaaggccccgaatctgcattgatcatggtctggctcgggggtgttaagcacacttttaactagtgattatatgtctaattgggacatcaatatacctccatgcacctagtaatgtgaccatccgtataatatgtgtactatctcttcttcagctaaaggttaacgagcataatctggttaagccctatgtttggtttgcattataacaatctctctgaaattttgtagtattttcatcaatttaaattagtatattttcgacaatttgaattgttctttgagtctgatcacagtcaagtacacgaactatatgctgatctgatcgaattcattctactatatacacacacatacacaaacattttacagtacaccactaatactataatcccaataacaagaaaacctaaaatataagtacacattaacaaaagaaaacagtttgcaagttattaagtggtttttggatttggtttatagtttttagatttttgcattaattatatatatatatatatatatatatatatatatatatatatatatatatatttgaaactaaatatgaaaaagttatagcgttaaaaagtgaaaaaccaatgaaacatagattttagatttcctttaaaaatctagattccttatttttataaggaaaaccatttctcccaatcttaattggctataaagtagatttttggaaaaaacttaagccataaacaatttcaaaaaatctataaccatttcaaaatctttaatccttttttttttttgtcaaaacaagtcttttatccaaatgaaaaagcacccaagaaaaaaaaaaaaaaaactatccaataattgagtcagctctcataggcttaaacaatactttaaggatcaacattaaataattaccacacttgaggggtaaaactaaaaacggtaaataaaacacagaaaaacgacaacgaggggcaaaatcgaaaataaagagaaaatagtgggataatagaagaaagcatccaatgagagtagtgaaatcagagaaagacctttactcctttagtccaataccatccaatcaatctttttctttttttttataaaaatctctcactgagtctttttatttaaatattataaaaaggagagagaaaaaaagtttgttggaggattcgtctctctctctctctctttctctttctctcatcttcttcttatctccctccaaagacggcgactgtataatctatcatttcttcacagtaacgctttcatcggaagatctcgccggaaaaaaacttctctctgagatcagatctcttacgattctcagctcaatcttatcttttcctttgttgtgctgcttttcactctcttctgcgcgacgaatttggccttgttttttgtttgtttgtcgtatccgacgcggaggtattgagaaaccgtggcttaagacggaggaagaagatggaagctaacgggattgagaacttgacgaatccgaatcaggaaagagagtttataaggagacatcataagcatgagcttgtggataatcagtgtagctctacgcttgttaaacatatcaacgctcctgttcatattgtaagcttctcccttcttcttcttccttcatgcgctctgattttctctgtttaagttaatcggttcttcttattgttgattcaatccagaatttgaaatctctctctattttcatcgattgttgatcttactgatgaagaatcgattggtttctaattattgaaagcttacatagcatttgtgtaatcccaatctgagtttgtttgatctggttttgctttattggaaaaaaaagctcccaaaaacgcttatggattagtttgaatctctctggtgaataggtgtggtcacttgtgagaagatttgatcagccacagaagtataagccgtttatcagtagatgtgtggtgaaaggaaacatggagattggtacagtaagagaagttgatgtgaaatctggactaccagcaactagaagcactgagagattggagttacttgatgacaatgagcatattctcagtatcagaatcgttggtggtgatcatagacttaaggtaatcaatgaatcaaaaggttcgttttctgtttacagtgaatcaaagacttatatgttctatattgtttttggatttagaactattcttcaatcatctctcttcaccccgagactatagaaggaagaataggaacacttgtgattgagtcatttgtggttgatgtaccagaaggaaacacaaaggatgagacttgttactttgttgaagctttaatcaaatgcaatcttaaatctttagctgatatctctgaacgtcttgcggttcaagacacgacagaatcgagagtctaaagatcaaaggagtaagaaactattgaatcagagagattttggttgccatggatgaagctctcaaagggaaaaagagagagtgggtgagtttctttgaggatggacaaggcaaaaaaagtatcatcatttatccagttacataataagtttctcatttgctatttttggggtcatttcactttcaaaccctctttttaatttcatgtgtctaatttaatgaatgtgtttttggtttcttctctatagaaccaaaatatgattttggagtttagctttagcaacttgcaggaatctttttacaatttgcagagaagacatgttaaaagtgtgtgtgatcatggggttccactctcttcttccttttttaacacttttagttgcacccataaaggccacacaccgtctttcttatatttattttttctacttttaaagatgaaccaatagggtttgtgagatgtgaaaaatctccacaaaggaccattaaggaaagagatctttgttgttgtttatagattttgtcttgacttgtgattggggaaacacactttagctccattagctgtaaaaagttttgtatactatttttacaatgccaaagtgtttctgtttcttttttcctaaattacagtagtggataaatattcgaatcggtcacattgacaggtggtatcattagaattgcttctatatgttttctttcaattttgttccaaacaatacatgtaatttcatcagaggaccttgtaagctgcaataagattcattggctttcaaaatcacatcagagaataaagacaacaattattactttcttttcaatgttgttttacatttttcttcatagaattgaacagaatgtcaaaaagggcaaaaggttcaaggtcgaagcgaaaactaatgagctaatgaaataaaaactacaataattttgtaacatgagatcaataatttcatatgtttttcttttggttgttgttgtagaagctatgggagatttactctgtacaaagctttgaatctccctttttcacccaaagaagtgtgtttatggtaatgaatgatgtgattaggccaataccaagtctccttcttcttgttgttgctcttcaaatttctcgccttcctgctttggaaggagaatacgctttatgtcctctgcggttagcgtttcatactctagaagtgcgtttgctaacgtgtgtagctgcttctcatgctggggaaacacacacacacacacacacacacacacacacaaaatcgaagtgagattaaacaattttgatccagtaaaaaatgcgactatctgtaaacttggcacaaacccgtttcaagagagatttcactctctcatatgcttctctaagaagcttcacaacctatacatgtatcaacaccaccagatgaatgattagatttaggaccaatgggatttgaatgagggaactaaaaaaagtgaatagagagtctctacctcggcatcaatgcgtgattgcatatcagagcttggtctttcttttatatgaactggtcctattgcctcactcatcccacaactcgataccttccattaaaaagaaaagcattactacaactacaacaagaggtaagatccatcttctcgcattaacttgtaagttcaccttaaggatctcagagactaagtccctcaaacctcattccagaaaactaaaagaaccaaaggctaactcttttgataaaccagaaaaaaagaagcaattaagcacatgtacatgaggttaccatgtattgtgcaagttcagtggcctgtgacagatcgctactcgctccagtggtaatatggtccaagccaaagatgagctcctctgcaactcttcctcccatacatacatcgagacgagctaataactgcctcttgctcactgatgtttcatcgtttgaaggtaactgtgtaaccattcccaatgcagatccacgtggcattatagtcgctttgtggatcgggtgcgcacctttcgtatttaaagcgacaatagcatgaccactctcatggtatgcagtgagctaaagaggcaaagaagtaagtgacaggtcatatcatgtttgaactccacatccaaacacttctatgttgttaagatattggaatataccttttttgagtcctctgatacgaacattgtcttcctctctgtgcccatgacaattcggtcctttgcgaattccaactgttcagaagataacttctcagcaccttcaacagctgcttttatggcagcaatatttaccaggtttgcaagatctggaaaaaagtttggtgagattgggaaaaatgtggtgagtcattgaatcttcataggttagtgacaaaagaagacacttctgaatttcagggtgactaaactgtagttatagatttaagaaactcaccagcaccattgaatccaggagttccacgagcaattgctttaacatcaacatcttctgacataggtttgccttggaggtagagttccaaaatctcttcgcgtccacggacatccggactgggtacgacaatctaaaatcaaatctgtcagtaattcattttcctttcgaaaaatctgaaaaattgttcgtaacatagcagtgcacctatctaaatactgttcaaaaagatacagatgaaaaaacattgaacaccagatgcgcaaagtgacaaagtcaaaaacaaatcctcaaaacagggggtttctcaagacaagaaaaaggtatcagttcttcgtattccagtaactcttatctgcaatactaatacgtctcagaagaataacaagaaaatgaaaacttacatgtctatcaaatctacccggtcttgtcagagctggatcaagtatatcaggcaagtttgttgcagccataactattattccctgcataaccaaaatagaaagcaaagtactattatattcctgcaaactagcggaagtaatcacaagatacactactcctaatcaacaagtacctcattctgctcaaaaccatccatttcaacaagtagttgatgcaatgtcttctttgtatgcccttcccattgttttcttgtggatccaacagcatcaatttcgtcaatgaaaataatacaaggtgcctgtaacacatgatcgtcattaaatataaaagttcattcatggtagcctaatcaaccaaactcttttaaaatagctgataagcagtgacaagttgagtcataccttcttcttggctgcctgaaacaaggatctcacacggcgagctcctaccccaacaaacctgtaaatcgaagggaaaaaaacatgatattagaagacattatccattattgaagaagccacctgattgaaataattactaaatagataatgataatgttgcctaaggcaaatgccagagaaagatagctagaagaaggctcacatctcttcaaattcagatccagctctatagaagaagggtactccagcttctccagcaattgccttcaaaatttaaaccgtgttaacttattgtaaaatcaatcagaatattggtagcgtaataagaatttattattaagtggaatatgactgtgaaaacacacactcataataagtaataaccaattcaacaagagacgacaatataacaactatgtgagaacttactttggccagcaatgtctttccagtaccaggtgccccggttagaagaattccctggaggcaaacatttcagaaatgtttcaggtcaaaatgctaactttagtagacgggagaaaatcaaatgcaaagacttctcaattgtatattctcaaatgcaaagtaacaaagaaagtctatacctttggcaactttcctccaaggcgggtaaactttgatggatttttgagatattcaactacctcttcgagctcttgttttgcatcatcacaaccctttacgtccttaaatgttttgacattctgcggcaagtaaacttgataattgttaggaaatgacacaattggagcagctcttataaatatatcggcttcaagggcaacacgaacagaactattgaattgtcactgggtaaattagcattaacacagagacgatccaatatctcagataagaaggatactatcatgcaactaatttgcaatatccttctcttactatagtttgcccattgtaactaaagcgttatatttccttgcagttctacttctactttagactccttataaacagtgccgaacatcattactgtcttcaacttgagtcaaaagtctaccttttctggcgttatttctttgttcagctcttttggggaatatgaagagcttgaaccaacacccgaagttccaattcctccaagacttccaatatacttttgcagagcagctgcacccataatcctaaacaaggaacttccattttaacaggaacaacagtactaaaatagagaagcaatcacaagttccactatgtataagaagcaacatttctgcctgtgctatctaaatgaatctatcatcataaacttgatctcaactaaaatataggtgatacataccacactaatcccaccgcaacagtgaacaagatcgtagagacaagctcttgcgcaaatcttgatttgtttgaaactttaggattaacctaacaaagtaaaaacatgcgttaagaactaacaatatagggaaccatcgcgaacctatgaaaatatacctcaccagatggtaatataaaagaaacataccatggtaacatgcagtggttgcttctcagatataccagggttcacaaatgattcgtccatattgcctgatgcacgatgcttcagctcttgcagctgcacataaaccaataatttactacaaatacaacaacacaaatttagaaacaaagaaaactaagaacactctataagcttgagtcctttgaacagaaaaaagcaccggctacatacagaaatattcatatcaactggatttttgaataacgtttttagggatatagacagtagaaacaataagaaacagcaggctaatcaaattcagcgaccgaagtatagaccaactaaaaacagataaccgaaccagagattctagaagtagtcatggtaacaataccagtgcgggaagactagatggcttccccgtttgttcatcaggaagatactccgagatagcatttgtaatgacaagagctcgaatatattcagcaactcctctactatccactgtgtgttccctttgttcaaaccgttgaactacagcctcaggactaaattaaaagaaaatattagctaccacatagaatcaactaagaacaaattgaattcaacaacacctacgaaaccaatcaattagaggttggtgaaattacgtacatatgcttattgagctcagccaataaagcaccctgcaaagctgcgtcctttggattagcatcagcctcagcaataagtttctcgagccgcttctcctggcgagagaaaggccaccagcttaaccattcccactccattaccttctctatagctctctttatagccgcccatagtgccatcatcaacaccacaatcctaaacttgctcttcttctgatcttcctccttaccttccgttactccattactaacctccgcttcttctcctccacttttcgtctcctcaccacccacaaatctatcattcgtctctaattccgaaacctccgtatcggaaaccaatctattactctcagctgaatccgtaacctcaaaagcggagtctttgggaatgaaatcagaatcggaagcgacattgtcttgacgcaatgagcaaggaaggggacgaaatcgagagttgtgaagaactgaagaaagacggtagaaacttgagagagattgtggacaaaaactcaatgaagaagaagagaatagacaagggtaaagcttaaacgaagaagtatggagaggaggacgaagaaaaagagaagcttgaagagtagaagaagacattggagtgtttagggttttttgaatcctttatcttcttcttccttcttctcttactctttttatttcagagcaaaagagaagactttacttggagactcgggagccacaagatcctcctctctttatctttctcttcctgtgttttttttttcttcacttgagttaaaaaaatcttatccagtaattctaaccaatgtttcacaaaatttggccaataataatttttcacttgtacatgattagacagagttttgataatgaaaatgatatggtgagtggcgagagagagacatagatagagaaatcaagagcttctaatacatttctcaaatggttttatccttaaaaaaacatcttttggacacaagtacaagtgttccaaactttaaaaaacagagctaagagaaataaagagagagattaaacatctttctttgtcttcgacttttgagggactttcttttctctctctaatgcattggaccaggaccaccataatgctgtggaggcatatgaccacccggaccttgatgcattgagcttgaagatggtggtgccatgtaatgattgtgaccaccaccacccattcccatagagccttgccctcctggttggacccatccaccttgtggctgctgctgctgctggtggtggctcccacctgctgcgtggtattgctgtggattgccggcgtatggattctgaacgggttgttgaggcattggaaccggtgggttgggcattgtgtagtctctgcttctatcgttgttcacctttatgctgaggtcggtgtggcgtgaataagtaatgtggagcttacaaaaaccaccatcgtagatacaatgtccttccaatgcttccttcgccaccacagccgtttgaacatctggaagaaacccgccagagtcatttgagaatttgctctttacagagatcaataataactaaaacagagtatatcatacaagatgttacctgagtattggatcagtgcctgtaccccaccattcttgtcaaacattgcaatcttttgaacttccccaaaagccgcaaaaacctactcgtcaatatacaagagaagagaatcaatattttcagaaccaaagtttcaacgaggttttagaatagagagccagtattaccatgtgtaaaacatccaaggttactgcatactgcatgttttcaatagatgcgagaagaacattactttcaggttccatcttcttcccgtctacacccacagccacctagtaagaatgacacattaatctttcactttagtaactaaaccaacaaatgaagtctgcattttttcatgcatctctttgtataaaataaacatcaccagtaagagattcaactaagtagaaagcagatttacaatcataaatgcattttccagtaagagactgatctcaaattgctcacctgaccagtactatcaatggctgatggagcaacgggaaggtaaggattagtatagtccctgcaagatagagagtaaacaattcagtaattttggtcccagaagtatgtcaatcaccaagtaaaccaaaacatgtttcaacacaaagtgtgaatacacatacatacctgctccgatgactctgaaatttgacagtcagatctgtatgagctgaatatgtgattttaagtgagcattgtcccacggtctcagcgagtagatacctaatgcccagaaagataagtcagtaaacaagtatgcctctaacaaacatatagaatcttataacgcaaagcctgtatggtttgtgataaaataaacagacgatgtttccaagaattctacatggaaaaacaatcctaatctaagtatctaccattgcctacagtattttcccaggttcctacatgaaaagactcgttacaaattcgttttcctacatctattaacgctattagccatacatcactagggaacaagccattagtgctaaaactccaacagacgcttgaaaggctccaaatgtcagaccctccaaacaaatatctagaaccatgcagcccttcacagttagactaaataccatgtcaaaaatttaatacaactgtcacctagggatgcttcttccatcgagggcaagttttgcagcggttgcagtttctgcatcagtaaattgaaccagtgcctacgagcaagtcagacagtaaacattttaagtataatagatattaacattaaaatacaaagcaaaatagcaaattaatggcttggaacatacttggtatccggctgtcttctcgaaagtagtaatcttgtggacaaacccaaatgctgagaatacctgcatggcaaaccagcaattagaacaacaaagaaaaaaagagccagaagagttaactataaagactccagtgtagcatctgtaattattttgcccttcagcaacattccaagaaaactttagttaatgccaactctctaagtataaaattcatacagcatgacaaaagttaagatagcaaattaaaccaacataatatgacgtgacaagcttgatttcaggttacgctctctggaaggcataagatttgtcttccaacatatcaaacaatcacattagacacaaggaacagcccaaaaggttagcagattgatgaacctctagatagattcatcagtcacataaactatgacacagtcctatatcacaaaagatgtgcagatacagatagagtagcatcctatcatatcaaacaaaaatactaactacacctatgtaaggtagagctggcccctgcctatgatatcaaacaaaaacactaactacacctatgtaagaccatatctcacaaatcctagaatatatatctgataaagggaagtgtgagggagagagtagggaaaagagaggcagtgtcagggaaaggagaaaggaaacaaacacacatgtgctctttctcctaatgcattaggctgccactgaagatattgccttgacatggccctgctgatccatttacattcacgtcaaaagaaaattctcaaaagcacgacaacctacaacctaatcatcggcatttctccaaaacatcttttagcaatatatttattatttacatcatctaacgaaaccaattaggtgtgtgatccacttaccagatgcaagacatcaatgctgaccatacgagcatcatcgccttcgatagtcaccagaagaacattccccacaacatccgctgtcgttttgttgttcactatctcttgcctgttggagtactggaggtagacagttttaccacgaacttgagcaggctccgaagaagaagcatagtaagatatcatttgtatagcttgattcaaatcttcctgaaaagaagaaacaaatatgcaacaccaaataaaaataaaaacttataacaatggtaacacttaatgtaactttggcataatctcttggaacttacaaactcaatgaaagcttgatttcgattagctccaacattgcattttgtattaacaacagtaccaaaaggctttccgagttcaattaactcctcttcagtgcattcccatggcaagtttctcaaatgaagaacctttgaaggaggttgcgtgtaacgaaactgtggctggcttgaaacagaagacattgctcacaacgaatcttagagctacaaataacacaacgaaccaaggttatgaacgagaagcagctacagtagtacgaatcacaaaattttcagatctcaacaaattcgtcaaaaaatcaaacaaattgacgcttatgaagaatcattatcgagccgaagaattcaaatacgttataggatgaaaaaattagcagcaaagttcatatattactacgaaagaatccgaaataagaaaagagatcatgttacctgagatttgggaaaaatctgcagagaaattagggtttcgcgttggggaagataaagaagagaagaagatttggtgatagggatttatttgggagaatccatatgtgcgttttatcgcggtttctttaaacggcgttttgttttaagagcgtcttcgttattgggctttatgaatagaaccaactattaatgggccttacgcttttattagcccagtattacgtctaggggtaaaattaaaacaaaattcaagaagagttgattaaaaccataatggtgttttttgtggtttaaactttaaacccatctttattaacatttttacacaaaaaaaaaagtatttcaataattctccattcgtcaaaaaaaatttaagtttcggtaactcttttttccatttttgtcaacacattgatctttcgtgtacatatacacttgatcttataatataaatacagaggaaaacatagcacttccacctttatttttcacatgatcaacaatatcatcaccaccataacgtatagagtgatgtaacgttatttaatgaaagcacgtacaacatatgaggtgtttagataaaatatctctggatttacaaggagttttggggaaaacacatccgagatattagatcgatgaggcattgttagaattcttctcattggtatcactattacgatcaacgtcaacaacaaactcaagtgtggctttgttcttgtcatcatgatcatttcgtttggtgatcaccattgttgttggtgctaaatccttcttattcttgtacttgaagtagaggataagttggagaattcccaatggagtcgcaaccatattaggtgactatacatgtaagaaaaaaacattcgatatatgccatcatcaaaacaatgcacatgaaatctcaaaaaaaaaaaaaaatctcaacaattctttatatttcgtttcttagaccactaaccatttcgagaaaaaaaaaaaagttttgtagtattctacgcattaacaaaaaaatgatttatgtaacatcatattagttttctttaataaccgtcgaacgactaaaatcaagattaattagcaaaatatgtgaaaactttttttttttgctatatattaaaagcatctacaatggctaaccatgattgaaatcatagtagaactcgaattttgatttctcaactttaagataaatatttcaactactgaaacaccatgaactgattaacgtcaaattagtttgtgatcgatcaccgcaaaaattgactaaattttaagaatccataagaaaacgttttttttttagattttcgacaatttctcttttcggtccacaaagcaagaagtttttaaatccacatttagtatttttgtactgctattaattatggaaaatgagtgaattaggaaaaaaacgaaccgcaagaaagagatcatggctgagtaagccatatgccaaccaaagggaactagccagaaatgagaagaaggacaagtaaaacggcatgtattccacacttcttgtctctatcactttcttctgcgcacactcaaatattcacattaattagcacacacgcattcatatttttttagtaaacaaaatattcctagtatgtaatagttggtttgattatatggcttaccataacgacgagaggagaaccatacatagagatggaagccacgaggccaacacttccgacgaatgattttcggtgacgatggtcgtcaaataccaaggctgagattgctgtcgttaagccgaacccaacgatcaccggaacaaatgtaacaccaaccttaatctatttcaaagtttatattctatatggatcaatgtcactagtttttattttccctaatgaaaaagtaccatacgattctaatgaatactttaccttttcttttggtgatgcgtagtagaaatatatgaaaatgaagatagattcgagaaggatgccgactccattaatggtgacgagaggaagattctcccaaagatgactcacaatcggtaaaccgtaccaagtatatatcaaacagttaaagagtgtcataacgtaaggaaaacatgagaattcctctgtgcttttcttcttaaacacccttgaaaatgttactctacataaacagaaagaaaatgttaatctacatatatagtacatagtctactttcttggttattcaaattaaatttgcgatttataaagttttcatctacgtacattggagctgtatatagcaacagagaagctccgtttcctgtgaagtggccatatataagtattaagaacccggaaaaaaaaaactcatacaaatatatttcgtgtagatatcatgttacaaacaaaacacattttagagcgaaaactaagtttaaaagttgaaaaaaagtttgaaaatcgaagaaaagagcatgtggtagtgtatattacacaaaaagtaaagaatacaatacccaaaattccgatggataatcgaagtttatcacccatttgattggccggaagaacaaagattagggaaaagttggaagcagtagagttacgtctataatgggtgtgtatatatataatagtttttctttaatgttcatttaaaaataatcatctaaatttgatcacaagtttgggacatttggtaatttaacaatttggttccaaaaattatattggtgtgatgagataaataacaattgcttctctaagtttttctttttttctaaaacatagagaccaagcttgaattagaaaaactactggaaattttagaataacatataattttcatacacggatgtttcattaactagaaacgaacctagaaagatggttgttcatttcttgagtttactaaatctaatttcaagttcttggagttatcagaccatatatatgacattattagacgtgtgtggagattaagttgtttatatatacaatgtcttacacaaacttatatacacgtataacactagatgatatatcacacaaattatgtgattcaacaacctattagcaaccattccatcccaaattacaaacgcatatatatatatatatatatatatatatcttacaaaaccaaatttgtaaatcattttttgttttttgtttttacgaaagtaattttacctgattataacgttatatatatatatatatatatatatccagtaatagaaattttttaaattatttagtttaatagattgtgaaggtctaacgggcacattaacgtctgcaagtgacaattttgatgcgcaaaaaggcttgatccaaatcgtacacacaaatctccctttttttaaacggatatacacacaaaaactttgattattttgtttgtatcacattaaattccgaatcgaataaagaagactgatttgtttaagtgcttatggaatatataatagaaaatgataataatgcatggagataaaaaggaactccaattaaaaaagttaaaaacatttttaagttagctttgtggtggccggttagcaacacgtggggtgtgaaactagtgtcctttatcaagaactttgtatattataaacattttctcaacaaaaaaaaaatcttgtcaaaaaattaggattatctattttaattataaatttagttttgagccaaattatgcttgaaatgcacatccagttatgcttatggtttacttagttcattttccatctcttttgtattgtctcttccttatcaatcaatttctgatctcactcttttcaaatgaatatttactaacaattatgatgttggtgttatatattcatcatttatacctatgttttctcaacatcaaaacacttaaatgaatgaaaatatcctcatttatataccaaaatccaaactaattaatttgcaaacatgtaatttatacgtaaaaacatgaaatctttacattgttctaaattaatttacaggctaattcgagttgctagattaccatatatcactcaagaatcaaattttgagtttcaagaacctagcgaactaatagaatacggtgaatttataaaactaaaataaataatattacaaacaaaattacatgaaaatatacattttttatttaatatatactttttggtcacaataatgcatgcattaatacatatagaactaataaagaacgaaagagttagaaacttttcgtaagttggctaaggtgttctttatcaaaaaaaaaaaaaaaaaaaaaagttggctaagttgttggaatcgtattggaaatggcaccaactagcaaggacttccattcttccttcgtgtccttatttctttattataaaatttgtcctcaacacagcacaacttattcttttgattttttggttaaagttaaaataaataaatttacagagggatgtgattttgttataacttataagttataagaccaatctagtttaccaaaaaaaataaagtactggcaaaaaaaaatcacaaatgatgagacagtcgatcgatcctggttaccgttttaagccaacgaaaaaaaatcacaaatgagtaagtcttttggttaccgttttttttttaagtttcgtttaacaaaaatagtccaaaaataatattgtggtatactggtatccttagatatagtattttggacaaaagaaaaaaaaaaattgacttttgagaatgagaaaaaataacgtcttcggatgggtttgttttctctagccaccccaacaatatatgtttatatgatgatatcatagttctaaattttgatatccaacgagtttttctttttagatggtttcctctttgaccttgtattactccacctaactgattttcaatgcaagaaaaatggtcagacctaactctattaaataccattgaccaaaaattcaatgcaactaaaagttttctacaaaggtttatttatcttttcgttttttgttaaaaagtttaagatttttacaaaattaaaataaaattgatgattgtattgtttttaatgtcattcctatttaatcatttaatatttaatgtttgttaagaagtgatgtactcgagttttagacacagtttttcctagcattgagattacctaaagacgaaggaaccatgaataggttactttttgtcatcatctattgtgtcatgcattatccaaatttgaatgtacgtcaccaataaaatgtctctatccgagaatattttgcgacaattgacgttggaggttttaatcgtaatccaacaatatcaaccactcattttttgttcatcaattgtttattcaattatgttaactacggaaaacatgtagaatattctaatccgaataatttacggtgatatatcaagcaatttgttaaaattgttgaaaatctgcacaattgtctttttcaatgtattgtaaaaactttcaccaacttttaaaaataaaaaaataattggttgctctaaattactaaattttggttaagatgcaaagcattttggctctgaacggttaggaaggaggtggagcctcttgtagtgattaacctctgaatgattccctgaggcgttgtgataactccgaggatcgcaacctgattcttgtgaggagtgtttccgtagaagaagtttccagctggtgaagatgtttttaagatcaacagtcttttatataaaaaatgcgtgagttaagttatgtgtggttaaatccttaaaacatgttaccaaagcaggtgtgcttgaatagcatctaatggtatgatgtggtatgatgtctttcctattttggcgtttgagtttatctaaaatcaggaattaaattgtgttgctaaactgatcgaatttaaatatgaatcaaccgaaactaaactaaattatccgctttatacgtattgtatttaatttggatactatgtttatatcttaaaaattataaaacccaaaaaaatttaatccaaatctggaccgaatatactaatctttaagtattttttaatttttttgagatttttaaaaatgatatctaatcctcataatccaatttatttaatactggatattgcatgatattattgatatgatatcattaatatagaaaagtatatggttcccttaagaattcgagtctttttgaaaatttggtcctttttgttgcatgtaccattggcttctagttaataatgagcattatcataaaagagtgttttatttttgtggtgcgagagatctgatgttgacatatatagttttatgaaaaagtaatgtttttttttatagatataaataattagagataggaaagcatagcaaggttatgtttatctaaacccgaaattaagcttaataatcaaattgtaatcaaaactattcgtttaattttgtaattatcttctaaatatattcttaaaatcttaaataacataaaataaataggagttgatactctaatagttccctcacctacttttagtgtactcatcttgtattcctttaaatttgcatttatgaattttaattttctgaaaaacaatttttaaattaccaaaaaaaggatacatgttcaaatattagtcagtaaacaaccgaactgaaagttggactattaccgaaaatttgaacttctcttcaatttcttactggtatttttttccataaaactataaaaggattaaaaccaaaaattcatgtgaaaaaaaggaagaccaataacttatatggatcgtgtgtgtagtgtacgaactacgaatggacttgattgataatccaagaaaaaatctaatcctagtacgagtggactcgattgtttagtttagatgactcgattgaaatggaccagacacaagatattcaacctgtggatgcctaagttctctctttcttttcttctttaatatttgtttttatataaaacatatgtaattttatagagttaatttcggtaaaaaaaagttatactttaggccacttaaagttaaggatcgacctaattatgcatctaatgcgtgctatagcaaaacaatgtatacccaaccagcaatattgtcgtcttaattggcatccctgctactaagatatagttatcttctcaaaattattactttcatgattctaaaactaatactactgattacccccaaagaagaaaaacaaaatacaatacatatgagagtaaataaaaagtataatttgtaattatgatgataggactaactaacaagtcataccaatttttccttaaaaaaacactgatctattgttcgagaatgatcagtgtctttaacaagtcatgaccgtctaatgctggtgaagcctactgactaaaaatgatgttacacgaatagtatcactctatcactctatcagtactcgtgcagatctattgttcgaagaagtttctgtgggtttttttctgaaattccactgtgctgatcttcacaacacattattctgctgagattcggtactattgttgtcttgtgcagtgcggaatatctttagttagatacttagatatactatataaagtttacgatttgatcttgggtacgtacttaactttctctagagtatttatattattttgtttttaatgttgagtttcatgattaagcttggtcaaagaatgagatggtcaaagttaacgaatgaattagttgaagtcttagtttagaaagtcagacgtttactcgaaacgtcgatatgctactattttaattttgttatgtatatatccataatcataatttgtgagataagccgtatttttagattttttttgttctccctcaagtttgtatcattatattacataataaaaagcgagaggagatagtaaggactgaatctaatacagtacgtgttaaggactggcaaactctgaccaatcgaagtttggtctagaatttgttttctatttttataagttaatcaaaatttattagattatgttacattaattcatgtgttgaaaattgacatacgtacatgcattttaaaaatatattaaactaaaagtcaaatactatcgatattcaatcaatcaatctcttgacaactaaactttatgttgttgaaaattttaaaatacattaatggattcattttttattagtatttattataaattttaactatgtcaaactatgacaaattatcaatataagaacaaaaactcaatatatcaaattcaaacattcatacaaaaacaacaaaaaaaattaccctggatgaaaacgtatcgatccaaaaaaccagaacaactcacaaatacgatagaacaaaatagaagaagaaggaatttcacacctcattcgattcgagtctaaaagaaataaactacatcgtctcctcatttctcataactctatgacctattaaatgttagtcaaatataaatttacttcatatgttgtttgtggatggggctactcactcatatatagtcatgtagtgaagaaaccttatcatcttctaaaatatcacgttttccatcttgttaaaaaccgcaaatactcatatgttgcataagagtgtaagcggttaagtgaatatactcaattcgtatataacgcttttccaactgaaagcagcagaaacattcattggaccaccttaaatgttgtcaacaatgttgttaaccaatcaaaacatctacagttcaacaagttttattatttgattcgagcttttactttgtggggtttaaattaatattttaatgacccaggtttaataaaatataaaatactcctatatacatgcatgtatgggggcactcgtataatatgtgtaatcattcgatacgttacaaataaatatatgtttatttaggcctaagaatgttagttgaattgatctaccaacagctgcaaccatgtttcaaatcggttcaatatttcttttctttctcttataactttcttattaactacaaaaatattccttaatagcagttcttttacgagtaatctatcttcttttcttgtgtaatatcaaatttattgttcaaccaaaaagaataatttgtacaagagttttaattttaattaaagtggaaagagaaatggatagtgattgctattatgaaaaatctttctaggaggcaacatgtcacatctttgttgttgttgatataatcaaataatagaaaaggtaatcacatctttgtccttttgtaccagaattttagacattagtttagctatgcaaaccaatttcgttcttttagctccaaactaaagacacattttcattgatgcattcttcgatatcgaattgatttgtttatcaaaagtttatgaaaatcatttatattgctatattgtatttaagcttcgagtaaagagatattttaccaactaggcttcctattaaaaaaattccaaatctatcacataatacacagtttctatgcaatgaggatgatgcgatatacatcacatgactcgcctcacacgatgtctttcgccgtagactacagatttcttccgtttaatcttttatccaattatgaattatctggtagggtactttatattttgaaaatctctttcgtgagaatatgatagtaattgtatactttcttacaaaatttattgagaagcgtactttatatatgatgtttctcactcgaattaaatacgttagtttaatgggtcgattcagatttataatagatttaaatatttcgaagaaaacgcaaatcagggattttggttgtatcatgtgtgagagattgaatttctccagaagcactcattaaatcgcgtgtgtaaggagttgccatacagcgtcgtatgtaatgtcttagtcactgttctagaattaaaacatatgtcaaatgtagaattaaaaaacaggggttaaaatgttaaattattcggagaagtggaattattatattaaaaacattgtgtgattttgggataaaatctgaatcatgttttttattgtgccaaaaaatttctgtttcaacctcttcgtggagatgaaagaaaagtcaatcgggaatgagacttcttgtataacgaatgaaaatatgaacatgttgattaatgaattaattaacatacgtactatattaagtgggaatattaggtataggccttcgattttccgttttgtttggttttttcgattttaataatatttctctaaattaaaataaattttagtttggtttatttaaaatattaataaaataatataaataactatctaattaatatattaaaaagtattttctatatatattgatataaatattattcccatgttttatattgggtgacgttatcttttaagtaaagttgtaagatatctaacttattcctacattataataactatcaaaataaaataactaattgtagtgacaatgatgactatcaaaatatgtatgtgttttggctcaaacatagcgtttaataacaaacacaatggacaattttaataaatttgatcgattagattttgtttcattttcatgcactagattaaggttcgaattagattcattttagtgtatatagtgaaactaatttgttactatatggaaaaaaaaataagtttatttttggttcaagaatttttattcggtacggtttggtgtgtatgtccaaccctgaaaaaaaaacttgaaaaactaataacctaataacaactaattttcttagaaatacaaattggacttgaatacaaaaatggaaagaacaacaacaaatcaataactaaaacatcgttgaacttgcatctgccaaataaaaatcaataaatcccattattctaaaaagatagtaggtttagaaaaattgaataaatggaaaaaaaaaattgttaggatctacgaatgagaacaaagttagccttcaaaatacttacaaatcccaataaaagacttcatctccatgtgtatttgagtgtcaacgacaagtctacacaaagggtaagaggtcaacaagaccacacaacacttcttactattagttttgcaaaggccgttcgttggacatttccttctctctcctcccctcttcttcttcttgttcgctctataaactctcatctctcacgtctttttttccttacattctccaaactcaaaatttcatcacattaatttctctctatttttcttttcttacttcaatagtaatggataacactgaccgtcgtcgccgtcgtaagcaacacaaaatcgccctccatgactctgaaggtacctctctattctctatatattttctatttcctaaatccaattttattaaacatcttgaaaataaatttagttcctagctaggatcatattctctttgtatatattcgttaaaacgagggatacgtttaattacttctaaattagttacacctcgtgctgactaaaagacttatcaagattagtttctagttttaacaaaaattaatatctttttaaaaagtttatatttgtctttttttgttagtttaatattgttttgagtttaattggtttaatattgttatttgcagaagtgagcagtatcgaatgggagtttatcaacatgactgaacaagaagaagatctcatctttcgaatgtacagacttgtcggtgataggtaacaatttcttcttcttctactttttctaagattatcccagcataaaataaattttatattttagacatgtctagctaaaacaatttaatatgcaggtatatacaattttacatacgttaatttaagcatatgtactttataacatatgtacagtgtaccatgttgtaggggaagcacatggtgtccactaattttctaaaaaaagacatttaattaaagctatcacgttcattaaattatatatgtacacacatatatatagagataaaaataagaacctaatttactattcttatcagtacgtactcatgtatataaatgcttggctggctcaaaaatggaaatttttgaactgacaaattatattttattatgaaaatataaatgctaatgcttgggataaaaatgtttttttttttcttttgaattaggtgggatttgatagcaggaagagttcctggaagacaaccagaggagatagagagatattggataatgagaaacagtgaaggctttgctgataaacgacgccagcttcactcatcttcccacaaacataccaagcctcaccgtcctcgcttttctatctatccttcctagtgtttttgtttttaagccaacgaaaaaagaaaataaaaaaattataatagatgtatagtagtggttcttgttagtttgaagaattcatcatctattgttttctttttgttgttatttcatttataatttttatagtataggtttcatttggtaatcaactttaatccatgcggttaggtttttttattttctcgtctacgacttttatatccacaactagattttaatccgcggtatatcgcggtataatttactttttaaagttaatatatattaaaacttgcaaattttatttttataaaatatttttattttacagtttataattgttattaagtaacgctatacaacgaatccatgagacaattgttaaaaaactgaagttttaacccttactaaaacagcatattaataatattttaaaaatttataaatattgattcaaatacatccaccatataactcaattccaaaataaaatctgttctgtaatttctttacccatcccgtgatttatttttaaagtagtaattttaaaaatttgagaattatttattacatataaaagttttacaaattgtatcattctctaatacatttatattttatagtttaattttatatatagtaacattttatattttatattctctaatatattttatattctctaatacatcagtaattagaaagtaaaaaaaattgtgtattagatttagtcctttgaaagaacttatcaagaggaaactgatcatttgtgcaaaaatggttgggtaatattttaactaatgacaataattttaaatagtaaaaaaaaaaaaagaaatactccattagttatagttgactagtatattttgaagaaactacttaaaaaaattattacagaattaatgacataatgtatctatactttaaaaaaaatgtaactaaaataaaaaccccgatccaattctaaccaaaagttatgaacacttattttcacaatcacttaaatattaggtgttacatgcttgcactagctatatatatgtaggactatgaagtatgaagtatgaacttaatttttctataaacgttttaagaaataaagaatctatatatagtattgcctttcatacaaaaaattatcagtttgaaaactttctaccaacacgataaaaagtactatatgagatcatcctaaacgtctatttaaaaaacgtgattctcattggtaaacgactaatgaacggacggtttgcgtctaaaactaacttttcatggacaggatttaacggatagaattttccattatatgattttcatgattacgaaccaaacgattcaattcttcagctatatgtcgtttcacataaactcacaaatcacaatcttagttaaagcttttaggcccaatagtgtcccaattattttagcccattatttaacaaggtacgacagattatcaacgtcactcgaccaatacaagtaaaggtaaaactatgggccgataaaaaatgcccaatttcagtttttacagcccagttgtaagttcaccagtagtggatacactgcgttaggactatccatttcagagaatgtattgataattcggatatctacaaagtgacggaaaaaaaaaaaaaatcggatatctacaaactacaatttgaatagctagggatattcaccaccatcagttttggggtttggttgatctctaaaccagccacacgaagtttcacagtcaaaagttttaaacccaacaatatgttgatgttgaacatggatgattcgatgttgcatctaaatgttgagattggatgcaacatctacaaaaaaatatgagcatggctataattttattat

SEQ ID NO: 889 - DNA, 73428 bp, Arabidopsis thaliana
aagcttagtttgtgtaaaatccgaatttattgtggtttaagttgcatattccaaattagtttgtgcacagacttgccttgcatagttgcataacaacaattaaacattttctcacatcccaaacatgatgtaaaatatgattctactgataaaatgtgaaacgagacatttaaattagttcttacacaaatatatatatatatacaatataaatgtgtatatatttacataattctttttttgagacaaaataatccatactttcacccaaaaagaacatcttttaagagtttataaaaggtacaatcattttagtttttttttttttttaacatccactcttttgattttcagaacatttgctgcggcatgtagaatcattctttctatttacaaaaaaatatatcccttaacattttgtgttgcaagaagaatattattcatgagatcactcatacactattgttcattcatatgcaattacagctacaatgcttgatgtaatgacagaaataaaattacatggtaggagtacgtctaaattctaaaatttaaaagaaagtaaacatgacgatggctgttatgaagctgataatctttaaaactcacttatacctatattagttataattaatcaatatttgattaaaactttagataacaattttatttttttaaactccatatctttgcagaaaactgaaaagataattaaagggatactaaggagagaaagtgagtacgtactgctctctcgttaaggtttatacgaagctatattaaatccttctttactagcagaatgtttgctgaatttgttgagccagttcttctgcacttagttggcactcaattccaatctatcaaaagaaaaaaagatagagaagtatacattgataattgttctttaacaaaaaaaaaaaagatgatatgaaaaaaaatataatttatacaaaaataagtgttttcaattaatttcattctgagtagctctatatttctcgaggcactaaactcccaacgaaaaagaaacaaatttaactattattaaaaaaaaaaaagatctgttctcgtctcaacataatcacctattctaaggaacttaattaccaaatatctatacttgcgagacatagttaatagtatccctacttgatctctgatcttgtttttttcgataatcaaatcatcaatactaaaacatccattgtagaaattcttcattgaacaaatttaagtacttatcaaaaatagaaactaagtcttgacacttataaacttcagcagcttgatctatttgaataatttccaaatatatagaataattcctttcgaatttaaaattgaagattttgggggctcttcaatgttcacgtataatttatataatatttaaacacgtgttctttcacaccgttttttttaagaaagtcaaatgtataaattagagaagagttttagtaaaagtagtataaaacaacgaacagtttagttttgtatgtttgtgaggaatctgacatacacataccctacgttttatataatgatatatatatctatctatatatatataatgtagattagaatcatacattaaatttcatatatatcgaaagtgtgtatgagtttatgtgaatctcaatgaattattacttattacactaccctacccatttcttcccccaccatatatcctatgtaagaaaataaatgtatgaattacacttatgaatagagacaaaaaaaacaagtcagtgaaaattaattaggatgattattcgtacgtaccttgatggtgaaagaattaagcatggtttcgtcgacggtgttaatattaacctgaagaatctcaagagccaaatcttcaagagcagcaattatcttcataacttgtcccgggatcttatgcgacaccgttttgagcagcacgttagctcctgaaaacttcacttccacatcagccaaagccgattttgagttagcaacaagctcattgatcacactactctcatggttactactaactgaaggagatgaagaagatgaagcaggagagtatggaggtggatctcctaagctgctgcaactggccaatgagctgtaagagcgaagcggaggctgtgggatgagtggtagttgcggtggaatggcccggtatgggcttgttggctgaggtgttcgaggacttatgggagggagaagtaggtggtggtgaatctggtggtggttgatgcgcgggctaagaggcggttttcttgggcttagaacaggcggtgaaggacgagggctcgggacaactctcgggcttaggacttcggcgtaggttttacgttgtttcttggcttccaaagattggagaacttgttgtaactcgcttatgtactccacaactcctcctatgatcgatgcttggtccccctttttttaataggttggtttaagaggaaataaagaaaatataagtcaatatgaacattctatatatctcattgtgacatgaaagaaagaaaagaaaaagagatgattagtgggaccaaaatgtcattataattgtcattattcctaaaaaaacatagatatgcatgatacttttgatgttactaagaaatgatatatgaatatgatagttaggtataccaaaaagattagttgaacgaatagtattaattagtcgggcactaccagaaactcacatactgactagtaaaatctatggatgtattgaatatacccgtttgacgtagaaacaaggcataagagaacgcaaaacggttaagtgctcgttcatttgctttctccggttacgttccacggttacatgagacatcttttgttgcccatcttgcttattatcttcttctgcttctccgtctccgtcttcttcttcttcgtcctcttctttcctggtttctagtctttgctttttcctcttaggagatgagttttcataatcttgatccttaactaactccttggaacttgtggttccatctttaggtgtagatgcagctgtcggagatatctctccggcaccttcaagactctctaagatggcaaatagatcatctccggctagtgaagtgtcgacaaattcacactcttcaagaaaatccggtattatctcctgcatcgtgattagagatatatccttctctctctctcttcctcgttcgttgttttgtcttatggttggattttttttttaaacagcaaaataaaagaaagatttagggaaagaaagagacgccaaaagacatatcaagttgagaaagagaaataaagagagtgaatgccaaaaggagtaaatatgagggactcgcattcatcgaggactaaactatcgctatcaaatttcaatttttattattatattttgatagggttatttattatgcggtttgtgccgttggatgaaatttgggggaggatctaggtttttcgtgtctcatttatgttttagatataaatatgcatctacatatatatatatggtacgtcttattgtatactttatattacagagataaaggttgcatattgcaaagggaaagatacataaattccttaggaaaagatttttatgggggtaaaattttgaataatcacaagctcggtataattgttttttgtacacacaaacatgtaatacacataaacacggacatgtacgttctttgtatttaatttacgtatatgttcgggttgcgaatatggtccgaccaatcccggtttccaagtatatatatatacaaaaaaacaaacaaaaaaaaaacatttgaaattagtgagttcacatttattttagcgcctcaatcgtgagacaatcaattgaatgatgtgttgtacattcacattatagatcattcattattcaaaaaataaaaagatacatatttagagactttttatgattgatagaccaatttcagacatgttatcgccagtcgatttaaaaatacagattttcacttaaagcatatactttggcctttgtttatgtcatggtgtaatctaaccaacatttaagcccaaaaagaagaacaaaattcgattccacaattctgaaagaaaatccgttccttcttctttcccgagccatacatacaatttaattaattcaatttagtaatgttagttcagttcaactggatccctaacatatttcataaacacctgatgagatggcataagaattcaatttcttataaaaccaacccaaaatagaatatgaatttagcaatattagtaagcattattaataagatgggatataatgtgtatatatatatatatatatcacctcttttgtaagttaatctttatattgatacagggagcaaacgaatttgttttcaagaaaacaaaagacaagggatagatctaaggcaataaatagttgatgtcatactagacgtgcctcattttgtctcatcaaaatcaaattgcatcttgaggagccacccttcatttgaactttccctttcaaaagtttttgaaatatttgtacataaatataaatattgcttgacattttcttttttgataatccattcaaatgttttagaaaataaacgaaaatttaagaagatggagccaagacaaaccaggtagtcgttaggtttgaagttaatgagttggctgtcagatattatttacctgaccatgtctttttagtaacgggtctcttctcctttatgctttgtttctagcccaaattaatgaaacatcagcaattagaaaaaactatgtttttcttaatgcaatgcttatataatgatgaaaattacttttaattacatgttcttatgtgacacattccaaactgatcttcttcttttttgtcaaacaccaaactgatcttaaaacaaaatagattttaagaatcccaattcaattttcgattttaaccaacccggacaaacttattacactgtacaaaataaacaagatatttgtcagtgattttgatttagcggacatagtaatgtaactaaagtttaattattcatgcatgcaggatattaatttgatatgactcggatccaaggtattattcaatttcatatatatacggatatatagatacccttttatggagactatgacatgttttcaattttcgtacagttttgtcttgctctatttatttcgcaaatcaaaatctacatttctataacactgttgcccgttacattactacaacaacaaaaaagagattgacataaattcattttatttatatgacataacaaaacgttgattatattcttcctgcagtctcgattaagaagtcgtgtcatgagttggttccgatgattactaatcaaaaacaaacaaacaaaaactcgacagactaaaagaatgaatatatgactactctgaaatttattgcctttttataataacaataataattgacttttgaagcaattattcagagaaaaaaactgagaatgagaaagttgcaagttgcgcagaaatcaaaatctgcaagttgagcagaaagatcagtacttcggaaacaaatataataaagatggtgggcggctttcaatgaccggacacgccttctccgtgcccgagattctacaattcttcattcatccacatgcatcatgtatatgtatgtgaaatcatggatgcatgtatgatggagtataagcatatatatacacaacatctccttatcgcagtgatgatcttgtttcggttttggttttgtaaaacgtttataggatatactttcaaatttatttttaaattatagttggatattttagttggggattctagatggtcacggtggtgaagttatgaactattagcatgtactgatgtacatatatccgattatcgtgagaccacgacatgcttttgacagatgaatctctttttaaacgtagcaccaactcaagctcggttcctaagatttaaatcctgtgtagatctcaatatggcttccaaaattactcgcactcgatttttggatcacacaatttatagtacttccttctattttgattcatagttgttttttctaggaacatatagattaagaaataacataaattatacttcttttgttttgatgtataagatgctttagataaaaatggagatcaagaaatgacataaattttagatttttgttacattaaaaactatataatatataagtaaaagtaatttaatcaataataaaatactttgcacaatacaaatgatcataacacatcaagttaaataaagttttacattattttttatttgttgatttctaaaacattttataaaatggaataatttaagctctctttctctctttttttctatgtaatctaggcatctagctatcatcaaacccaataagtggtcgcagtagaatagaatttaaattccatatggtcgagaattaagatttctgttagtgtgatcgtcgtcacttactcattcgataattcattgaagagatacaaattaggagataagtttgaggttttgctaaaagtaatacactgttttttatatacaagaaagaagctaaacacttccgtttcgcgtaaacaatttttttccttctcttttgttagcaaggatgtaacggtctttggcaatgtagtctttctagatatatccaacactaccaaattcagatttttttttttactcttgaaaaacttaataaaattttatcgccgtaaattattcattctccaatgtagcactagactcgaattaattaacgtctcgtagcactcaaataacacttcttatttttcgattaatcaagcttgggttaaaaatagcaaacacatatagcgcatcaaataacacatatatcgggtaaagtcaattttataaatccttacaaaactttctcattccctgatgaaatttacattcatatagaaaataataattataacacaatatgagcgttcgttatcacctgttaagtctatcatctatatatgaacgcataagaacattacgtagatcacaacatttacaattttgcatgtgtgcagctgtttgtatggggacgattcacgtagttgtgaattttgacaataggagtcgcattggggaccgaaacacagtatgccctaaatggctaaatgctacacctacatcctacgatcgattcagagaaggaaaaagaagcaaaaccctaaaattatagctttgaactaaaatcagctctaaaaccctaggctccgatcgggcattaaatggttctttgatatatatatacattaagggctcgcgttgataagagatatataaatataataatgaaaaaccctaaagataagcaaatgatagtagtatatactatatacacacaaatatatgcagttgaaccaactaccaacttgtgttagtgtgaagaaatatcgagaaaagaatacaaactttcaaaattgtaagttggatttcgtcgccaaccattattcattttttccatttaaaattgaaaaaaatatatttatatattaatattacacatttgtctccttctatgtgcttttattacatttgcatgacaaaaatttaatttccttaatttctgcctgcaccctacctacgtattacatccctacacgtctctcgcctctgtaattcggcagtcactactcactagctaggacacgactatatggtgttgcatataactatttgtatatcactctctgttaacatattcacggtgaaatgtgaacatatacataaattggcaaaggtatggtgttgcatataactatttgtatatcactctctgttaacatattcactctttgaatgataacatttgtatttctgtttgtttatttgggtaaaaattaaaatcgattatagtagaaacaaaattgtagaagtagctgaagaggtgaatgagttgggtcctactcaaactttaatcactacgaagatctgaaatatcatttactctcaccacgaaatacatgagcgacgctttattgctctctctctctctcatcgcactgtgccttattgcatgattacaagtttatgagtttcatcatctatgcatggacaaatatcgtaggtaataattatgtctgtaatacgaatgagtttccttaaaaacgacttagctcataattgttttcttttccgatcacagtcattgatactaatagaacaatttttttatctttaaaaaaaacaaaaataaaaaaataactaatttcatagatattgagtttcacaaaagtagtacgtaggagaggcttggagagcttctaatcggaaactaacatatagaggaaagctaaggaacaaaaaaaaaaaaattccatcagaaagaccaattacgtacttattgaggatcattgaaagtctagaacattaaacatgttgtagatttcaatcaataatttagatatatgaataattccttgccaaaaatagacaaataatgattagttatgttaagtaacctagctaacattcttaatcatttgcaacaaacggagctataactaataatccaattagtacatgatacaaatgccatgcatgttttagatcaaacaagatatcctcttcggagtcgaacagttgattttcaagtgtcgtgttgtcttatattaattggaccagtgtttaaaatttgtaagaagtattaatgagttcagagacgacagtccatatctaaaacatttcataaaggctgcgtaccgttttatgtgaccacagattaaagagcaagaaataatactctttcattcatggcatggatggatttgttaaatcagtattgatcattagttcattgctcctaaatagggttattcttagataattttggtgaattaataaagattgctaaatttggagaataaatggcttcccgcaaataagtggggacccataatacatttgattgcaaattagattcgaagagcccacaagtgaatgcgatgtccccatcttcttctactaaaaacataatgagtggttatggttatgcacctttttgtgatgtggtgcatgcatcttcaatttgttttactctcctagtagaaaaattaacttaaacttgaatgcttcgaattgataatttaaaaaaaaaaaaatctcgtgcaagtattaactagccaaaatgaatatgttagctatttgtaaatattttatctttataaccgagttgttattaagtctcatattccaaagtatttataaattgtagtgttagaatttttttccaatatacaacattatggtgaattgattccactttactaaaaaaaaattccattcgcatcgacgacattagcacaaaacattaaattacacattctattcgaatcgatgtatcatattgtagtgagtaaatatgaacattttattgtaaaagtcttgaattcaaacctcggccttgtttgttttaaataacatatttttactctctttttcatagaatgaatataaattttactcagtgatcttaattcaaaacattcggaggttagaaatccatttcaactagatagatagatattgcattaaatattaatgtgagccacaattgtaatgttatcatgaaaaaatggatccattgctgaatttaaacgtaaaggtatcgagaaatttacgagatttgacttgtccaagttaccaaaacaagtaaatttttgttactttttccctctctaatggtgcaacaaaagaggtaacgaaaccttgtcagattataaaaacttctgctgaaattagccccagagggcagaaggtaaaaaaagaacaatcaatttttaactttgaatagacaaatgcgagaataattaagtgaatcaaagagaacaatcttataataactaagcttcaagaatgtctgctttgagttcaaaatgtggacctcttgtccttgtttccatttaaactctctgtactaccaagagtatttccataaactaaaacatagagcatccaatggctcgaacatgggccgaaaaaaattaccttgtggcccataagtgagcccacttagatgcttctatcaacagaggagacatgcgtgacgtttaatcatatccaaaacaaaacggcatgtagtgcggattaacaaatcgtcaacgtggcagatctaaacacgcttccacacgtgacactgcctcgtgtttattaggatttgtgaacagttgtcagttacttgttccacagaagaaattggaaagtgttctcttttttctccttctccgattagtcagagtctcgtctcgcgtttactacggtttggataaagaatgttgcgatcaattcttgatttttctgttttcttctgaattcggtaacagcaaattccaaattttgaggtacggtttaagtttttctagtttggtttttgtattttaggagacttgttgaaattctagggtttaaattgttttaagaagaggaatttttggttatggaggtgaattcgatgggactaaattgtcggtgtcttgagttagaagaaagggttttaaaaggtgaagaaaggtacactcacttagaaacagagttgcagaaacgaaacaatgagtttgaatcacttgaattgaagtttaaagaattggaatcagagaagttagtagttgaagaagagtcaaggaatcttaaagaatctgaggaaggtgcattgattgagcagatgatggtgaacagagcattggaggttgagaagcagaggattggaaaataaagtttgagaaacttgtggagactgttcgaaagttagatgaaattggtgggtttagatatggagaatttgaattggatgagaatgtgaagttagggttggagttagctaggatcaagaatacagaatcttgtaaagtgtttaaagatgacttgactagggaaggattaggttatcatcaaggattaggtgagaagaatcgtagatcggtttattagtataaatccgcttgtgtttcgcttttccggtgtaatggatttgattttgtttgtgtttattttgtcatgtaggctcaccttgtatgaccacaccggttaaagactatatattagggagagacagagatagagacagagacaccatgtcttctcggagacgagtgaataagatgttgtcgtttgaagatgatggtcacaaattgactgatgtagttgatttatgtgatagtgaaacagagcagagaagtgaggaggaggaatttgctgatgttatggatactatagaggaggcaaatattggtgagaattatgaagatgaagatgtggaagcttgtgatgctaacacaagtagtcctctttctaggcgtaagaggaagcgggttattgccagcgatgatgatgatgatgctgatgatgatgatgaagataatataccgatttcaatactcaagaatttgaaaccaactaaccaagagatgtcagatttgtttgatacacctaacaaaggagagagtgagtctagaagattgagtggacaacgtcgagtgtcgtcaagactgaataaaaagagagtttctgaagaggtatctgcttcaacagagagacttgtgggaatcccaacaaccgataatgccgaggatgatgagacagaagaagaaggttcagagagtgagggtgagagtttagatgggtttattatcgatgatgatgatagtcaggagtctgtcagtgaaaagtctgatgaaatcggggtagaggaatccgatggagaagttggttatgctgatgttatgtcaaggttaaggagggagaagaaacccgagaagcgtaaatgggagtatgaggcagatatgttggcagatttcggtaaagatcctgagctttgtatgagagcggtttgtgttctgtttaggtttcaaacagaagatgaaaaagtggaaagatcaagtcatgtctctaatggtcgcggtttcagcaaggttgacgctgtaaggtagtaactagcaaaaccctttttgatctgctgttaaaatgttttcttgatttacgttcttgaatgatgattaggggcactagcattgcactgtttctgacggatggagattccgcaggcgatatgaagaaatccgttgaggaattgaaagtttttgactttaaaggcgtagagaaatgcgaagaattagcacgcaaatactctaaacaactcttccagatctataacaacagagaagatccattctttactcttcctccatctccatgacttggagaattagctagtagtcaacagctagtttatggttatgttttttttttttttttgtggtaaattttagtcccgtttgagatgaaaaccagagattaatctaataggattagagtctaaatttactttttaggtgtaaatggaaggatgatttggattatgatgatgactgaaacatagttttgaataatatttactgaaattatgatctttaagcttagcttctgattacttgaatgtctttcacaccatgtcttaagttttctctgttcgttaacgttttagatatatccttatgtcgagatttgtatccctggttcaagctaagctactattatcaatcaagctgtgtttacctcaaaagatgttgttgaaatgatccccaaggttacagcttctgataattccttgaatgttatccaaacctttctagttatgactgaaaataaattttcgtgtaaattaaaattagataaattatcaggagacaagtccacacgtcttccttctttttaggtttaggatgtcgaaaacactctcttgtaaacaaacaacagttttatcggatcaaaatttcgtcagattctagtaatagtggttctctttatcataccaattaccaacagtacaacctcaagaagtagggtatagtggggaaccgaccccaccaagggacttatggaaaataagttatgtaaaaattaccataatttggaaacttggtgggcaagacagagcaattcatatatactagtattaatggaggtgatgtgaacattaccaatttctcaattagggtttttttctttctttcaaatctctttgattctcgctaaagaacatctttcttattcaatcatgtctctgcttctcaaccagcactggaagctatgcttccggaaaccagtgttggcgagatcctctcctcttcactctaatggcctctctttttcctcgttgcaaactcctccttgtttcatcgtcgacgctgaaccttgtggagcgggtctcggaaaactcaagattgttagtgctggtgattttcgcctcacacagttggagaagaaggtgcctctcgagttaatgacgggaatggaaaatattgggtcatccaatgggtgggtagctactttgaaagacgatgtagtccgtctccaagatgatctaaacccgtttgcatctgcttcagacccgaaacgaatctcgctacctcctcttgtaactctgccgctttgccaaacccaaattgtcatcaacgtggctatgtcctcatcttctcctgaggatgacgactgtgttgtggctgtcaaattctttggacgtcagctcagctttttcagaaccaacactcatgagtggatcaacgtcaagatggaagacccctgcttcttctcctctcgagtctttttctccaagaaagatgataagttttacatacctggaggccacctcattggatcatgggatctccgaacagacaagccaacagcacctaagattcacaagttgcggttccgaaaccttcctaagctgaccaagaccaaacgaaagcttatggattcttgctacaaaagagaagacttggtggagtcaacaaccacaggggaaacgttcttggttaagtggtacaagaagatcgtcggcaaggttatcaaaggtagggccacaataaaaacaaaagctataatggtcttcaagctagacgaagaaggaaacgctgtttacactcaagacatcggagatctcttcattttcatctcagaagctcaacctacttgtgttcctgctagttccgttcccggcctactgcctaacttcgtcctattctatgatgtcaacgaattcggaagtgcctatcttgctgattcctccgtctctagtgaaatttcaacattccccgttccctatcatattccaccacaaaatatagtctagcagtttgaaattgaggttttagtcttttctcttaaagctttcaagcagaaaaatctatttatagaatctctgtaagattgatatgcatctgcactctgggataagatttgtgctatcatctttcttccaactaatttatgttttaaactatatcaagttaggagcaatccattcacctaaggaactgctcaaactataacttctttctgtaggctatacagatgttagtttctagaattatactttgtaaaaatcatgcaattttctctgttataatttgtatgtttttgttatttaaaccaagagatgggtatttagagactagtctaggcttctcgatctaaagtatcctttggttatacaaatgtttgtgtgttattaataactctaaccagtaaccatatgttgttgttttacagagcactcaaagagtagtatattcctttttatttttagctcatcttgtagaatatacagcaaacaaaagagtatattccatttgaattgttgcaaattgtggaagctatatattagtggaatggattactcggaggttgaagtagaactactggcaactaactaatgagtttatgaaattacaaaatgtgtggttggaggtttggtttatcttagaccaaacagatcggtcgtttaattagtcagatcgattctaagacggtctaacatcacaagttcaaatatagcttgcattattacgtctacatgttgaaatagcttgcatttgtctatgtcatagttcacaacttttgtttaatgttatgtcttaattaatcgttccttcatgtctctctgatgatggcagttctatctgatagaatatggaacatacatatataaaaacaaagcaaagcctccctctgtattcatggtgattcgacccttaggtctttttatttatacagatatttgtatcatcctcttcatgtagatacatgaataagattactcacaactgttgacagaacaagatcaacttgaagtccccaggtaaaactggtcaaatatatctcttaaacttggaaaacttttacctgtccatcaaactttaataatactagatagtttgtgatagccatataagcaaacattacatcacccattagttcaaatgtatacctcccctgactgtacctaaaatgtctactagattattgttagatttcagttacaaaaaagagaaaattttcgtagaacatagtgaaatggctgagttccatcgttaaagcgaactgccactattctggtctagatcatagtgtactttttgtgcttgtaaattgtaaaaataaaattgggcagcttctccatcacgggttttcgagtatatttattagtcgaaagaaattgcatattcgattttgagcagaaaataatattttagctttaaaaggaatggaaaaaaggcaagttggaagagttatggaaaagaaaagaaaaattaccataatttggaaacttggtgggcaagacagatcatcagtttttaatagagacatgtgaaccctcatcaactcatcaattagggttttctgtacaatctcttagatttttgctaaagaacatctttcttattcacccgagacatgtctctgcttctcaaccagccctcgaagctatgctttcggagacctgtgttggcgagatcctctcctcttcactctaatggcttctcttcttcctcgttgcaaacccctcctagtatgatggcgctcaaacgtacctattttgctgattacgctcatcattttgaaaaaaaggtgcctcccgagttggtgtataatgatattaaagatgatgatgacattggaacgatcgggtcttcgcatggttgggtagttactttaaaagacgacggaattctacgtctccaagacgatctaaacccggttgcgtcagagacagatcccaaacgcatctcgctgccccctcttgtgactctgcctcattgccaaacccaaattgtcaccaacgtggccatgtcctcctcttctcctgaggatgacgaatgtgttgtggctgtcaagttcttggggcctcaactcagattttgcagacccgctcttaaaaacccagagtggaccaacatcagaatccaaaacccctgtttcttctcctctcgggtaatgttttccgagacacatgacatgtttcgcatacccggttctggaggacacctcattggatcatggggtctccacacaccacccaagattgacaagttgcgatttcaaaaccttcccaagctgacaaagaccaagcggaagcttttgcattcgtgcttcacgagcgaacacttggtagagtcacgatccacgggagaaactttcttagttaagtggtacaggagaacccccgccaagcccatcaagggtatggcgacgatgataacaaaagctcttcatgtgttcaagctagacaaaaaaggaaacgctgtctacactcaagacatcggagatctctgcattttcctctcaaagtctgaacctttctgtgttcctgctagctcctttcctcagggcctgcactctctccaggccatgcgctctaaccacgtctacatattggacgtcgacgaattcggacttgtcgagctggttgattcttccatagctagcgtgaattgcacattgaaggtccctttttatattccacctcaaaatataaactagtattaagtttggaattgaggtctgtcttttctcttaaacctttcaaatatcaaatctacttttatatatcttgtaagtgaaggaaattatattttagcaaacatatctaagatattcacatcacttatagcactgtctctttgctgctatatcatagcttagttctttctcttatagcactgtctctagctgctagactcattggctttagtttttgctgaaataaactcgtatttttagaataaatgatttgtcgagaccacaacatcacgaccaagcaatgtgacaatagggtcttgtggtgcatttaggttcagggcatatgttcttatccccagctgctatatacattctgaaatacattgatatcaacacaattggccactaacaatagggtcttcgcagataaacaagaaacgcaaaagagtagagatagtaagaacaagaccttagaactagagaatagtgagcctaaggacatgtcaattagtcttcacttacatggcagatgatgacttgagcaggctgattcgaggttcttctctttttttattgcaaactctaaattgtagaaattaaaaacacaaaacggggccagagtctttgttaatggagtgtttttagtgaatgtttagttcggtttagctctaaaccaagttattacaactctcataatgaaattagggacggatacaatgatcatccagaaaaaggaaaattgcaaaaacaggaaagtaaatcaaaaccaggctggagattctcttttctttaatccttctcagacacagcttagaaacagaacataattaaccgtttctctcgttaaaacctctaatttaataataaaatctttaattaatataatgacaacgcaccaaccaactagtgattagagtttgagacagagaggatttgtgtattatggccccacattctctgtgccatgttttactatttaaccaactctttagcttcctctgctcttccatcaatcggtcttttttccttgatttttctggtgagattctacaaaaccaaaagattccttcgccggaataatcaccggagataaagataaaggaatggcgtccctgaaatttccgttggagattctcgccgtcttcgtcatcatctccgtgattcttttgccgattgctcaatctcattcttcttcgccagctcccgcacccaccagcgatggtattaatcttaggataaatctttcattagagccaattttgtttttaaaaccctatcttggaggacaagaaattgatattgatttgttttttttttggcaggaacatcgatagatcaggggatagcgtatgttctaatgatggtggctttggcgttgacttatttcattcattgacgtgatggatccgatctatttgttcttcctccataatggtttgtctttcgtagtgttgtgttacaattcttttctttttgggtttgtgacgtgagatttgtagaaaatcatattaggttttggtcctcatgctttgttctgtttttgttggttgcattattcgtgtacctttttttctttcttgtgtaatggaaaagcgtaattataataattattattcaaggaaaaaaaaagcaccgttatttttgctatcatttggagggcattctctggctgctagttgctgagaccatgtcatgattcatgccgcatttcaccttgagatgaatgtcttcctttgtaaaatcaatttgaggcgattccaaaatcgcaactgccatcgacaatctcctctttgacgaggcctgtctttgaatcactctctcaaacaaggtttaaaataagggttcaagatttaacctcttttggaggaaccaccgaaatttcaccactagatgtatgggctatagtgatgatgaacttagaagtttaaaacatcttgaataaataaacttaaagtatattcacccacttgtttagagtctttagtgattatttatacaacaaaaaccaagaccgttatatgatatatgattttaaataaatagaaagtgatcaaagagacgatggatcgtgattaagtttataagctgcagcgacggattcagcaacacctccaggaataatattattgaaaggagaatgattcagctcagcccgaatcactgcttctgcgtcttcacttgtcacttctctgtccctcgttactttcacatcaatctccgcgataacgtcgccgagatttgtcttctcattatcttttcctattttttggttacgagcaaccgccttacttgctacagcagttacaccaccttcactttctatatcgcctccgatagcccttgtttccacctcttttatggcagccacgtcggtggtttcaactggtttgtggccgacattcatggatgctgctttaagagcctccgttaatgtcgttgacctcccgataagtgcttccgctgcggtggaaatctcttctgttgggcctacaaactttttcaaaacgtttcacatcattcggtattatattgtggtcacaattgttcaaaaccagtatgtgtttttacgtttttcgttatttcatatttgcgttttacgttgcgttaacatgagaaagtgagactacaaaataaaaattcaacataaattttttttgaaagaagtatatcaaacaaaatattaatttcctttgtgttttcaacaccatgcagtgtacggatttaactttacacagccataataattaactacaaagttgggccaagttaatattcacaatctttcttcgtccaagccaactcttgatgatactcattttgaatgtaaaataatccactttaagcgtgtactagaagaaacatcctttcaaaatgatcaaatctaccgccactagtctaccactaccacacgcttgttagttggttattatgcattaaatataaacgtagtacaaagaaagaacccaaaatctatacctgtccaccggggctagactgagagacgctaaagtgctcctccacggagatgttggtgacactagcactatcttttgatgaacccatcgttttagacttcttctttctttgcttccatgttctttttctttccttagtttaaatacgaaaacggaatgtggcgataataacggttccgtacagtttcatttgacacgtaggcttttaacagtgtaacgtgtccatatttagctgcttgtgagacagtgacccttaaatgcatcggcgagactatgtattaaacatttagagtagcgtggtgagtttaagaaatattggaagaaaggacctttcataacccttttatgcaaatttccatatactattctttttttttaaggtatgttgatctcttttaacgacttgcatgtttttgacgtttgtcaaaactcaaaagtaataaaatggagttccatggttggattttgggatttaaatttgttctttaatgattatttatgcaacaaaatcttataggcttccaatgcctatataaggtggatcaaaaactgatctcggtaaaaaagacagtacaaaacttcggttcgaaacttcctactctaaaagaaaacaaaacaaaaaatacaaaaatcacgaccgttattatatacttattgtgataaatatgtaaattgcaattgatatcaaagagatacattgcatggattgcaattaagtttataagctgcagtgacggattcagcaacacctccaggaataatattattgaaaggagaatgattcagctcagcccgaatcactgcttctgcgtcttcacttgtcacttctctatctctcgttactttcacatcaatctccgcgataacgtcgccgagatttgtcttctcattatcttctcctattttttggttacgagcaaccgctttacttgctacagcggttacaccaccatcgctttctatatcacctcctatagccctagcttccacctcttttatggcagccaagtcggtggtttctaccggtttacggccgacatttatcgccgctgctttgagtgcttctgtcaatgtcgttgacctcccgactagcgcttcagccgccgtggaaatttgttctgttgtgcctgcatactgtttcaaaaggccgaacccgaacatcatacgatatcaacatggtcacgtaaaatatttcaagttaaaagtttttttacattttatcaccgcggtagaagttatacaattcctactatgagctagcaatcggtaaaacggtaaattaaagggaacaccaacaaaacggtacaaaatctttaccaatctatgttttaccgcacttgcttacttcttttaactgttctgttatcgtaaacgatttttcttttaatcgtggctaatttttcattttaacctattacctgaccacaagtagtagattgggagaggctaaagtgctcctctacagagatattgtgaaactagcaccatcttttgatgaacccatcgttttagagttctttgatcttctttctctgctttgcattatctaatacactttctgttttgtgtaaattgataaataagtaaacggaagtgccgacaaaaaaaaagaaaaaaaaaaaaaaaaacggaagatgacaatagtaacggttccgtaacaatttacatttgacacgtcggctttcaacagtccacgtgtacaatacttgtctacgtatgccgttatgcgaccgtgactcttcgatgcataagagagaccaattactttttgggcctcagaagcttcgtagagcccaaacattctaccaagctttgagacacgtgcatagtccgtgccagctgtttcttgttttagtatttccgggtcgggtttcacccgtatccggaaatcaaattcatcggagcgcttaatttgagtccacaattaaagtgagaattttcctgaagaagaagaacttttgctttttttctgggtttgcttttttgttgtgtcaatgaaatgggagaaatggagatcgaagaaatcgaagctgttcttgagaaaatctgggatctacatgacaagcttagcgatgagattcacttgatttcgaagtctcactttctcaaatcggttaaaccttcaaatagatcggagaagagaaagaatcctcacggaaattccggcgaagataagcgacctggttatgttttcatcaaaggattcgccgtcgatgataacgactccacgattcaggaggcgaagagtcttaacgcaattcgaaccgctcttgagaaccttgaagaccagctcgagtttttccatgtaagtctcgtgtttctccgattgattttgtggttttcgcttccttgatatgaagcgaaattgggagattagcttgttatctcctttgttttgtgctaatttttgaagattgttaagcaaatccttctactagatgactattcaagtccgaaataggttgtatctgcttctgaagaaagtgactcatgattaagccgatttgaggcaatttagggtaaaaattgattgaggtgtgtttagttagggtttagatttacgaattaggaatttaggttctgaactggatagtaattatcagattcttacgaaaattctgagcaacaattttagacagaaaatcatcatacaatgtagttctgagagcattgtttattgcaaactctttgatcatggaattaaagcagggagaggaatctagattcaggtgttgtatgtgcatgaagaatgatatggtcttatttaagatcagaagaagtagagatagataagcagaatccatttcgcaatacattatagacgcatgtgttttatcattgccatagataatagaccaacgaagaagaatatacaagctattttgcatatacactcattggttctggtcagtcgcatatgtctcgtttactatctgaacctgaaagacaagatgtaaaacttctttctctttgctctgcagactatacatacacagcagcgaacagagaaagatgttgcgattgctcggcttgaacagagcaggatattactagcaatgagattagctgaacaccacggcaagaactatggagtcctagaggaagctcttgcatttgttgggagcattaaatccaactcgcattacgtttcacctgatcacctctacgattcctctcgaaacccagacggagcaaactctattccagatggaatagagtcaaactttgtaatcaacgcctttgcctcgactttcgggtttgccaagagagcacttggattcaaccatgtgaaaggcgtacttggaaacgctgctatatttgccataagcgtggtcgctatgctacatcttcaccaagtggctactagtgaacatcatctgcagaagaaagaagacagattctacagaagccaacaaaggaaaacatacggaagagataagtcttcagctgacagaagtttggatcacttggacgtaatgatggctcgtggttaagaccagagatcgaacttgtctacacgtgagaaaactaaagaagagaagagataattgttgctctcataggtttcgatattatcagcaaaaggataagaatttggaggcaaagtgttggaattttctgagctcgtctgatgcaaatattgttcctttcttctaattttgattttcaaacactgtggttaatgttttgtttgttttgtttggttttgttgatttcaaatgtggttaggctttcttgtaaatcacaagatctctcggctattctttagtagcaactggcaaattcagattgatgaatgtattgggccactatcagcccattcgcaccccagaactatccagccttagtttgctcaatcttaggcccttttacttttgatgacaaatcactctaaaccgtaataatttggtccggaaacaatatacaaaatacagtacgaatactgaagaggtttatcgtctagtttttgttattcaaattgaagaaagataacgttttctcgaaattttatgagttatatgacttgtatacgtagtttaatatcaacttttttttattctttctttgtttctacaaagcctgaatatctataaagtataagggtgtcaaagcgggagagtttgtccggtgtatgtgaattgtgatgtgaacaaagcaaagacaagtgggaggacaagttatcaagatgataaaggggaaactacaatgagtccaaattggtagaatgaaggaaacatgaatgtgaatattacaaaatacttttccttaagatctgttttgtctctctttttcttttgcttttgtacacatagctttttctctacacactcttaacgttataaatggcttcttctttttcttctatctttgtgtgctgtcttctttatttttattgtgtaaacatatgtttttcaatgtgattagacatatataaatactataacttacggattgtgttagcattttgtaggacccggttcgcattttgggaaatgtcagcccgccgaccccggttttcctccgtaaataggtcaacccaatgttttttctctgtctacaatggctaagaccgcaaacaaaatactttttcacatttcgattatgattgattgataatgctacataatattacaaaatacatgataaaataaatctataggtcataacttcgaaatcaatacaaatgaggaaactcaacttacgattttaaaagaacttttgtcacttcacaaatatggtttcatatgagaatttgctagtagcttttctttctctccttgttttacgataggaaactgaaaactatttttttctagtgaaactatttttagtcaagcaagaaatagtaatgataaccaaagtcatacttgtaaacccacaacgtaatcatatattgtgttttatcttttttaatccttctgttttaactgcttcaagaagataagcaaatgatcgctcgtggtagtttaataaatggggataatggaaaatattataattagatattcattatcgaatgttgattatagattaaaaagaaaaggttggaccaaataataattatgaaatagcgaaggtgctccataatgatgcgacaaaaagctgatgttaacgggtagaaagtgttttgccaccttctaaataattattaacagatgggtcacataatttattatttcatatctttcttcttttataagatttttagtatgaatagcaacagtacgtgaatctttacgcagaccaccaactagtatttgattcatcttagcggttaaatgtcatcagcctatagcttcattctctaattatccaataaattatgaatgctaatattttcattaaattaattcattttcatttcgcagtttttacaatcctacttaccacaacgtttcacttatacaacgttttaatttattctcaagtccgcgattttcattttcggtcgagatttgatccacaacttgattttttcttccaaaatttcaagtagagataagatcatagtggtttcaaatttgtactattacgtaaacatttaaagtaacaatctctatgaatcatcagatgccttttaagcattggacagctataatttgatcccatactccgaccaacaaatttaaaccattaaaggttttttttggtcttcatttgacgaaaaaacaaaaagcttcacgccacgtctcgctataataacgaacctaaatactgacgtggatggttaaataggacacgtggttctgcacagatgggctttttaaattactaagaatcatgtgattgtccactataaaatgcagggcccataaccacatcacgtgaccttgtactctcgttgtctctcaacattcttctttcttctcttctttttttctttcttacaagaattaagaaaaaacttagtttaattaaatatctaaatttttacgtaaacattctaaataatttaaaattcgataataatgttagttcaaaggttaagttttaaattccaaattttaatttcaaactctaaaaattatctctataatgatatcgtgatttttgaagagtttattagttaaatgaagctctcatcattctcaatttcactgttcaggattttacagactgaaatataaaccatatgaaaatgagattattcgaaaacgcgaacatattactttgacaatattctcctgtgggtttggtttcaacattttggctagtatatggtttagctttatttttatatctacctacttttttcttgtatttttaagatcacaaatattttttactgaaggcgtatgagtaaaatttttatcagattctaatggcttgtgtagttcttagccgaatctatgaaatattaattttagtgtggattcggtcccatgcattgacaaaaaaaaaatctagacatggtgtgactacttaataatcagaaatcgtgtgatttggttcatgggttagacaatctctcacggctcagagcacgccacgtgacactataacattcacaccagctgctttgattagtcaacgaacgttaattctcttcctgtgactataatgtgattattctatttagtatttacgacctttatacatattttaccgacaaaagaaaatatatagcatgactctacaaagatatacaaatctcaataaggtaagacaaatttcagaaggaagatcttgagcaacagaaatttttcagatacgaagttatgataaaaggagaaaatatagataggggaccaaaatacagcttcaaaatgaattgcggctaaaaatttacccacttggggaaaagaaacctaaggccttatattattgtgattcttcattaaagttgcagtatctgccaaaagaaccaaacacagtagtacattgcatatgttcatacttcacgtacctatatatagtcattatagcctgttagttcgttataaccaattaaatcgttgggatttaaattcgtgtggaaaatatagtataatttttcgaccgttgaaatatatggaaaaaacgacatgcaaaatgcatgtggaaaggtgcaaactttttcgttagaccaattaaattagtgtgatttccaatgcacatgaagactaaattgcggctctactcaatttggacagaagcaaaataacatttgaatacattacatagattttgttagtttccgttcataaaaatcttcagcttttacttgttaaaccaaactagtatataaatatattttcattttcattaattgccaacccaaaagtatattaataccgcaattactgtgtaatataagccattatatgctttctttattccacatttatatgttagtgtggaatgtttgttctttgtagactagaaatttgtgttcaatttagtatagtttgaaatgtgtgtggacaaagaaaattgtatcagtttaatatgatatgatatttagtaaagttatgttaaaagttgtggtaactaaaaaaacggtaaaagactagacaaaagacaattatcacattctagctagattcatataaacaagtgcctgtgtttttatttgtttatttggaattgacatcaatacataggtgtgtatacatgaaaatatataattgtaaatcatgcatgagcggtgctaattaaaaagttagatggtcgatgtgtatattgtctatttctggtggagctatgcgggaaaaacatatatttattacgtatatatgtttgcgtaaatactcttaaaaatacaagaaaatacaagaaaatacattattaaattaaatgtttttggactttgtatggaacttttatgtgacaaaaaatgacaaaaaaatgtgagctcctttgcagcgttatatgagcctacctgagaggccagctcagttgaggcattcacgtttgtcaatgtctctccttgatatcaaagatttgctctatcagagaaaattgactctaatttctaaaaaaaataaaaatggtgattattagttacaatggccaacaacaaaatgatttccaatttaaacaacatatacaatttatacaatgatccttgtttgttggcaaaaattctttagttaccaaaaatattacggtcaaaaaggactctttttgaccaaaatatatacaatttatactatgcttttgtagatacaataatagtatgacgcgattttaaagtatgtaaacaaaattagttgaatataagttcactgttttgttactactcaaaatatattaaaataattgctttttctcaatattaaatgctttcagccttccactgttccacatatatatgaaatgtttcaaagcttataaagtggggtcaatgaggtaggggtctaggtgttgccactcactcatcatgccagcaaataagttcggtttaaagtctttgacccatctctctgttcattagcaagtttcgttagtatgtacttttcttttttcttttggagttgcttcttgcgttttttggacatgtgtatggaattaagtaaccacgggcacacaacggtaagaaatattttattacataaagaagatttaagaactcaaagcttcaaaattcctcaaagtaaaacaaattttcgacatgcctctaagattcaaagtaaatgtaaaagtgaaaaaaataaagaaaaaagttacctcaaagtgtaggaaaatttgttatgaaaagttaatttaaccaacttgccaatggtgactttttcgatactccaaaaaggagaagtgtatatgtatatacatattgaaaatagtacgaaaaagaaaaacaaattgaatgtaacgatcacggactcacgtgagtagagacatcatgatctttagcttccatgttataataatatacatgaattatcactaatttaagatatccttatgaagcatgcatcatacatacaaataaattatgcatgcatgttggatttatatattttatgaatgacaaacacaagcactgaagcacagccataatcactcgattatggatatgttagttttaattcaagattaatggaaataatcatgactgttacctagtataatttcaaacatttttcttttggtaaatatatggatactagccttgtagttaattttaaatttacctagtacacagtttttttttttttgtttctcacagtccttttagaatatttaatccaagttatatatatgataagtgaaatattaagaaaatatatcataaaaatgttcaacacattagtagaaaaacttacaaatttttcggaaaatccatggaccaagaactgaaccgaacaagtatatgacataccaaatcggtcaagagttttgaaagttttgtatgaacaatgcatataaaaaaaatatatatatataagaaatgaatacttgaactaattcttacccaagtatcatggtaatcactaattagttgatgacttaagaataaaatggaatgtattttaataaaagttataaattcttcttgctaacttaattttatggccaaaatacaaactatttaatatcgagatttacgatcaccatgttaataatgtgttatctatctaatctaacacacgaccaacagaacagaaaaaagggacaatagattttataatcaacggcagattatgtaaatctatataatatacatttcatgtgagtaatgatggtgtgatcattcgaaataaaagctttacggatggagcggtgaactcgaatatatttgtcctaaagagatataaaataaaactaaaaaatagtgtaattatgtttttgaataaaataaacgcagcaaagatatacttctatatgtttatgtcatcaaataaaagaacaatatgataactattattggaaaccaaatgaggcgtacgtatgtctctgtctcggccataacagaccaagtggtaaccttattgaaaccctcttgggacaatgtcctttcacgtcacaaaagcgaaggccacatttatcagtattagattatatataggactatacgtatcttgtatgagaaaaataaaatacaaatgtcgatcgtattaaatgtgatatggaatttaaggtctatgtgtgtgcttaacttatttccacgtaaattatttgtttgaattatgtcatttgtcacctacttttctccgacattgaccgaattttcaaatgaattctatactttccattagttattaattattagtattaagaaatataccaaccggcaaaaaggcaataacacaactcgtatgaagaaaaaagcgacgtccaaaatcttagtcgaagatagttcagaccaaaagagattggaagatggacgtgagacaaaagagagttacaaatatcagttacgttgataattgatacagtatattctttgtgtttttctacagtaagacataatgctatgttggttgcaactaattttagaaatgctgttagatatagctagtctatgagcctaacatcattctggtctaccaacagattacaaaatagtcttcgactacagtcttaaagtttaaatgaaaaaaaaaaaaaaaaaactcaaataataaatgtgtttatgtaagacggatttgatgttattcgtgatgcttcaatggtttacaatttatattgttggaaaaatgcagattgatgaagaatatagatttaattttgagagagattttctcacctggacaattttgatttgagttggagaacgaaccatctttatatatttactttataaatttcttaaatcctaatcgtatttgatccgtactctgcacaccaataacatctcttaccaagaatagttttctctcaaattaccaataggacaatttaatgattgatatctgtgtttttttgtatgtacgtccacttcttccttttaaggaccttctcacaacgaacttacaactaggtaagatactaccctgtgaatcaatttaccataaatatggaaacatattgaattttagattaattaatttaattaatttcagtgatatagaatcacaatcgaacgatagcaaaagctatcatgcaatctttgtataacagagaatatttttttttaaagaaagcttttaaagaagaaaataagttatagatcatatttcccttagttgaaagacgtttagtaaaacaaggcgatgagtcggtgacttggattcaaatgaaatctatatagttacattcgatacaaaaacaattacaagagcttttaataaaagcttagcaaaagtttaaagaaacgaaaacaaatctgcaaaggtttcattattattcctccctgccaaggtttatttttcattattcttttacttttgtgttaaggttttcattttaaatttatccatcagttgttaggtaaaactaattttagtcaaagtaaattttccgaaagcaatatatatttatcgcatccctaacgatcaacaattaaattagacaaaaaaacttgcgaaactatatatatttttcaccgaacgaggtgtgtgtctcacgaatgacaaaatgcattagcctttgaaaacctgaaaacaaagtttaattttcttcccagtggtcagaatgttcttatttagtttattaagatctaacacactcaagtttcacttacaaaaacgaccatcatgaataaaatgtcatatggatcccaaaaatccatctaaaaaaaacacctaccaccaacatgttcgaattctagaacattgccacacacttgtctttagaaagagttcttgaatgatattcgaaaatggttacaaaaagtttgtgatgtgtttggaactctttccaaaacatttccatcataaacatgaatttctgataatgttcgaatttaggatttgatagtaattttcggaataataaatgatataattttgtgttctgtacaattaattaatttacattttattttgaagtttatattactgacaaaatttaagattaacatgactattacaagacaaaacacctcttctcaaccagaccaaacccaaaggccaaaacctctcagttcactggccacgaccgtaatttgcgcctcatagtatgactttacaaagagaatgccactttggcttttctaaaattaaataattaattaacaaaaaataaataaatgccaaatgctttgaaaattaaacacgttcgtgcaactaataacgcaattacttaaataaataaagaatacagaataattaaactatttttccactatttctccaaaactgttttacaagctcctgacaaaactaaataaattattaaaaaagaaacaaaaaagctcatgaacttatgaaagaaaaaaaagtaacaccaaaatttttcagtcacaccatagatatttgcttgatggtttcttcttcactctcatcatcatattaagcaactaatagatctgatatcaatgaatcatcaaaatcactaaacgttgaacccatatctttgatactagaacttgttaactcatcttcaatgttcatagtttcaccacccaagaacaacatatcattgaagatatcatcattttcacagaaaatttgatccattggttggtcaaatattgacatctctggtggtgattcattgaaatagttgtcaagaaacggagtatccaaaggaaatgaatcgtctgattcacctaaaccggtattaaacccggtatgccaccatggtgcatttgaaacccccggttcgggtttagctgatttaaacggttgttgtacttgttgaatctcttctgaccggtgattgagaaccgaagtaggagatgagagatgttgtaaatcttcttcagttgattcagaactcgatgttgttggtgttggcgtcgtcataataaccggtttctcctcaataaccggttccggttcttcttcttcttcctcttcttgaggcggtatggagaaattagttaaagcgtccggtccacggagtcttatagcggcgttatcataaaccacggcagcttcctccgccgtctcaaaagtcccgagccaaatcctccgacgttgctccggatctctaatctccgccgcccatttcccccatggccgttgtctaacaccacggaacttctttatctgaccggagactgaaactttgttattaggacgttgacgactcgacgccggagattgagtttcatcggaggaagaagagagtctctttctatctttcatcgaaactccggtgacgacgttgttacagctaggctcaacagtgatctcgttaacgaatcttttgactctccggcgaggaaacaagaaatcttcttcgtcttcgtcacttgatgaatctgttgcgtcaggatcagtataacaaatactaacctttttcaatgacttaccaccggaaagtttttccgatgactttttggtgtatttagtcattgaagtcttgtgctctgtgtacttcaatggtcggaaatcaatatattcgtccattactgtttcttttatggactctctctatattcgcatcaaaatgaagaatataaaaggaagaaaagcttgcgaatcaaggaaagtttctgggtttgttgagagagatttcgagagaatcaagaagaaaataaaacaaagtttgaagagatttatcacgagattttttggtaacaagaacaaaagatttttttttggtgggtgagagagaaaaacgtgttatgaaacagtgattttttttagcgattcgcaagtggagaccttctctagctcactcttgaaatgctaatttataggatctcttcggggttttagccataattattttattcatttttacaaaagtaaacaataaattcgaaaactatataatatataatatttaatatcatttgatttctttccttgtcgaagctgtttctttccgctcctccatcagtggcatttttccgtaattaactacaaaactccaagggtagtttcgggtataagagagttgtttaaaaatacgggacgccgcattcatgagcgcaagtcgcatggtgacacgtggcgatattagatatttggctccttcctgtatgtgctgagtcagcgcgtggcttctagtctcgaatttcgcgattcatgtcacgtgacccccaagatacccggtcccggtttttttaaatttttttttacctttttagtttatttgatactaataataaaaacaaatttacttactacttctcaacaaattttttatcactccactagctttgaccgacattaagtaattaatgatgattgttgagggtaacttcgtctatttgaatgcaatttttcaacttgtcacgtacgaatgttgagggtaataaaataaatgcgattttttaactgttagggaaataaaataaatgcgattttgtcaaagttgaatacgttgtattatacaatatacatttttccatgttagataatcgaataatgttaatttagggaagatgaatatgtgactgaggaagttatgtatttaattttagatattaaaatgattttaggacgaaaatatctttgaatcaatataaatatggtagttaaattgaaatgttaccattttacagctagaagtaacgtggcgagcaacctaggatttgccgccatttataattcggtggtgtggtacgtctctaggcttttttctgtactctttgttccctcactcgctcttccaccactgcttgctattcgtactttccacgcgcttctcaagtatctttttttttttttttttttgaaaactatatttttgatttgttgtaaaaacaatcttctactaatatctttttgttggggtttttacttgggtttagggatatcaaagcttactacatctgttcctaattttttggactagtaaaaaaattatttttctgtttggatggcaatgagatttgaaattatgttattgtaaaccaagatatgatatacttgctttttaaataaaaaaaattatgattgtattttaattaagtagccattttaattttaaattttactctctctagttcataaatagtgtaatttagaatcgtttttttctcggaaatatgtgatgttacatttctgatatattaaataggaacatttaaataacttgaagatgtaaaagactttttgttgctcaataaacataaaccatgtacatttgatagagaaaatgtgtcaaattaaaagctagtttacatacatataacttaaacacaaaacacaaactctatgcatgtacatatattaaagagttaaagacagttaagccaaaaacaaaactggtctaaattaacatagatgcatgatttagaacataataacatcttcataccaacctgttacaaactttatgaagcaatctgcaaaagactatctcttgctgctaatccgttacaaactttatgaagcattctgcaaaagactatctcttgcagctaatctgttttgataaactgtctttgaactcatcttgatcaatttgttgaaagccgtttaaaatccaaaaataaatttaaagattttcatattatggtttcgaaagttgagtaggctttaccaaatttattctattaattactaacttgcttgcttttttttaagaaaaaatatatcttgagttgttaaaagtcgctatgagttttatgtgatatagatggtacggatttaaactcccttattttatttttgatgaaaagaaaactctacatgcattgaaattgcatttttcttgctcctttatttggggaaaattcagttattctatgattaagacctaagaattagagaaagtgatagatttgaagatgaaagtccaccaagctcgaaactagccgaaagcaaacagagactactagaagtcaatcctaagttcctgaacaacggacggtcaaaccggtttttctgatacgaattttagtgacaaagtagaattcagaacattttgctaatttatcacaaattggaaccattaagaaaatttatatcaactaatgaattattgaatgaatagtctaccacaaaaactattaatctaataatggtgttgccactgtgtcatcatcaatcttacgattcaatttcgatgaaaaacgtctatgaattagagacagtaaaaatatgtttgatgatgtgtttagtatcgattaagaaacttttcatgattctaaacttctagtaaactctataccaacattgtgcaagatctcaaacatctttacttgggactaattgataaatggtgcatatataacagtgattattaggaaaaagaagtgagatagttttcaagtctttaaaggagggaattccatatggtatcaaacattttgaaggaatatgatcgatgtggcaatcaaaatttctaaaatgtccatcttatcttccaaaatgtacttgttatatacatgtggtatatcatatacattttaaatgactatataagactaattagtaaacacattagaaatttagctaatacagtacatcattcagaacagagcaaaaaaaaaaaaaaaaaaaaacatcatttataataatacggaagaaatatataacatctgtactcgttaaatattctgaagtatatttttgcctagttcacataatttttttttggacatgtttaagtcaataacattagttgtagaactagttcagatagttgttttatttttaatggtaaaaccgaaaaagctctataattttgatcatgatagtaattccttttccctaaacgtaaaaacgagaattaaacagactaaaactttgtaggacaacattaggtaaagaaaattaaaagaagggacgtaggcaaaatatgaagcatgcacgtgggacccaaaatctaaagagtaagatagctttgaccacataaaatagatacataggtgtaacgcatcctcacacgtccccttctctttttctccttttttccaaatttttccttttaactttattatttttaatcgttatgttttcttctatttaagccatattgttctggcgagccaaaattgaaagttataatgttcagatttttgcaatctttctatttgtttaattctttcatgttcattattaaagttttgttaaatagaaacttacgagtttgaatttttttgtttttatataaaatttgacatcttggtcaataaaattatattgaaactttccacattatgaaaatttgttttttttctctcatcggtgttgaatatgatactttgacacatcgctttcgatatgaaatcttcaaatacaaggaatcacgttatttctttattttgtgtgtatgttctttaacgattttttaaccccaataattgcatgtttcaccagaaataaagtctttcaagtcaatgcatgaaaataacattctttatagtttaaaacgtagcaacaaaataaaatgaacgaattgctgattctttgcaaagaaaaatttgacataacacttcgaaacatagcaagcagtactttaaaggaaaaccgaccgcatctaaatcctacatatgtggtttgttggatccacgcagatagtcaggaagatcggaactctctctttaactctaatcaattgctattcatagttaatggatgcttgtatacttaaatgattctaaactgtcatatatcaaacaatcatatcatatcaaagataatccacacaaaacattaacgcagagaaaccttaaatgattttaagagttgtcacttaaataacttcgtgtcttatatgataaacgtgtttcttaaatctcatttttagagagtagtgtgtaaacgaatcgaacacatttgtcacctacttgtccaagtcagtcatatatgcttagatctaattagcacgtacaatgccacttgttggttcgaattcgtccacttgtccctccatccataatattcaggttatagctaacacatttttagttaattaattggaaaaaaacacaaggaaaaaagaggcgcgtggggacgcgtaaggagaagaaaaatgttgaagatccaatgtgaggaagagagagacatggagaatcctttggattggcaaagacaaaccccaaggtttagtgcagtgttcttctccattgagccaagtgaccaataatctcatttaaatgattatatacacacatatatatatatacatgtttatgtgtgtcgattaaaacgacaattaagtaattacaaggaaatttagacaaactgaatcttgcttggccttcatcgataaacacaaatttatgtgtatacttaagattaatttgtttcttgtattcacgttttccaaccatatgattattagcttaactaattaataacgttacattcgaaatattcattaaatttcacctgtccaataaccactttcgtttgctaataatggatccttctttcttttttttactatagagattttttcgtacacggtaaaatagaaagaacaaacaaacaaacgatgaaggattaatttcattaatgattcgaaggtagttaatgtaaacatccacttggtgttcagtaaaattagtcaagactggagaatataattaattgatcattaagtccaagatccttaaagattcttccgggttatatgcatgtaaacattttctatgcatgtttacacacatacaattttaagatacgtatatacatgcatgatacgtaataaacaaatattttttctttcttctcaataattcgcaaatatcgttgattaatagttaaatattggaaaaccttaaaatcattcgatccgattatttgcatattcttctattattgggttgaaaatatcgttcagtagtacgacacatccgaagaaaatgtaaacgtcagcccgaattagtgtagtgtatgacttgttcaaattattagctggaagtgataatgataatactatcactcataagacgttttctttaaatttttgaaacaattccctaattatgatccttaagaacaagggttatagatttcagcaccaagattgttttgtctttaaaacctgtgattagaaaatacagtatatatgaggtttgtagttttaatcgattaaatctttctcggataaataaattaatcaatctccctaatttttattatcaaaaacaaaaaggatatatctatatatcaaccgtgaatgcgtcgtatctgacgtacgttggcaagatcatcgaattattaaagttattactgccaatgccaagtagttccattatttaccataacgttaaaaaaccattttaaggagaatatttaacatggtgttatggtgataatcaaggccagctcaaaatccaataattttgatattatatcatatttctgtgtgaatctttaaacagaaacagattgggtgctaaaatatagatatattttgttaattttgttgggaatcatgtgctgaagtcatgagctctcttatctaattaagatggtcctctccgcgatttaatgtggaagtactacttttcttggggtcaattctaaacttggaggtgtggtttaaagtctaatcggtccaaatcacatcaaaaccaaaactataaattagtttaaggtgaggtaagccatatgagtcgttggatttgatctcttggtaagccatggaagcgatgggtccgttggcagagtgtgaacacacaagaacgttacaaatgtgatcatatcggggtcaatatatagttcctagtatggataataagtcctcgcgtgtctattagttgattcgagacgttccattttcacaatactcgtctccgcatcacaatggttctaactcctacatctttaaattaaactcaaactatataatagtaaaacaaactttggcgaatacactgctataattatgatcatgaaataataaccaataccagaaaattattaatataaccattgtttcattaaactccaattccttctaaaactctaaaaaatgaatatggcaatgaaaaagttttattcattttaatcagctgagtaaaaccaatttcagacgtactattaactgagaatgcacataccacatgtcgagaccatataagaatatatacccctttttataattgatgaaaccttgatgaatatctccacagaggctaaataattcttgtctgaaatcgtgtttagcacgaccgatctttcttgcgtcatctgtaattaatcggtaagatatatacgacgttcttgtgattctacagtgcaacatgtcatcagaaaattatagtaatcccacatattttctctatatttttagtctatcattctgttgagtttcaacattttagcgcattatgctgtaatataatacaaacacaatgtgtatatatatatatttttttttgaactataatagtagactataaacttgaactctatttatacgttcatttatacatacgtggatttacatattattttatttctgtttagtcatcgataatgtagactagaaaacccaaatatatgttacgagttacaatatacccgtcgagtttaagatacaagaaaaattaaaatgaaagacttccgtagaataaaatatttgttacacacataattatgctatttcacatgggttctatatacacacataagcgatcaacttcgagtaacaatatagtaaatatattaaaagtttgaagctcaacttctagtaatttaaacaatgtcatatgctaagttttctttttcatgccttattactgatcatgacattcatacgtgtatgggttgtaaaaacttaacactatgaactcaaataagtaactaggaattcaaatacaattatgcaatggagatatatagtagtataagtaaacaaaaactaaattaaggacaaagatccattctaggaagaagggccacgtttcaaaacacagaagctttaccaccattaattatgtaaaataagtgcatgtacgttggtatttgtgtagagcgtaatcaaaagcataagctcgcattttgatgggcaaataaaaagactagagaaagacacaccttgttacttgtcaagttgtcatgactatatttaatatcaaaattgacaaatatctcacttgaataatcaatattagtaaaataacattcacaaatatatgtattaatattttagctattagaaaccgatcaatcgcacttcgatacataacatgcatatgtttcgaaatttaatttgaaaaagaccgcttccataataaagctccgattaataatcgtttaatggctgaatagcattttgtaatgcaataatgcaaaatataagtaattcattattcaagtaattggatatatatagttatttattttgcataaaagtttttaactattttatctatacataatatatattagcaattcaaaaagtaatatttataccattttttactatgaaacttatacaagtttttgaataacttaataccattctttactatgaaactaataccattttagatttggaaacactttttagtaacaagacattacgagcatatcttcttctgaaaaattaatgtgccaaacgtattctatgtctagaaaaataaccgatagttggaccactactacaccacatatttgtatacatacacgactaaactccatatctcttgttgctcgatttatattttttcagaagaacattacattttagaagcccttttgtgcacccggccacccccctttatgtgcctgctaaactttgtaaatttttctacgatattctcttaattatatttgtatatcagagatattcttctataaatacttttgatgctttacgaactataacggtttcttcatgacttcatcggtacatgtcattccagtcccagaggtcaaaccagacgattccgtacgtgaaccatcattcgctaaatggttaatttcaaatttctacatgtaaataatactaactaattaaaaatatacaatgttatatggaagaacaaactatctaacaagataataattttcatttttagtcattagagatgatgatagatgactacttaattagatgtggagagtgatttcatcgaagtatagtcttataataagactttccttgtttgcactaattttttttctttctggcatataaaaaattatggaatgaaacatattaaaaatacgtcagaacgccgagttttccaatgttaataagtagagaatgtgtgtaaatatgtttcttggaaaagaagtaagatgatggttagtaaagtagcactcaagtcattctcaatgacagtcttagtttagaagcaagcgatgttggtcttataaatgtcatgtacttctatgcctttgtcttagtactaattattactgtaacttcttacacaactcccgtaattaagcatcattatcgtatgtataagctacattagttgattatcttaatttatcttgatggatatataatcatatattttccttttcaggtgactctatgaaaagtatgatataaaattacgaagttggaaaagagttttgtttataatttatacttcttctcttacaaaattatttaaacttttgagtttacaattaacagttacaagtatattttagtttgacatttttattaggtgtgattaaagtggtttcttattgatacttataggggcaaacaaaagaactaaaataattatacataagaaagaaaaaatccagcttttgaaagaagaatagtttgaaatggagaaaacatttgataaagccatgtgattttagatcgaaaagaacttaagtggaaactgaacataattagatgtctattaccactaaggatctcgagaataatactttgtaaagtctaaaaggtcattaagcataagatgaataaagaattagatacaaataaattgtgaaacactattaattatagtatgtctcacagtcacagcttagtaattatttgttgacttgacagactcagccccatactccataatagtcacacgtgcgacaacttcgcatctctctccactaacggtttcgattctgccacgtctgattttctgacacagcacgaccgtgggatcataatctatagcattggtcattcacttgtaccaggagtcgaatccaaaaatagtgctattattattgagttctaaatttataatgatctaaggtttgggtgctagaatatctatctacatgaatcagttattaatcagcaatgtactagcgtctgattctgagcataaataactttgtttaggacctacaaaatacatgcataaatagatttttttttatcaagaacttgattttcattttcgtggaaaagttgttcgatctttatggaattgctaaatcaattcaatgaatttgtatcgctgaaattgaaaagccctaataataggagaataattgtgaaaccatcttcttttgtttgcctttaaacatgcaagccacataataaactaaggaatatcatattaaaagtaataatttgactaattaatccgggaaaccgttttaacaatcttttacgcgaaatttggctaaaaagtttttgactttttatcgcttatgcatcctacataacgacgatatcaatttgataatctttatagacttttatctacaaaatccgatgatacaaataaaaaaattcaatataggaaattatcatttcaaaaagagacttatgtaatttctttcattcaaattaacaagctttggtacgacaacatttttacaaaatctttttcttaagtgtgctgatttctttgacggtgtcagctttgaacaaaaatgatatactattaacgtaaggaatgaaaaaaatatgagtatagtagtttttaaatagctcttttttctctgaaacaagctaacggttcttttgcttcgacattaaccttcaactagtaacttaactaatgcaataattaacattagttaaccgtcataaatgccattaattagtggacaccaccaagcttacgattctgtgtttcactagaaacaaaaagggagattagtgtgagaagactgtctaaatctcaggctgttatgttctttctttcagaattaattatgattaaacctaatttttaacttgattattttaagaaaacctggttttcaggaccatgctcttctgggcacgacctatctctcttaccctaaaaaaatgtataattatccaagttatggagactttggaggtagatttatcattagtctaatcactgacacgtgtagttgaattcttatatgttactttctatgatttcaactttcaaataagaggttttgcatgttcagaaaaattaaataatcataaacaaaattcgattgttatatagtatagtaaaagactaatggttagattctttagaaaacgtaatttatcgaaaggaagacatcttcgaagtggtcgtgtaagagactcgttttttttttttgcctttttcttaaaagctgatttttagttaattttaaaattattttccgtatttcggtacaaaaagaaaatttacggtgtgggtagaaaattaatattaaagtcatcatttacaaatttaaaaactttactcgtacaaaactaatcactagtgggaattgaacagtacaagatgttttttctcattctataacaatcaatatatgagtacgagatattaacaagttgttttatttctgttaagtgatattgcgcgaaactgaaaacggaatggtgagtattattttataatagtgcaacataggtattagttaatagttattaactagtggcaaatgaagaattattaagtataagacaaaattattcaatgcaactgcaatgaaaccccgagggaaagaaagaccctgtgtggttctgctatttccatgtggctgctagtggtccatcatacgtcaactatacttagcaagaaaaattaaaaatcaaggttaaaatggaaattgaagtagtttcgattgttttatattaatgttttgagatagtgcttgagtagtggaaacaataaaaccattaggaataaccgaacagacctcgaaagaagcctcggtaagcccaaatctcgtattggtgtttcaagaaaataacgtaaaatcacaagtttttacaaacaagcaaatcacaaaacttttataaattcaaaagcttacaataacaaaaagaaaaaaacaagcaaattacaaagcttacaagaactttagaaatttgttacaaaatttgtcaaatattataaatttagttacaaaattttaatctacaacttcaaaatcaaaagaatcctattgtcgtttaaacatcatcgatgttcaccactgtcaatttcacatcccggtgttctctaaaacataaagaggagacataggaaataaaagagaaattaagtagttcaaagaataatcggttattagtttcttataactcctaggaaaagctattctaaattttttttaacaaaacatactccttataattttgtttattactgacttacacaatgacgaatcaatgagaaacaaatatttcgattgtaaaatgttttgctaaattgtggagatatatatatttgttttctatgaacatatcatttaatatataatttagtttatttcactaataaaaaaaattacaaactgtaaaatagttaaaaacaacattatataaaatgaaattttacaaaacgaatttacaattaaatagtaagatgaaccctccaaatatctaatcctataatagaacataatacattaacattataattaaatttggttttgttaaaggagaattgaatgtcttactgcttactagtttagggaaggagaaaccgaatagggaaattaatgcagccgacatttttgacgtcgaatagttaattggttgtattgtctctttaaccgtgcattgttacaattattaaagtattttaacattttggaatatggaacacctatcttaactaaaccaaaaaacatggaacactgatttttattttatttctttcagtcgacaccaattgtttgaattttgcgtttgaatgtctagagttcttagcctacaagtttcatggatatctaaatcaaacctatagtccctatgatttcttattttgttaaacttaaagcagatgtttaatttggtcttttgctcttaactagagtaagttttgcctgttggttatcatttctaagttcaaactgatactcttctaatacactgatccgtgggataatgataaattttgaaaaaaagatagtaacatactgtattttcttatagagaagagaaattcaaaaatattctaatagcacaacactattaaatgtatttttctcttacctgtggacttgtaaagataatttgttaggggtgatactttaagctcggacgagcgatggatctttggtccatcgaagcccatctacataacttgagttcagtccatacccattcatctatagattatctgtagtattagattctataccactcttttttttttttctgttgattctataccactcacattccacataatcaggctatttattattttattaaatactgtattgtcaaataatttgacttcaccaaataacatgttttcgtcaaactcatgatatgatggatgatacgaataagaaaactgttataacttataaacaaaatagggtgtttagtggttttgtactagtgaatcattgctgagttactacttgagttcaaacatgcataatacatgtcgtttaatggatataggattgtttgtgatattattgcatacttaaaatgtttgttgcatcacgtatgtagtccacaatccacaggcgcaccttgcaaggtacaaaactcattttctacaacatacgtgctacaacagaacgcattgtcaccatgacgggcattggccacaacgattaactcagagtaaatttgaagaccagttggataagtttgaagaccagttggataagtttgaagactagtttgataaatttgaacaactcgtagcaactcatcacacaacgaaaacatcaaatcataatttcaccacaagaagaaacaacagaagatgatcagattctagttttcacaaagatgatgtttttttttgtttcgtttaaaacaagacccacttcatttggtcctgtcttcagaaagttaaaaggacacaaagagatgtctatcgaatcatacatagaaattaaggcagatttttttcttcataaagagataatttagtaggtgggattttccatttagcccatggcatacttctgagtccagcttcgtgcagtggactcgtacttgttcttgtcagtcttgtacatgtgagctatctcgggcaccaaaggatcatccgggtttggatcggttaacaaagaacagatcgatagcagcacctgttaattgcaaagcagttgttagaactgatcgataacaaacaacaatttttcatcctcaatgagtctaataagcttaatgtttcagagacaaccgaaatgagtcaaagtttaatgaagacagctcaatcttatcacttcaactagggattaaggagcaaaagcatgtttgataagagtagattactgcctctgaagcagttttaatagagagtatttgttttaaggtgggtttctattgttaacaaaagaataagagaaaccgaaccttggaaatggtgagcgcaggactccactgctccttcaagatgtcgaggcaaatgctaccgttgctgttaatgttgggatggaacaccttggtcctaaaggccacctagatatcatcacacacaccataatgaagaacaatgagataatgaagcaaccataaagaacatacgagctttggcaaaacatacttgataacaattctcaaaatattggaatcaccttaggaggcttgaatgggtaatccggagggaaatggatggttacaaggaaaacacctccagcataaggactctctgaaggacccattatcgttgcctgccagtgaaacatgtcttcagcaacaggacctgtacacagaaagataaactcaatctcacaccacataagcacaaggaaacaaagagacagttttttcttcacaagtataaccagaccccagaaactaagacaatgaaacgagttttaagcctttataagatcttcaccagagaaatcagaaacgagataaaccaaatttagttctagccagatcttaaaaagtaaaacgagtacttagctcgagatcggtaccaaacaacacataaacacacaaatccaaacaaatccaagcataagcgaacaaaaaaaccggatctatcaacaccagctcagggaaacaaaactttttaagatgaaatctcaaaatccaaacacgaaacaagtacctgcgctacatgatgtaggtggatccttctggagatccttcaattccttcaagatccgcttcgacgccatatccaaaaacctaaaaatcaaaaatcaaacaaagattctaaacgaatcagagaagctataaatccgtgagaaatataagtaatagatccaaaagctacagagacaatacctttgatttttcgcgtaatcggattggcgaggttttcgcctttttcttctcgtattagagagaagaagaaccaagacttaggggaaaggaagaaaatagagatggtggtggacgaaagacgaagaatacgaattattctctgtgctcacgtctacaataaataccgtgtggattatttactttctttgactagtggactctacttttaaccctcttattattcggtggaccttgaaacgacgcggcgcttcttaattaaaacatcaagttgcattgaaacgacatcgtcttaaaaagtcatctaatctaacggttgatatcctatccttaaatcaagtggtattgaaatctaacggctgcgagtttattataaatttcaaatcaagtggcatcgaaacgcgttgcgatgaagtcatataatctaacggctgagatttgtatcttttaatcgatcgaatcatttgaagccacgtcttctctctcactttggagatttttctaacgcagaatctgagaataagctaaccgattccgatttcgagttcgtcgccgggaggaatgaaccggttgaaggagcaaaaggggccgaagttcgacggcgaagaatcacctccacctgattttgatgaagatcgaagtgtgggtgaggtagacggaggagatcacacgccattcgctggaggtaaagtcagaaggaaagcgtctcgctatagagagcatcgtggtgactatcttcacgtttcttctcgtcctggattgatgcgaattctggagaaacaaggttaggtttctccaaacttttggtttttatttgatgaatttgagattgagaggcaatttgtgaatcgaagaacttggaggaatagttgaatcagctgtagaattgtggcatcgatttatagtttcttatgtggttgtttggattgctaatgattggattcaccttgaattgcatgtgtttgatgttgagaaggtgattcattgttgttataggtgatacatcgattctttttgctgataaagttttgaagttcaccggctcggggaagatgaaacggcgtatttttatcctcactgattttgcgatctatctaattgatcccgagactgaagctatgaccaggagaattgctttgtcatcagtagagaagatgtgtttaagcaaattgagtgataacttcttcgctatcattattcccacggaatatgatctcttcatggccagcactaggaagactgagcttgttcaggtcatggtagatgtcactaaaagtgcttctgactatgaacttgaagtgcttctctctaacaggtaactatgaccgcaatttttggtttttgatgtctcctctttgaatgctaataccatgcacatgagaattgtttattttcatctcatttcctgatattgacactacaggtattgtgttactgagaactgatgtgggtctttttagtctctgaaacttagtgagctctgtttcttaagtgacttggctattagttagtggtgagaccagaggatccacttgtacctattaatcatatctatatttatggaagaagataaagaattaacacttttaggagataactactgaaattagtacgttgagatacaaatggttacaactatattttaaatactgttagatgacatattctagttttgattgaaactgttctcaaatggcaatcacgataatagtccgtagaaacattttgtatatctcccatatcgtaaaactcagctattggtttatatgtgcagtttgtgttttatactgataatggtttctccttgtgttcattccagatttgagtacaatgcatctgcctcattagtaaaggaagtttcttttgaggaatctgaaggtttgtatgaataagattctggatattgtgattcaatctaagtttgtggttagtttatttgctcatcaagctctaccactatttttcagggggtatcaagaccaaatttgtgtggaagtgactacatctcaactttcctcgctgttcataaactttggagggaccactagtaagatctgtttcgactttcgaatgtcttttctgttggttactaatagctgaaatcatggtggtatgtgttgtttattatattctgtttcgactttcgaaaatgtgaatggattctttcatgtaacacaagaccagtagtgtcaatataagaaacaaatggttacaagtatatttcaaatattgttagaagacagattctagttttgttggaaacggttctcaaatggcaatcacgataatcgtctgtagaaatattgaaatctttttctgaatggtcaatacattaaggaaagatggaatagtctttcttatagtatatacggagatcctgatagacttccaatcggagttgttgtcgcacctgtggaaacctctgatctgtatccgctggctagtttctctggtcttatctcttccaccattctcactacctcaatcatgtttggtctcttctctggtaatctcgctgtgcaaaccataccaacctgaagcatctccaccatctcttcctctacttgggtacacctcaaaagctcctcatcaaacacctctcctgtccattcttctctaaccaccgagttcacccacctcaccaggtttgccacttctgattttcctgttagtacctcgaatatcaatatcccgaaactatacacatcagacggttgagtcccttttcttgtgtctgttatctctggtgcacgatagccaactgcatgccgcggtaatgaatgcatcagtgtagccattcctgttccagatatgcagccatatcctttcccgttgaggaaaatgtttgaggattttatgttcccgtggactagtttacctccgctttgtgagtggatatgagctactcctcttgctgttccatacaccatattcagtctagtttcccattctagacgcttccgatccctgagacctttctgacctgagtatcgatacacatatagaccaacttagctatgtaagatactgtataaattcaaatggtggcattatcaacataccgtgtagcaatgttgaaagacttccatgttcgtagtaatcataaaccacgagcttctcatccttagagtagaaatatcctcttaaagtggcaacattctcatgcttgatgctgccaatattttcgatttgctgctcgaattcccgttgaggtacactcacttccttgatccttttcacaacgatggtcgcagagtcctcgagatcaaccttgtaggttgtcccaaacgggcccttccctaaaacttctgcagaagctctcaacaagtcttctaggtcaaagacaagattcttcccttcgaagaacacaatcttgttatctccttcacccacgtttggatctgaatccttcctcctcttgctaggtttgtcctttgaagatcttctttgctcttctctattatggatgatgattaccaataagatagcaagcagagctagtatcgcaaaacacacgcttaatgctatgccaagaactacatggttgtgatgtttcgtgtgtttccttaatgatgaatgaacaggcgccagcactttgtttccgacaaatgctgagagtggaaatctctgcaatgactgaggtacagttcctgttagattgttgtgagctaagttgagcagcttcaaacctggaatatggagatcaggaatctcaccagaaaacttgttatacgcaagattcagagagtgtaacagagttagcttcccaatcgaagatggtatactaccattaaaccgattattagagagatcaagaacttgtagacgctcccaagaagataaatcagaaggcaaaggacccgaaaactcgttgaagtcgagtttaagctctgtcaagttcttcaaagcttgtaaagttgtaggaaaagttccagagatgttgttggaactaagaatgagaaaccgaagattgcttaacctggcgatgatgcttaactctatatccccgcgtagacccgtggctgctaaatgaagagcgtcaacactggaatgatcggagttgcaagtaacaccggtccatttggtacatatagaaagacttggtgaccagttgagtgaatgagagtgattgatgttgttaacgaattgaagaagagtgtgtttatcttctttgatcgtctctgcttctatgcagacgttgaagattactacgatgagtatcaaaacaacttggcacttcattttcttaattagggtggagaaaaaactggttttaagagtaaagtggcgtttataataatggatgaagatgaagaagtgagattagttagatatataataagtttacaattattgacttttgtggagctatattgtaagaattattcaataggtttaattttgttttatcagtgtgtattataacgaaagtgggttgctttaggttaatgttaggttcggcgagttgttgacttgatgcataacaactctgtttttgtttttgtttgctgagaaaatcacggtgaaagctacttgaattttcaaagttactttttttttctggacaatatttttcaacatttgaactttgatttttgttgtgtataacctaagtagtgtcttgtagcagttgaaattagaaaaagtgagtttcatggttcatgctaattgtcgagtctctctccttatccactcaccttccttaagtcgtgtattgtaacagttgaaattagaaaaagagagtttcatggttcatcctaagatttgcatagttttgtgggaacatagtctattatcaaaacacccgtttaacacatattgttccaaaaaaacacacacatattgttgacaaaaaaaaaatcagtatttttgatctgatctatataaacataagtatacagcaaagtggttctcatttttgctctggttccggcatgtggatgataatgtatgggccttaatggcccaattcaaaaagaaaaaaaactgaaaacaaaaacaagatcaagtcaaagctggagaaggatacactaatccacatatccaaacagatctgatctccttgaagacttcttcttccaatttccttcttattcttttctgcaaattcttcttcaaactagaaaacaaacacacaacaatggattacgattacagaaacaagtctggtggtccttcttaccctcgacctatgtatggacctccatcaacatctccttctccgtcatctaaccatcctatgtacggttaccctaagatcggtcaacaaaccggtcccggcccacagtttttctctccgccggagagaaactcttcgtttcaacataacacttctccttcatgtaagtcttgttctgatctcgaatttggttttacgcgaatttgattagtaattggttttgatcgttgaatttgattttggtagctggaataggaatcagagtgaatttgaagcctgagtatcggattactccgccggtaagattttgtatgtttgatctttaaactctgtgattgaagatttgaagtagttttacattgtatttgcaaattgttgtagcctcagttgttgcctcgagtaggagatattcatcggagtagttttcagttcgatttcggattagagaggaaagttctcgcggaggcagagaaagataatccagattggagtaaatttgggagtgagaatccaccggctaagtttcatgaaccatcaccttcttcagtggtatggctcttcttaaaatctatggaagcattttaaagttaggctgaggtggttaatagcatcatcgtatagtatcgatgtgttctctagaagaacaagtgtgaatcatcatcgatgaacgtagttaaccggaacagaatggaagctttgtagatggcaccaatgtatagtgtcaatgtgaggtctaggaagaacaagtgtggatcatcacacgggaacagaatggaagctttgttgagttagacgattaatggcactaaactatagtatcaattgtgatgtctaggatgaattgttgtggatcatctatgtattaacttaaaaatgcgaattgggtgaagatcttgtagatttgtgcattacagtgtatgatcgttatatatgcattattctcgttaataagtgattccaaatgcagggtcaaatgcagggtgtagatcatgtagtgatgaaatatactgcttctgggctcaacagagaagctgtcaacatagctgttgcaaactatggtgataatcccacaaaggtgatttatcttcatcccttcactatagattttattcttgtattagctaatgaagcttatacggattctaactagtggttatagcgatcatatatacttttgagtccgtccatcatttaaaaccgtgatcaactatcagttaaatttgtggatctttgaattgacaaaccagcttgcttcttcattctttcccccaaaggagaatctaatcacagtttttacgcgttttcaggttcaagaatttgcaaatgggttcacagcgatacgggagatgggttttccgacaaacgctgttgcagatgctctcttcatgtttgagaacgacactgataaggcattggcacatttgctccatggttcttcctaaatttggctttcaactctttatcctatagtttattcaagtgaacatcaagtttgataacataaagattggtaaagtatagattattgggttttacttgctgtaaatgaatgattattttttttggagtttaacgtttgtcggtaagaatatctattcccacatccaaatcctagacttcgtataatgcaatgccaataaaatggcaagtttagaatacatagatgaaatggtgtaattagctttcttcagacaaatgtcatttgttcttctttctctataagcaccaaagagccaagagcctcacactttggattcgtctttggttctactacactcctgcgcatatggcttctgaaacgtatggaagtaaattagatatatatctgattccattttatttacattgaaaactaatgacttaaatttaagtacataagcagtagaagctaagtcatatacctgaggaccacgcagaacagcaaaactttccttcatctacatgcttaacatcaagacccacaaaccatgaacccgtgctgacgtcatcatgagcatacgaatgaagaatgtctctgtcacccccccacccccaccccatcatcatacataacagacaacacaaaaactcagtttcaatcttatttctctgtttgaaagatatgtgtcatcatgcgtaactgagaggtgaaactgacctattgatcgatacaaatctagccaatgcgtgcgttataacatacatctccccataagcatgccggaagtatctataagataaatgaaacaaagaacaggtggttcttagtcacatggaagaaatgaatctagtcaatgcgtggttctgattatttataaaacttacgctttcttgtcaccgaatttccaccactctggttcataccatttgtggttcctgccagaaaatcaaaacttggttaagattatatcagactgacaatatcctgacaaccccaatggtcctagtggttttgggtttttaagcttaaaactcacggttctgagaagacttcgcctgatttcatgcaaccgatgtaagcccgtgggttttccagatgtgctgcaagcgtagttcccagagcatctgcataggatcaattacattaataccacataatcatgtcagcaaaatgcatacatggaaactcgttgacctcagaccttttttttttttagtactaacttacctatatttacgtagatattgtcgatggcttttgcataaaactgtgcatcccacctatctgcagcgtaggcaaagaacagttttaccttcttagaagcttcctcgggtgcctcaactacatcatcctgaaaaccagtaaatggccaagctctcaaactaacataggtgagcttataactgaatgattcaaggtaataacttaagaggggagaagcagaaaacacatacgagaataatgaagtcatcggtttgactattttcagtatcaatgctcttgtccatgctgtcccctttatttgcactacatatcacaaaaacaacgtttcaaaacaagattccagtaccgtataatcatctttaaacacatagagaaatcaaagagtgataaacagaatccaaaccttcttccaataacaaatcttgcaatcacacccttttcactttcaagttttttaagtgatgcacctgcaataaaaggaagtgctaagctcataacacattgcaaataacagactggtgtcttactaaaacacgtataaagagaaaccctaccagtccccatccatgcttgacgaactgcatccctcttcttcttgttacccaaacttgtcattatcccgataaccactaacggtcttttcttggtttcagttccatcagcaagtttgggactttttgaaacaaagccttcttgcctagctgaacttaattccatctcaagagctgctagtgtcttcttctgttccctagaaagaaaagtctgttttcaacagtccatgaagaccaaacaaattaaacgaaaaccaaaatcaaacaaagtaccaatcttttacctgcaagctatgatcttcaaagtatcatccactgatatagcagatttcccctaaaccccaataaaagaacatcataaacattcaagtacactaaaccaaagtaagacagtaattgcaaatgtaataactttctgacatgacattactctctgctgtaatgaaagtgacagtactcaaatactaacctgtccggttactctatcgagctcattgattagatgaaccctagtttgagattcttgccataaactatctcaaaaaaatgtagagacgagaccaattaacaaacaaaacaaataagtaattgttagatatggataaatgtagatttaagaactaaccggcctgctacatagaaggaagcaaaagttgcaaacataaagagcaaaagggttgatattctcgagctcgataatcttatactcgaccctttcctcgccattgaaatagatccaaaatcagatctcttagtcaaagcaatcagacgcaaatgcctcttcactgtcgaaattcgatcaaatttcactaattcaaatctccagaaatcggattttctggatccaatgattcgtcgtcactcaaaataaaaccgattaggaatgtatcattggatctgcaattctccggtgatgattcaccagcggaacacaaacggcgagatcactcacttcgctgagaaaaattggaatctggattgagaaataaggagagacaagagaagagagtgccgttgagatttatgatttttatcggattagtttttgggatgtcaattttgtgtgatcttcttaattactttctgatcaattaccaaacctagtctctctgattcttttgattataggttaactctacaatttaattctcatttatttctactgatttgtaaactttttcgaaactgtcaaatattacccaccgtgaaaaaaagggatcaggtgttctttactaaacaacatttgttttttttgttacccggcggttgaaaaggaggaggaggtcaagacgacgacgtttaaaaaaccatgggccgtcaaatactctcgtcaaactcttaccagatgattattgattagatattctctcttccatttttcccctttcgaatttttgcatttcatcatccttttcgtgtgcttcacaacttcatctctctctcgagagaatttgcgtcatcaattcaaatcctttacgcaaagtttcagtttttattcactttcttacataacccatcaaaccaaatcctcgatcggattatgttaatcaattgctaagagctttttcttctacttcttcgcaatccgccatggccgcagctttaaggtcgaatacgtcaagagaaaccgcttctcttacactttctcattttagatactttatcttcaaccgtatccacaccgctcgaaccgccacaagtcctcctcactgtaatcaccgttctaaatccgatgagaaattcccctataaaatttcctctcttggaacgagtttcttggataatcgaggaggaggagagagacgtaattcgactaagtgttatgctgctcagaagaagctcagcggtgttggttcttctgttgttattctgagctcacaaggagacccaccggatctatggcagcctcctggtgatggagtttccgttagggttaatgggtccagtgttaatctcggtcgtggtggtggtggtggtggaagtagtcctggtggtcctggtaacggaacagggtcgaattcgaaagaagattgttggggtggatccaatcttgggtctgattttccgacaccaaaggagatatgtaagggtttgaacaagttcgtgattggtcaggaaagagccaaaaaggtgaaatgattatactttgatgttgttactacttagttgaatgctaaatttcatctctgaatattcgtgaattatacatgcttctaatttggtttagacatgggaaatatatttagcttttaacacattcttgtgtcattttgtggttgcaggtactttcagtggcagtttacaatcactacaagaggatatatcacgaatcatcacagaaacggttagttcacttcttatttattttgcttgcacatgcatttgcatctgtttgtttctttgtaatttcatgtatccggtaagagattgttagttatgatgctggtactttttgggaagctaggtctgcgggagaaacagatagcactgcagcgaaaccagcagatgatgatatggtagaactagagaagagtaacattctcctgatgggaccaactgggtcaggtaatattctgacgccaatctgcataaatgcgcaagcctgatatgctgctataatacagttattagttcaatctagtgtagtttcagctgtctcacctcatctgttttggtggttttattcaaacacagggaagacactacttgcgaaaaccttggcacgatttgtaaatgttccttttgtcattgcggatgcaaccaccctgactcaggcaattctcgtctttcttctagtcttttttggcgcatgtccttttcatgatgaccaatctgtgacattcattttttgttcggaaatgaaatgatttgtcaggctggttatgtgggagaggacgtcgagtctatattatacaaacttctcacagtaagcttctaaaacacaaacatttatatttgtatacaactataattatttctatatattgttagtaatgtggggatttgatatctctggacaggttgcagattataatgttgcagctgcacagcaagggattgtttacattgatgaagtcgacaagataacaaagaaggttagaactttattaaaaagtttttcctcgtgcttgtttggaaaacttgaacatcatatcccgtacttcttagatgaattttgttctttggaccttttggttaccaggcagaaagccttaacatcagcagagatgtatcaggagaaggtgttcaacaagcattgctaaaaatgctggaaggaacagtaagtttacagtttaaatagccgcaaaagtcttcactaaattgtaaacttaccaaaggaagccatgtagtatttgctttaagatctctgctatttaagatatcaagacttcttttgtgtttgatgcccaatttccaactctctctttctggatatagattgtaaatgtacctgagaaaggcgctaggaaacaccctagaggtgacaatatccaggtttgtcgtgcttcactctactctgtatgttctggcttgcaccttgcacaaacaacaaaggctatgcatatgtatttgttctatcgtgaaatgtcaatatttttatcatactctaatattattgattatgtagacaaaagagatttccaatttaatgttctttgcatggtgattggagtgttagggtttaaaatttgtaatcgacatggtttcttgttttcttgtttaagtttgattagtagtctcccctgtaaatcatctgttttttacatgcggtcttgttgactatctacagatagacacaaaggacatactcttcatatgtggtggtgcttttgtagacattgaaaagactatctcagagaggtctgactgatgaacatatttcaaattcctccgttttttgtttctatcctctaaactgaattgcgttataagcatatgagtgtgttttttttggttccaggcgccatgattcttcaatagggtttggtgctcctgtacgtgccaacatgagggctggtggtgttacaaacgccgctgttgcatcaaacctaatggaaactgtaggtcttttcatctcttcactcaccaaatgttgggtgttcttctacttgttttggtttgtatcgaagtttgaaatgagatgtttgctgttgcaggtggaaagcagtgacctgattgcttatggtttgattcctgaatttgttggacgatttccagttctcgtcagtttgtctgctttgactgagaaccagcttatgcaggtactaggaatgacataaatatgtgacattgtgatttttgcattactagaccatgttcatagaatatgcagtaatatcattggattgcaggtgttgacagaacccaagaacgctcttggaaagcaatacaaaaagatgtaccagatgaatagtgtaactactaatctctctatctctatctctctccttctgctccaaagcttgagacaagtctccatcttctctttcttcaggtaaagctgcatttcacagaaagcgcactgcggcttatagctagaaaagcaataacgaaaaacacgggtgctcgtggcttaagagctcttctagaaagcatcctcatggactctatgtacgaggtaaatacacctcttattactttcaaatccgttttgctaaaaatccgtattcaaactcttttcacatttctgcaaaacatttgtttttctcagattccggacgagggtacaggcagcgatatgatagaagcggttgtggtggatgaagaagcagttgaaggagaagggcgtcgaggctctggagctaagattctccgtggtaaaggagcattggctcggtatctctctgaaaccaattccaaagattccccacaggtaaaaaccgagcttttacttaaccgataacaactgtctggtttgtttgataacctcattatctgaattgcttggcttaattgttgcagacgacaaaggagggatcggatggagaaactgaagtggaggcagagattccatctgttgtagcaagtatgtaatgatcaccaccatcatcatcatcatcatcagaaaatgtggtgaatgtatctttgtatgcgtaatatttaccgttctttgtacataaatgaaggaaagaaaaacaaagttggataagaaaacacaaggatgcacaacttgcacattgataaatgatgatgtaacaaactttttatcgtatgcaatgtccatcttttcattgatgtatcttataattcaaagtattcaacaagaaaacgctcttgtaacaaataatcttattaggaaaattcaaacacccatgtgtcagattctaataaccgtcggattaaaatccaaccaaaaagctttaaatctggacgggtataattaattcctcaaacttcttctctggaagaacaaaaaaagatgaaacaaagccaacgaagaaaagcacaattttggcgaaacccagtgagagagagacagagagaaaggagggaaattccagcttcccttttctctctcgttcttgctcttttgatctgcgtgaaaagaaagaatttttattttcccgacagagaaaagtcccaatttttaaaattaggactttttgattttcgaaaattttggtgttaatggaaacagatagtatcgattccgtgatcgatgacgatgagatccatcaaaaacaccaattctcatcaaccaagtctcagggaggagccaccgtggtaatctctccggctacaagcgtttacgagctccttgaatgccctgtctgcaccaattcaatgtacccaccaatccatcaggttcgtatctcatcatctcctaacattggagggttgagaaagatcttattgcttcttacgaatataaagttccaatttttatgatcgttatcttcaaatgatctgatttgtttatcattgctatggtatgttactattgagtttcttgagggtttatggatgttttgatatatgtatgagtgaaaaagtttcttcttttgtagtgtcataatggacatactttatgttcaacctgtaaatcaagagtgcataatcgctcttgagaaagtagctgagtcgcttgagttaccgtgcaagtattacaatcttggatgccttgggattttcccttattacagtaaactaaagcatgagtctcaatgtaactttagaccttatagttgtccatatgctggctcggagtgtgctgctgtaggtgacattactttccttgttgctcatttaagagatgatcataaagtcgatatgcatactggatgtacgtttaatcatcgttatgttaaatctaatccacgcgaagtagagaacgctacttggatgctaacggttagcattgttcttgtttatgatttacgagttcttcagttgtctgagattctgagggggttctttgttatattgttttgtaggtgtttcaatgttttggtcaatacttttgtcttcattttgaagcgtttcagctcggtatggctccagtttacatggcgtttctgagattcatgggcgatgaagatgacgcacgaaactatacatacagtttagaagttggaggcagtgggagaaaacagacatgggaagggacaccaagaagtgtcagagatagtcacaggaaagtcagagacagtcatgacggtcttataatccaaagaaacatggcactcttcttttccggtggagacaagaaagaactgaaacttagagtcactggaagaatctggaaagagcaacagaatccagattctggtgtttgcataacctctatgtgtagtagctgaatcaaaatcagccaacccttcaaacctatcttaaggtgttcgttcgatttcttcaattcgattttgtttcgggtttgtgtgttgttttggtccagaatccagatagcttctttacattcaaaagtgtatttagagaagtaaaaagagttgttccatttgccagaaatgtgcagaaggtcacaaaagttgcaataacttccaaagattgaatatttccataaatgtatatattcacatggtaagatctgagcaaagatctaatacagtaacatattcaaatcatatctttatttcattcaagaagatgtcctgtcatataataagtacacttaaaatggcttatggactatattacagatcttgagtttgtacataaaatcattcgtatacgtaacatacaaggctgagacaatctattgtgacaacccggagaagaaggacacaccggtggatggcaaccacgaagaaccagaaatgaactgagccaccgtaaacttactagcctctaccgttgaggtaataacatgataaccaggccatttgactcgttgaccaattcctgaacccaaccctttgttcatatactcaccatagtacaacgagtccaatgcaaacggaccattccactccaaccatcctcgcgggtcaatatggtcacccatatccgacatcatgtacacaactctagaatacaacttccacggacggccgagatacgtcggataactacccttagaggcttcaagatccggtgttgctagtagcttacaagcatgaatcgaaatccccgtattctgattcggatcttttcggttctgagccgtaatagtaatcttctgctgagccattggtttacgcgcataaatgttacaactctgtaagatcacagccgcattcccgaatataaaatcgaccgttccataaatttcgcattcgcggaaaaactgtcggttagaatgtacgtaaagcgcgtcttggtaaccgataatgttgcaacggtaaaccaccgcgtggtctccaccaacacggagtgccacggcctgatgcttagccggtccggcgtaattctcaaacgtcatgtccctcactataaatccagcaccagtcgcagctacaataaaacaaatatacataaataactcaataatgaagaatctttaaaagaaaaacagaacaaaaagatcaattttgataccgaaagtggcggtgtgaaaagtagttagatcatcggcgatacttttcccaccggttatgaccgttttacccttgccgtccccgatgaacatcaagtttgtcttcttcctaccaactttcagattctcttcttcgtatcttcctgctttaacgtagatgacgaatcgtcggctactatgctccggggctttcttgatcgcctccgcgatcgtcttaaacgttccgctaccgtctttcgacaccgtgatatcagcttgaatcgccgacgttggagtaccaagaagctctctgtcttctctcttcaaccaattaggtaattcctctgtttcttcagtcccaagtaacttcctattattcaccaccggaactccagataaatccttaacttttccggcgaatatagccaaacaattactcaccatctccgacaaatctttaaccgctccgatcacttgatccttcacttctcctccttgaccttcaatttcatcgaatccgtcagtgcaagtgtcgtggttagtcatcgcagagctaagccacgtcatcacatcggaatgagactcatctccggagacgacaacgacggaggaaagagcgcgtgtgagcgcgtccactgaatcatcaagtaactcaaggcaagaatcgtaagctgaccgtacacgtgggggcatctgagtgtatgtgatcgtcgaagaagtataaagagctttgctgaatttttgaagcgttgcgttgaatgatatgtgaatgagctcgttctcgtcggcggttaaagatcccggaaagtcaagaagtgtgtcgatgcataggttcgggtataaggatttgctacaggttcgggagattgcttgggtcggtttacgggttagtttcggctcggttttacccgagtctacggctcggatgccggcaaagataccgaagcagactactccaactaccaaaacggccaaagtgaagagaatcagcttcgttttagttttcttctgtagttccgggagtgacgtggcagggtccttctggttcgggtttgatggtccggatggaccgagcctgtcgtaacccatagtttttttttttttttttggtttagagtttgttaagggaacaaaggagatgtggaaggctctataaattattatatagaaggagctatttaagaataaaaatgtcatgagttctgtataaaactatatatatgtatgtgtcaatttcaatatatattatgcctgatagctgtaatattatagtcatatttaattgaaaatgtagtattcaaaaggaccacaaacaaacaaaatgtgtcgatggctctaagtctctaacgatataatatgtacatggtcgatgtatttgagtattcttggaggtgtaatgcgcatatataacgactgcatcactaaaaatttgttttagttttcataagaagttcattatagcaaatatagtaactaatatacctttattcatttctattatagaatcgcaaatgtctatttgcgatcaactgattgatgcttttgtgatattatattatatcaacacttagtgctttgaaagagttttctactcacctaacggtgtcggtgtttctttttttttcacggatatttgtttctttcttaatctcgatttgtttaattattttatttttgtttttaagtagcaaaagtttttgtatcgaaattcatagtcacttccacgttactaatactcgacctcgggatctttaaaactcttcttttcggataaccaaaaattccctggttgagttaacgactttggtaaaatattaggtagaaatgtagaattacactcgaaatgattatatgatggatgttcctctataccaaaccaacatgagtccttgacaacaatttcccgcaaacctactacggattatgagcattatctaattcacgtcgggttgcatgcggctagctcgaccgttggatcgatacaggctaggaatcaaaacatttctaaatacttacaagcgtatacatacaaaatcaacgagaacaggaagagtcaaggcaagcgctcatatggtcgaaaagcgtcgatgggacaaatctacatcgcccaccaactggagccccataaattaaaatggaatagtcattgagatagacctctctaccaatattacacacatacaaaaaaaaacgcacatagtcctccattaccatacgtagaatatatgcaaaggtgagtagttgtggattctatccggtttttttgctgtggttcaaatttcaatcactatattcccgaaaagctcggttcaatgctctggttaaggagtgaaactagtatatttttctactaggttcctacagaatcttgtttccatgcttaccatattggatattgtttaaagtaatttggtagaagaacacaaaaaataccctttttgttatggtatgtttgatgtttaagtcaatgtttttgccaaaaaaaaaaaaaaaagtataaagtcacgcggagaactagatgttgatatgatagaattctgtatacgatgagtagctatttagctataccataatgataacaaaattaaaggttgggtatgaagtcaatgtcaataagagagtgagctgtcctctaccataagtcttcttctgtcccttaacctctttttctttttcttatcttagcattttgtgctttgtctctttcaccaaagttctctatttcatgagaccactaacattctgacgactaatgaatgattcttgttgttccaattacctttaacaaaaaggtcttatgtggttcattgacgcatttgtttatcacattaccgtctaatttattaaggtatatagttatcatgtaaaatagtttcaaggttagttacatacgatatacatggacactataaaatatttttacaaatgttttaattatgtgatggctgatttcccatttttctagtaagaaaaaccttatgaaatatgatgaatttactgtttaagtttgacattagtattttaaagaaaactcgaaatcatcacaccgttgataacatgttgaatcgtttatgttttttttttcacgtcagaaacataaattaagcattgctaagaaagaattaattacgttagaaccacaaatcatttattttgtaaatttgtacaaattaaagacacatattcatgtgccactcaatacgtggacgtgcatgttttgatatccattattggcagtatatagataaaactgaatactgctttttagacgttatgggttaccaatcaggttatcatttgtagacttttctcaattatcataactcacaagattgataacaaacagatctcacgttagcctattcgtaagttccatttctttagatagagatatatattatgttttatatcgaattagcgaaaaatgaaccactatcttaattatcattaaaaagaattcagtcacttgcatgacatcatttacacttaataatgctcatacagttagatgaatttgacagcagcattcataagatcattgcttgttggtaatgcgttaaaatcttactgaattcaaccattggagagcagaaattaaagtcaaaagttgtattgattagagatagctaactaaccaaagaacgttatatatataattattagaagtttgattttaatctagacatcatagtgctttatgatctaagatatcttcatctctaattaattgataccaacaacttctcttttatggcttctgagttttggtgggctttgggctagaagctattaagtacttcattgcgggcatgtttgttgtttggaagagttagccgtataacacacgtattacatggaatcaatagatgaatatattgcgagaaactacataagagaaactatttaccctatctactacgtacgttaatctacctaactacgtattcataatcatgaagcaatctcacgtgggacaaacctgttaaatggaattacgtaccttaatgtatgcattttgatggaatctagatactaaaatatttcattattaataacgtctagctatctagttacttagtccttgttacaattttttactataagtttaagatatgactcaaactaaaatagaacaagctagacaaaattgagagagaaaatgacgaaggaagaagtagaggaggagcctctaagcccgatggctcggttattccagtcaccggggatagaaaattgcattatcacgatgattggtttcaaagccaagattaatcctgacatcattctagatgacttgaagcataacgtttccaagcatcctcgtttctgtagtaaattggtaattgccacacatacaaattgtacctagttttatttaggatttaacattttttttgtatgcattgtgtaaaattttgaagtcagatgatggtgagagatggatgaagaccaaagtcaatgtagaagaccatgtatttgtaccagacatagacctacaagagattaacaaagatggagatggcttcgtcgatgactatgtctcgcgtctaacattgagtcctctcgataaatcgaaaccattgtgggatattcatatcctcaatgtcaaaacatctgatgcagaagcggtcggtgtaatgagatgtcatcattctttggcagatggaatgtccttgatgtcactcttggtggcatgtacccgaaaaacatcaaatcttgagtcatttcctaccattcctgccataaaacggcgtgaacaaatgatgtcgcatcgctttggaaacaaaggctggtattcaagatcgataaacgcagtttattatgccgtgagattaatttggaatacaattgtggatcttctactgctttgggcgactagtcttttttttaaggatacagagacgcctattagcgagggtattggatccgggaataatgcaaggagattttatcaccgaaccgtctcattggatgatattaaactgataaaaaatgctatgaagatggtgagttacttgtaaataattttattttctcaacctatacttcctataacattgtggtatttgtgtgtgtggctagactatcaatgatgttctacttggagttacacaagacgctctctcccgctatcttaaccagcgatatggtaaatattgaaatgaaatataaatctaagcaatacattggaactaatttattctaatgtttcgcttatgtgttctgtttcttgacaaacaaggcgacaaaaatggtgagggtgtaacaacgacatcgaatctaaacaatcttccaggtaaaatacgaattcgagcaggtgttgcggtaaatctaaggcaggatattggaattcaggttagatatctacatctacatctttatcttagttgaaaagaatttaacactaacttgataaaacaattgtgtgaagcctttggaggacatgttggccaaggattcgaaatgtagatggggaaattatgattccttagtttttgttccattctccataagtttggaaaccgatccattggttcctttattaaaagctaaatcaataatggatcgaaagaagcactctcttgtcgcccctatgcattattcaatcatcgagtttatcatcaatactttcggaactaaggtatagattagtgataatggaacacaaggattgtttaatgtagggacatcatatgaaactcatgtcattgtaggtattcaaccgaacatgttcgaacacaacaacaatcttatcaaacattgttggccccgtggaagaagttagtttacacggcaattgtatcacttacattgctctaaccggctatggacactcgcaagtacgtgtttttcactattgaattatattgataagtttgtaatatagtactcgtaaagagatctttatatccttctaattttcgtatatgttatgtgtttggtaggcactgatgatacatttcataagttacgcgaacaagatgataattacgatagccgtcgatcctgcggtcataccagatcctcacaatatttgtgatgaaatggaaaagtctttgaaagctatgaaagacactctttccggtaaaagtgactgatttgttggaatccatggttgaagctatactaatttctgggaatattcggtatgtgtatgggtgattgtttacgtgtagtataatttatctgtaaaagttatattgtgtgactgtaattatgtgtgaacaccgaaaaatatgggtgtatgaatcttcacagctctatattgcattatttgcgatgtattgaataagatgaaaatcgctttcggaagtgaattagtatctattaaaatgatacactacatgcttaaaattttaacttgatgtcttacaacttttttatatcaatatgtctagttattataataataacttcctaaggtatcaatttagagtaatcattgaggagccgtagacaaagaagaaacgggcgaatccacattgtgatccacaacaaaagagctttagttagacctcaatctcatataaccctctttcaagaacagcggctttaatcatcttgagagactccaccaaatcatcacacatcttgtgagggtcaggaatgaccgttggatcagccgttaccgatattatgaccttgttcgcgtaggtctggaaatgtagagtaagagccttcacacacatacacaaaacacagttataaacaagataatctcagaagattctatgtgatgaattttctatatatattacttacatgtgggtggccaaaaacacatggggagatataattcagtgggtgaccatggaatgtaatttcttcctttggaccgaccacatttgaaaatgataacgttgtgctatggatcactttccttacaagaactacacttgcctgtattttttctttccccattagacaatgttcatgtgtatataaataaacaaaacttatgcatgattaactctgtagaaaatcagatttagatttcaccttgagcccaagaacttttagtatcaatttaaagaatgccatggagaatacggcttctagagagtgtttcttgcggtcaatcgtggctttagcttggcgcacgtattctagaggatcggtctctagcccaacggagaacggtaggagaatgtagccgaagagatttccccatctgcattttgatttcttggccatcatatccgctagagcctatattgcatcattgaacaataatgaaaccacacaatccgtgtaagaagtttcaaagataccaagactatatattgatgtacctcaattcctgcgtttggtctcaagttaatcataatggctgaacgaagtcggattctcctcatggactctttcgatttcggtgttgcttcttgatctgtttcaaaacatatgacaagagtttctttagatcagtgtgagatctaaattaatatgtataacatagtgatgtaaaaacaactttaccatattttcgactaaggtaacgcgaaagtccggcttgcgttactccaagaagaacatcgttcaccgtctaacaaaaatagattaaaagcaaaaaaaaatgtcagcgagtatacatgatcaagagattcttaaaattaggcaataaaacaaatttaccattttcattgcgtttttcaccagcttaacatcgtcaaaactgataatccggtggacgaacctcttagggataagttcactaccgggtttggccaagagaggagtctccgtatccctcaagacaaatattgtaagagcaaacattaagatatcaacaaaagtgttgaatagcaatcttaggatgaaccagagccctacaaataaccaccaaatcttgttgaaaaacccgctgttgcagctcggtccaaagcgttttttatgaaccgcaacggtaggcaaagcctcggggtctgatgttttgcgggtacaagccagtaaaagagacatgagagacattccatcacccaaagaatgatggatcttgagaatagcataggattcagcgttcgatgttttgacgcctagtaagtgcatttcccataatggtttagacaaatccataggaatggtcgttaacttagagatatagtcttcaagatactgatccggattttcaatgtcgggatccacatcaggaacaatcacatgctcttctactttaacttttgtccgaacccaacgcggcttcttcccattgttcatctcctgaattcatcatggcaagaaaaaaataatcacttttcatattaataccaacatagtcatgattttatatcatctttttggttaatgattaatacaaaacaaaaattataaatataaaagaggattgtttggcgtaataactccaataatacaaacactttaaaagaaaatgtgttaaactgttgaatattcagtaccaacatgaatccaataattttatatcatttcttaagtagttctctttcatgttacattatgtgtgtgtgtttacatacaaaatagaaaaagtaatttctaacaatgatgaagatattatttaaaaataaaataaaaatgtgtgtttggacttactaaaatgctagagaagcgagggtggtttacgagggtgtgttcaaggccgtggatgatggctggtgtgtctcctttaactttagatcccattgtaacgattattgcacagttaaaatccggcgaattgaacagccgtgaacatgggctaagtggttcctcctccaccgtctcccttgccgtcttcttgtcttcacccattctttgacctatttgtggctctttccaagctt

SEQ ID NO: 890 - DNA, 54528 bp, Arabidopsis thaliana
tgtggggttttggttttttcactcacagttactttaagctctattctctatatataaaagagttacacgattttagttatgaactcatggtccctctgtttaacatagctactacatcttcatgtcagtatattttatggtttttcttatgacatcaccacatggacattactatgttttataccttcgattttttgttactgaggaaaaatattttcagccccaaatctaaaaagttgttattcttatgcaaatattgtagtggtcaaatcaccagaataaaaataaactcctagggacacgaaaactttaatgaatactctaccgactattaattatgttcgaattataatttctgatttggaagagaagttaattccttaattctaagtgaatgactatagtgcaaattgataaataagaggaaacatattttggactatagtaatttacttaatttatcttccaaattagactatcaaactatagtagattttttgctaaacaaactatagtagatagggatacgctaatgaagagtctcttcctattttcatgagagatcaacaaccttattacttgccttaagtctttgttttatttggttaatgttcttacgtgtactattctttaccattttttaaaccatggacgtaacgtaataatcattgatctctccaatgccacgaatgcatgggtaggtactattcaatttatttgggccaaccatatcgaccagagattttcattgtagtaattcatttaatgttccctttttacgtaaaactcaaataaattataactattgtactaaacgtagaagttcttctgaccctccttttggtcattcattcaaataacgagcctcttatatgttacaaacatacgaaaagtgaagttgatgtcaatcaatatataagtacaatttattgctcgttgaagtttgcagaaatggacaaaacattttcttcttttttagttagttaaaaatcttgatttattagtataaattaaaacggattgtgtacgtattacacatttaagttgaagtttcagacagcttctttcaattaataaatgcatggtgtgtgcacttttattactctctaaagaaactgcaaacttaactttatctttcaatgaataagttctaggtaagaataagttctaggtaacaaccaaccactaaggctcgggactaaccaatttattgattaccaattgtaaatgtgcatggaaaaagttgaaaatttttacagcagcaaaaaaaacggttagcattatttcgactgatttgaaaacgacttttaaccatcatctcaaaaagtcaagtgatttaataatcgtttacaaaagagatggatacatttgtattggatagacattcctttgtcttttcgtgcttttttgaagatttttccatctttgaaagaattttttaaattattgtactgaccaaatcgttacagttttacttttaccacttctcataaaaaagttcgaacataaagttttattcatcaaagaaagagataattccacatgtaaaaatatggctcactggtctatattctaaaccaataaagtgaattcttaacaagacaaattgatctttctctattcatgaatagtgcattaatcagaaatcatgttacataactaatttacctcacttttttcaatctttctctattctctatgataaaactcgaaactagggagatgagccaatcaaggcttaaactgagttggtacttaaaaccatctatctgatctctgagtgaaaaatctttgttatattgaaaatctaatgcaattatggctctcattgccattctcatctttggtcacagtgagacagtacaaaagattgatttggtggttgcacctattcctcattcttattctgaacatttaatatcaattgcacttagtttgttatcttgtctaggtgggccttttgccctcgctttttgttctttttctttcttggaagttcttacgatggctttgtttttgatatcaagttctcatagtatgcttagcctttgttggaggcttagtcatacgacactaattaaggttgggccttattgggctctactggtttggttgtaaaaaaatttttggcccaggaaaaaactttagcgaaaacccaagggaaatgaatgacaaagagaaaagcttactacttctcgaaccttctcgatttggggacttttcaatttccctatcaaagtgaatgactttcttctccaaaatcgatttctgaaacatcccatttcttgatttccctctttgtcgcaaacccaacaaagtagagcaaaaccctaaaacggaaaccttccatggcgattatctctgaggtagaagaagaaagcagtagcagccgacccatgatatttccctttagggcaacactcagttctgcaaacccattagggtttttggagaaagttttcgactttctcggagaacagagcgattttctcaagaaaccctccgcggaggacgagatcgtcgtcgcggttagggcggcgaaggagaagttgaaaaaggctgagaagaagaaagctgagaaggagagtgtgaagcctgtggagaagaaagccgagaaggaaattgttaagcttgtggagaagaaggtagagaaggagagtgtcaagccaactatagctgcttcaagtgctgagcctatagaagtggagaagcctaaggaggaagaggagaagaaggaatctggtcccattggtaaaatatttaaaaaaaaatcctttttaactaaagcatgatgatattgaatctggaatcttggcttgtcattgatcctgtgatgtatagggtatgtgttcttaggattggaaactttgcttgcaaatgatggtcttgatcaagttttatgtaattggttctctttcgtattaagaactatgatatagtagaggagtatttagactttgaatcagtaaaactttttatatgttacttgttctagcccctaggatgtagtaagtatcagtaggttctgctagtgttcacctaatacaaattttaacatcagccttgttggattttgagttctagaacttgatatctctctagtgaaagcaaaacatcatggattttagacttgatggtagttttgcttctatcttatgctctagtgattctctttgatgagctttagtgttgttctcttgttatgtcgagtgaactttgtgtatgtttctttgcagttcctaacaaaggtaatggaactgatcttgagaactactcatggatccagaatctccaggaggttacagttaacattccagtgcctactgggactaaagcacggactgttgtatgtgagattaagaaaaaccgtctcaaggttggtctcaaaggccaggatccaatcgtcgatgtaagtttgttcctctgctattgtatcataaatctattccatttccatcctaatacccttctagtagtcttactaaatttgttaactttcaataattatagggggagctctaccgatctgtgaagcctgatgactgctactggaatatcggtatatgcctaactcctgagtgaacaatgatcgttatattgaactttgttggtaaacaagagtgcttattgctatataattctcaaaatgatactttgcagaggatcaaaaggtgatttcgattctcttgactaagtctgatcagatggagtggtggaaatgctgtgtgaaaggtgaacctgaaatcgatactcagaaagttgaaccagagactagtaaattaggtgaccttgatccagaaactcgctcgactgttgagaaaatgatggtatgtcttctaaagaattgtttctttctttattcaagtttctcgaattagaaactgaagtgtgtttttctttgttgtctttctatccatagtttgatcaaaggcaaaagcagatgggtcttccaacaagcgaggagctacagaagcaagagatccttaagaaattcatgtctgaggtaaacaataaaattctcctgcaacatctctatatcttcgattcttatcacattgtttttcgtatattgaacggttgttcttctttcgttcttttcacgcagcatccggagatggacttctcaaatgcaaagtttaactgatgctcgtatcgtccagtctctctgccaaaaaagaaaaaccagtttttgcatcttcaccagtttttaaaagcttgttacttttgtttagtttctcatttctgaatacatagttcggtttatgtccctagctttatgattctctggtttttattgaaactttttctgaaaaaaaaaactgttttctctaattcatatgagtctgctcttaaaccggacaaaaaaatggtatcaatgtagtagtacttctcctctgttcgattatgtcctgtctaagagtgattggtcttagtcacgtgaccgtgtggtgacacatggggtcttcattcaattcgtcatgaagcagccgttttcagtaaaaagataaacctggaccacaagacaccattgtggtccagacctgtttagttgggaatgtggtccatagcgttgttgttcgacaaccttctttcttcaacttcacataaggaatcataataccaatcaatctacttacgtaattgcataaccaacgcccctcattgcgtaaatgaattcactttgataaaagcaaacgattctctcctcacactgttaaacctgtgtttaattttgttgcaagatttaagcaatgatatagggttctgtttccgcggttggagcggtacaaccgtagcaactgcattttgaccattttcgatgtctaatgagcggaaccacatttcgtgtttgagaaatttgattccacaactctacaagtaagttttgtacttttttgtttcgttgcaagccaatcataagtttaaccatggaaaaagtttcttttagtggttcaaaagggagagacatttcagatcgttttagtgtgagcaggaatataggggctagaggctaattggctatatatggtcttgtcaatattcatcaattatttgaaagagacaaacgcagtatacaccaaatgagtcttattgttaattatcaatttcatcagcgtattataatccaatgttagaactctctttagtaagatacatcaatctcaatctccttaaacaaataatgttgcagatataaccaaagatttgccatgtgaattgtagcagtcacaaagttttatgacgacactaatgtacactgagaccaaagaacaaaaacatgtttcacagatataattggttggtaacattctttaatcacatcatagttatatattatacagttgtaacaatttaccttttacacataaaatttcaacattttgcttcctattctatctggtttgaagacaaatttgttgaccgtaaaaactattcaatttatatatgtaaatcattttttcatgtcttaaaactgtattcgaatttgaaaacgcctctaactagttggcttacctcattaaagaacttctttttataatgtcattcaagaacattttataacgttatcaaaaagattatttataattaatttgttaatatttataaaattgtgaccacgataaaatttgagcgataagaacatgtcatatatgttcataaaccacacttaatttgtttgtcgggatataagacatacgatgattggtaagtataggtttattttaaatcagttatcaaatcactctcgaaatagttcaacaaaacagaaggtaccctcgaatcgtcgttatagtaataatacattgttacaataatagcattggagagttatgtttttgtaagtttgatgagtgtatgttttagtaaaattttatacaataatgagatgcaagttacgtctgtataagccaaaatattagaatatattattttttatttatttaaagtttgcactatatagaatagatctttatatatgtttctatattatcgtgtattcctctatcggattaaaaatatgaaaaccataatattctaattttgtggaatgaattagttcttcatatgtttttcgttttaggtatctttgtagaaatcaacacattaaaaaccaatcattctgatcgcaagtccatcgtatataataagagtaataagacttgtgaatgaattaatgtggttggaccccaacaccacagtgaccacaccttgctctcattcttgtctccgcccatattccaaatgcacgtaatcggagacctttttaaaaatagttattaatctaccgagtgggttgattagtctcgttggaactttggaagcactaggaacaaaaaaatgcatccattgattgtatcagaaacgccaaatgtagcaatattcaccatcgtgagatgaagaaaagacaagttatcaatttatacagaaataaaagagaaagaaaaatgattaaagtgtcaatgttaataagaaactaaaagacccaacatgatgggggctcaaactcaaactatgagtcaaagcaaaaaacaaaaccaaaaacacccacttggcacttgccacttaattaaagaaataaaaatgaacctttcaacatacactcaacaaatttggaccatctatgtataacttttagatgtctatttgtctacattcatgcagcgagaagaaatcatggctcttcttttaaagaaataaagaggggaaattgaaaaaaaaaaagaagaaaaaaaaagaagaagagaggctttatggggtatagcttaagatgatgttatacaaatgagattcatttttttttaaaaccactattcaaaaatcaatataacttttgtattgacattaagtacaatttaaacggttaagttctaaaactagaacttgtgtggcaaagtcaattatgtaacctattagtatttagtaaagaacaagtccacaaaaataaaaatattaatatcgataaaattacatgtcaaagactcaaaacatccattgaattattttgagaaatatccctatcaatattattatttcttgtaacttaattgcactcacactcatatcaaacactaacaaatatatatgcgcccgcatattatctgtcaacatagatggctgttcttttttgtcctatttgatgtatctttcttctataatacaccaaagcacattttactttttagggcgtaaatgattatggtaaattaaatcagttttaactgattttgtcgttagtttacattgcagatcgattccgccgctagtcgctctcaaggggcagcttagtagcttattatgtattttcagtctaaacgttgccttggtatcttatacatagcacttgtcgttaatttacatttgagtagtataatatttgttactctaaacattctggtggtcgcaagagaaaaatagtgacttttttttttttgttaaacgagaaaaatagtgatttgaagcctttcttaaaaaaccatagttaaaactacttggttccttggttaccagctaaaaactgatgtttgttacacttaaataatgacgaaaacgaaataatataggtagtggtggccttcctaaacccgtttgaagaataatggaatctatctatgcatggaacaacataacgcaggaaaaaacaattcattaaaaaaaatctctcccaaattccaaaggattgtacattcgtactacaagtttttgtcgacaactattcgtactacacttcgttttagactattctttttctggtctgaaatatgattttaataataaatgctacacataaatcatttgttcttcggcaaaaaaataaatgaatttgggttagttatgttatttttaagcaggaaaaaagtaacttagttatattatgttttaaagttattagttacttttatttaatttaataagatattagatagtcactagtagagttcaaattgacaaaatcttgaggtagaagttgttgatacattaattgtaggttaattgtatcgcatgtgtttaaaatataaatgagttatgtaatgtaaagtagtgtgttatatactttgcagataataaaaagtgttagtttaattttccaagtactcttacataatttggctacttacatactccttttgaaattatatattttattaatatgttagcaattagcaaattaccaaatttgaaagaaaaaaaacctgaggtgaacatgttcctccaaaaactatttttaacatattccactaaaaagcttcatattccaaatgtagtttttataaattactgcattcccaaaaatttattttgatacacgtgtctagaaatactacgagttgggtttgtcaattttcgtcaacttaattcttcgtttatgtattcgtcttgcgaagaaactacttacttgctaagcaattttagtctctataacgcgcaaacatctctccagctgttttcccaaattgtatccccatctctttcattttctctaatgtattcgtctctttttaatcgttttagaatactctttttctcttttaaaattttaaatatctttttcacatttagcttttggttttgctttaatgtatacgaagaacattctgattgacaataggtggaaaggcacatatcttatatatatatcacttaagatcctattcaatttccgatgtgggacattgtccctaatacgccctttcgagatgatgactcttctagccattgatctcgatatgtttgggcatggatcggcgggacaaatattgggccggtccgatgtggatcgggttgagtatgtacggatcgggctctgataccatattagagtgtgggcttccaacctaaaaccaattggcaataggtgaagagactcatatcttatacatatcacttaagatcctattcaacttccgatgtgggacattgtccctaatagaatccacccaaaatatacaattttatgtatataaaatagatgatcatcaactaatataatctatgttaatacaaataaaatccatcttgtcatccaaagaaaagttaactttgctatttagattagtatgagtatacatatatagatttgttgacgacattattaattagaaatttagaatcagaatgttcttgattcctactcactaaaattacttcctatatataggtaggacctgcatgtatagatacaaacaaaattgtcgtatctactaatcatatttaaatatatattatataaatataagtataattggtccatccgtttacagttcaatacaaatgaatctatatcttataaataatatttgatgaaatattagaagatactgttataaacgattgcatgtggaattgttttattagtcatacaatctaactaaaacaatagtaagataattattaaaattttcaataaaactgaaaactatttttattatgcaacattaaaattagaacacgcgttgttgtttttactgaaactcaaatttatattctgaatcaactttatgaataaaaatatattaaaaaggtaggtacattgaactcatttttgcaaaaaggtaaaacatattttgtgcttcgaaaattaaatattacttaattccgacaaaatcaaatggccaatgagtgaccggggagcacttttgatcttttgaattatgtttgtctcttctcttcgctccttggagctagtgcgtcttaaaagtagtggagagtttcatattcgggctgctttaagtcttttacaaaaaaaaaaaattatatatatatatatatattctataatagccaattaatctagaattagcatagagttttgacgattgaaaccataaaagaataggaaattacaagaagaaatatggggtttctcattgaacttaacatgtaatactctccgttgtatacatatttaaattgtacggattctaaactatatatgaaaaataagaagatttttatttcttttaaatctgatataaattcatagttataacttagaaaggcaatatgaacacgaaggaggttggaaactgtaaagtgagtggctaaccaaggaggtcgtatctggcatgaactttttcctttttaagcagatttatatttaatatttctatttcgtatatagttttatttcccgaatagggaatgttaaggttatagtgttgcacgttgcctttattcacccaaattcagcgttctgatgattgttcttttttttttcttccaccggaagcaatgaaactaggacctctattgagtatttgattgagatattgacttaaataaataatataatattcttttgggttttgttttattccgtttaagactttcagtagaaatttttgttgaaaaaaagaaagtagatttttttaatagatgttaaaaacaaaaagtatatttataatgactgcaaattctctttgttaaatagttttatgtttatcaatcaacgttagcgttgagattctctccataactcgatggaaagctattggctcttttttccattatcttgtaaatgcattggttagggacaaatataaaacagaatgattcgacaaagctggtttcataactaatgtaacccatggattcctattttcaaatttttgtttcatagtccttaagattcccacaaacttttacatttaattttacatttgtcgattattttctaccgatcatgtatctaataaattttctaaataatattaatataaaatcaaatatatggtgattgagttgaatgctttgcgttctatgccgttgacggctcagttttctcggacttccaataaaagactttcatccgttagatttattattgaatcggtctttcctgtctaataattcatttcttgtttctgaaagtgttactccctccgtctcactaagatgaattttttagaaatttcacattctttaagaaatattgtataaagacaattttaaccttttaatatacttttaaaataataataaatatttatctaattatttagtaagagtaaaacgggaaaacaattttaaaatttgattggaaatataaaacttctatctttgtaggacaaatatttttcctagaaaatttatctttatgggacagagggagtataagataatatttagaattgtttattattttattgatttcgaaaaagcatttttttgttgacgtctatggattgattgttctttatttttatatttttattattatttttttggccatgaaattaaaattgatagtttacttattgtatatcataacttttttcattttttaataaaatatttacatttttagcaaaaaaaataaaaatgaagaagttggtcgacattttatcagtcattttaggtttttggtatttgagtgttttaattatttacagtcgataattagatcatggtttcgtaagtaataatataccgtagtattgtacgaacccagaaccttgaacgtgtatgcgtgtggaaacctcaacacatgcacaaacatgcacacacctaaattgcgtttaacattacgatttaaatgtgattttctcaattcgaatccaatttatgtataccaccaaattattacgtaacaatccgaattctaattcttgaatgactaacacagatgaatgaaaaaaaaataaaaaaaatagatgaatgaaatccatattccgtagtggagcaataatgtttataaatatatcattttctaatctcttcagcttaattagcttagagctgtaatacccacctacaatcatatattcatataaatttatgttaaagttatatttattctttaaatttcacatataagtatattattaagtgatttgattgtgaattatcatcacatttggttgccatgaataagatcgtgacgaaagaacaacaaaagaaattgtgtcttcatctggaaataagtaaacaaagacaaaaatatctctgtcgtcttttatcatcagtgtgttattgtgctaaaaaaaagttatctttgattcgaatatgatagagacccaaaggagtatataattataaatcatttttattcctatatatagtccgaatctatcttatgttcactaatatttgattaatttaaaccacgaaatcaatgtatttctttcacaaattaatgaggtagaacggatgcatttgcatttatattcagtaggaaccttatttcgaaaagcgcaaagaatttaatataatgaattaactcactttcaattggttataaaataaaaatttagtacttttttcttttcttttttttgccaatttcttatctccatacgttcttaatcagaaataattaaatattattagtcagaacctacaacggatcacaaaattgttatacttatatcaaaaagatttgaatgatatatcacttctcacttctgaaacgcaattcgatgaagtgatactattcataaaatttcatgttaaatgataaaagttaaaacgatttttcaatttttcgcacattttaaaattacatctaaaattattaactttttcaataatattttattgtttatttgagagtggaaagtaaaatgaggaagtggcagaggaacagagccatgtaggagccacacgaacatgtgctttgtggtaacagtcagctactacatgttgcagccgtaccaccataatatattagttaatggattaactcttttaataatcctctcttattgcttagtaagttagtttacaaaagcaaacgatctttttaaagtctaataatcccaaaataaaagaaaaacaaatattgacaaaatcctaacctaatcaacatcagtctcttgttttaatgttaatttcaacttggcagttcttatctatcccaatctcatatggtttattatcattttttttttttgtctttttatcactatggtgtattgtatctagattgaattagattcttgaaatgatgtaattgtaagaatatctaacgtcaagaactttgggattaaatttaaatttataggaaagaatggacttaagtaaggagataatatttgcagctatatatttgacaatggatcatgtcatcatacatttttttgtcaactcttaaaatcttaattcaagaaatgtttttttttttcttttgttttaatctgtttttgtcaatattaaaaccctattttgtacaccagggtcattttcattgagtaaaattcttaaaaacttcaaaagtttatgttgttggcaaaggaaatacgtaagcgtgtaatatgtacagttggaatagtgtttttgctaaaaagaaaagaaccatatgattgaaacaatggaatatataaaaagacatgtgataaaataaaatacaaaaatagtcaagaacagtttaatggattttccttgcaagtcgtcatgctcatgaacctgttttaattgcatgcttacatataaaaataattaactcaaaactcaaataagatcaaacaaaatatcaaacttttgatacaaatttaactgtcttatatccttgacaaaaaaaaaaaaaaaaaaaaatttaactgtcttatatcttggttcttaatcccttgtgaataaccataattagttgctagaaacaccttgcaaatttcataatcaaagtgattcctaatttatgtgcgaacagaatattaatagttgtaagcaatgcaaaaacaataccaaaacgattattcttgatgaaaagatggaaaaaagctaagcacaactaatgttcaaatttctaaaattagttaggcagtaatctggcatttaaacatggtgtaatacctagtaagccaatcagagattaattggaattttgtttttcccgtattctcgtttttattgtaattttaccacttctagccatttataaatattcaaaattaaaaaaaaaaaatatcttgtaggactttattttttttggagttttaaagttcactgataatttaaccaatttagccaaaattaaaatatttgaatgttttgataaatttttaacatttcgttttccaaacatgtaaatttgaaatcgatacatttacaagattagcacaaaccattatgctaaagttttagtcggtgcaacatatataaatatgaaaaaataaactattgaatatatacacaacaaaagacaatttctctattattatgttgagaaaaaaatctttttagattaaataatagtaatggctttatgggctttttactctatcgtgtccacagtacccccaactaaacaaaaagaaattgttaaagagctctctctctctctctttcataaaaaggcaagaggagagccaagtaccaaactttttccttcagggttttcctctcaaaatcccaacttggcctctgtttttgctttcttttatgttctcttcttctctaaaaaccatctcatacttccaagaatttctctcacaaagaccaagaactcaaaatgtatcaagattctggattaatgctccgttacatgcaaaactgtcccccagatattcaacaattcgaagacctcttcaaatcatacaaactctccgatgaaatggtctcacttttctttcaattctgtttttttcaattcattacatttgattacagatctttcttctttttctttacttgagattggttttcaatttttaaacactttgttttggttaaagattctgataggttttttttttgtcttttgatgtaactagtcttctttgttcctctttttcttggtttacgaagttaaaatttgtccactagtgaagtggtttttgtggtgtttaagtgttaagtagctaacttttttttttctggtgaaatttttgtagccacttgatgagatattttggttccgctgacatgagcaaaatgtgtttttggctgctgagaaagttgagtaagaaaaaattaggttttttcaaaggaataaaaacggaatcttttttctgctgcaaaaagccaaaattttcttttccattgaaaaaaggagttttcttgggacaccaaagaaagtctctcttttttgtttgtgggttttgattttgataatgggaatttgctcctttttcacatgagattccgtgttcttcaagacttgttctgttctgatttataaaactatagaattggttttgtgttatttaattggctctttcttctcaaaaatcaatactccactaaagaaagaagaagattcttttttctcttaccctttttgaacgaatccactcaacaaaaagatctatgtttcactgtctgaatgtctctaactatgttctgtcttgtgtggtcactgattcgatgttacttatgattgtccttttttttgcagaacaacacttttgttgagtcatcaaacatatctgagtatgatattggagaagaaagtgatctttttagagctcctgatccaattcttgaagaaccaatcttaaccgttgatccactctctgctgctttgactatgatctcttgtggtgaagacacttcacaaggtctttgtgagcttcctgatcttggttcattgcagagtggtcaacagcttcttgacaaagctttttatgaatgtgagcaagatcttatgatgaaatcagctatggagtctccattctctgatgttttagacatcaagaacatctctgttgtgacgacaatcaatgagaaccaggatatgcaaaagagtgttagctcggggaatttgagctctatggattggtcacatgcacaacaagagactgtaatgattcagaattttcctgatttcgattttggttatggaatgcgaagagcctttagtgaaggcgacatacaggtttggcaaaacattgatgtgaaactttgttagctaaatcatcaagaatttgaataagttgtatcctttctagactcttgatatgaatatgattgttgatttgagtctcttttgtttttgataagcagaaacttggggcaggtcttgttcaatctccactagataggattattgtgagctgcacttcagaagatcgccgtgagaagctttctcgatacaagaacaagaagagcaggcgaaatttcgggcgtaagattaaggtatacaagcaaaacacttgaagtcattttagctcaaaaacaagcacttgaagatcctctaaatgttgtttggtttggtttcagtatgcttgcaggaaagctcttgcagatagccaaccgagagtccgaggaaggtttgcgaaaacagaggagaggaaatagaatggttcaagaaaagggctcaaaggaaggagactaagcaaaaggaagaaacatgaagaataaggagataaagcccatctcattagaaactagttttgttttatatatctatgtataaactttaaaatcttataagcatccaattagttttttgtatataaagggtttctctaaataagctttaagtaaagaaattgtagctaaagaaagtttgtattattgtagtttaaagaagtaatgtatcagtgggtgagagatgtatatacataatctataattctacatatttttataaatcatgtgatgtttctttgcttgtaagcattgcaacaagttagatttcaatcttctttgacaggtttcacatattgtattttcattttacatttttcatctttttgacgctatactaatagttctcaatgttaacgctagcaatcaataaaagtatttggatgctgaaatatcatgtcatgtcatatcattgctggtttgtccctaatgattttgtttctatgattggctatgtagccaaccataggacgtcatgtagaacgaaggcaatacattcaccaagtaaagaattgtgctatcctagcttctgatcaaacccgtttctcgacattcatccttagagtaaccagttcggtcctatacagatgaatttaccaaaaaatgctgccttacggtaacaatacgcgtctctcgaacttcgatcttcttatgatcccctcagctcgaaggtatggacaaatgatagcacccgaccccgggtcgaaagatcactaaatgatactaacacccggtttgaagttccgtaaacctcgataattactgagattatgaaatttctattagtaaaacaccattgatgtcaaattctacaaaagagagtttcatctttcatgtatgtgtgtggaagatgaatggaaaatgtttgtctttgctcaaatttcttctctactcatagttcatcttcttcttgttttattaacaagttgcacatgtttcttgttcgataaccacttttagcaatatttttcgtgtaactgtttttgagtacttttacttgatttattagataacaattgcagtgaacacattgacacatcaatttcacctttcaaaaaaggcattcttttggtgctttcaaaccactcttacgttttctttgtacggaattgattcgattgtattacattttatttctctctcagattcaaatcccagaagttcttttaatcaagtcaaggacttccaacgaaaaacaaaaaatgaatctgtgcctaccaaaaaaaagttgacttcttttcacaattatattaagaaaacgagaattaactttaaaatcaagtgaatgaaataaataagaaacacaaaacagctcgcgtgtacagtgtcgtaatcgtaccatgtaactaactttccagttccatggttcttggagctttattattaccttcaaaataacagaaacacagtttgattttgaacttgaacgaaacaaaaaaaaacatgaagagaatttgtctaaacggtacaaaaccagaagacaataagaaaacgaagaaggaagaaaaacattggcgcaagttagccaattctccggtaatgtgcacacgtccgataacgaaaccaatcttttttaatttcattttccttctctctcacttctcatcgtcgttcttctctctctcttaatactactctctgtcacgctctctctctctctctaaaaattccgttcaccgaagcaaccaaaaaaaaaaaaaaaaaatcgtctttcggattaaacaaaattcagctttctgtttttttttttccttatccaaatcgaaaaacaaagtacgcattgtgtttttatttttctgggtttcttataatttaaaacagagagagcgataacaaaacataaaagtaaggatttgtccgaaacagatctctctgtctctgttcttttctgtttttgggtaaatttttttccaaaagaacgaaactttcttctacaattctaccacttcgatagtgggtcaaacccaacggaggatcatctggttttatgttcgtggaacttttttcgagaattggggaacgattagggtttgtggaatttgaaaaaggttcgtttttgtagttggatttggtaattcgatatgataatcaaacgaaagttgaaaactttgaaacgatgtaattcgactaatgaagaagatgatatagttcggaagaagagaaaggtcaacctcaatggtggtggtagtggtggtgattactattaccctcttaatcttcttggagagattggtgctgggattgttcctggtaagaatggattctctgtttctttgtgtaagcaagtttcgtgttctcctaaagttgaggtggtggaggaagaagaggaggaggaggagataaagtcaacgagattagtttcacggccaccgcttgtgaagacatctagaggaagagttcaggtgcttccttcacggtttaatgactcggttatcgagaattggaggaaagataataaaagtagtggcgaagaacgcgaggaagagattgaagaagaagcatgcaggaaggagaaagtcaaagttagtagtaatcatagtttgaagattaagcaacaggaaactaaatttactcctaggaactataagtatagtagtagtagtgcattgtgtggagagatagatgatgaggataaatgtgaagagattgttagatatggtaatagctttgagatgaagaagcagcgttatgtagatgatgagcctcgtcctaagaaagaaggtgtttatgggccagaggatttttattctggtgatttggtttggggtaaatccgggaggaatgagccgttttggccggctattgttattgatccaatgacgcaagcgcctgagcttgttttgcgttcttgtatacctgatgcagcttgtgttatgttctttggtcactctgggacagagaatgaaagggtatgtttgtaaaattgtgttcttgtgtgattctgaaagctgtttgttggagtattgactgtagctaacttgattacgtaagcaggattatgcatgggttaggagagggatgattttcccatttgtggattatgtagagaggtgagtcgatcgtagagtcttacggaataattgtttttgatttatatgtggatgttttgcttaatggtttgttgttatttaggttacaagaacagtctgaactgcgtggatgcaaccctagggattttcagatggcacttgaagaagctcttttggcagaccaagggtttacagaaaagctgatgcaggatattcacatggccgctggtaaccagacttttgatgattctgtctacagatgggttgaagaagctgcaggctcgagccaatatcttgatcacgttgctccaagccaggcaagtttctctttgcttggggtttccttttcgagcatgtgtacagtctattcctttataattatagaatctaagtttatatattttcaggacatgaagaaatacagaaatccaagagcctgtgtaggatgtggaatggtcctttcttttaagatggcacagaaaatgaaagctctgattcccggagatcaattattgtgtcaaccttgttcaaaggtaagttaagtttttgctatgctccttctggttcagtttcaattcgacgaagtcaactaattttatcattgcagctgacaaaaccgaaacacgtttgtgggatatgcaagaggatatggaatcatttggatagtcagagctgggtaaaaagacatacaatttatgttatatatttgtagtgtagaatcagctaatgtgttctgacaattttaccgtttgattacgtattgtgaatcaggtgcgttgtgatgggtgtaaagtctggattcactcagcgtgtgatcaaatatcacataagcattttaaggtacatgttcatgttgctctttgtcaaatttatcattcccaattactttcatgtattgagatcaatttcatttgttatctgaaggatttgggggaaacagattactattgtcccacatgcagaacaaaatttgattttgagctatcagattcagaaaaaccagactcaaaatccaagtagattttctttcctccaactgttattgtttattcttactaacaattgaattgtgaatatcaaattctaaatttgagagttttcttatagacttggcaaaaacaatgccccgatggtgcttcctgataaagttattgttgtatgctctggagttgaaggcatatattttccaagccttcatttgtaagctgtcaccatgtgatcactatttcacattgtcttaacttttcctgcctactaattactctagaactggccaaagcaaagacctttttgattgattgatagagttttcttacttcgtttggtttatctacagagtcgtatgtaagtgtggatcttgtggacctgaaaggaaagcacttagtgaatgggagaggcatactggttcaaaagcaaaaaattggagaactagtgttaaagttaaaagctccaagctgcctctagaagaatgggtttgtacaaattttcttgtttcctctttaggaatatgatctcattcttataaatttctcccatcagttacaaaaatttgaatggtccttgacactgtagatgatgaaattagcagagttccacgcaaatgctactgcagcaaaacctcctaaacgaccttctataaagcagagaaagcaaaggttactttcctttcttagaggtattaagcaattcggatctcagaacttatccaaaactttctgctgcgttttgcgctgcttatactggagtgttttttttcattattggcagaaaagtatgagccggtcaacgtgaaatggacaaccgagcgatgtgcagtttgcagatgggtggaagattgggactacaacaagatcattatctgcaacaggtgatgttctaaactgtgtagtttctcttaaactttttgacaaatctaagattctgattgaaaagcattatttcgtcatagagtaaacctttgtgatagcttgatttgatgtttcgattatcttcaatctttggatcaccagacagttcttattatattgaagtttcttgctattattattcagaaaaaaaaaacgagaaaatatctgacttgtgaagcatatttggtatcattgaattttaagtcttctgttccttttctcctcagatgtcaaatagcagttcatcaggaatgctatgggacgagaaacgttcgtgacttcacatcatgggtctgcaaagcctgcgagacacctgagatcaaacgagagtgttgcctctgtcctgtaaaaggtatgtcttttgttgtgtttcttatttggtgaagcatatttaacatagtcttgtcttattttattaacaactactgcagtcagtaaaaagtgttcttcaccgtagtgattgatttttcttgtggcacctagagcttattagctatcctttcccctcagatcttatagttttaccgagaaattttgcattgttgcccatcaactaaatttgccaatttttgtgtactgataaataggaggtgcattaaagccaactgatgtggagacactgtgggttcacgtgacatgtgcttggtttcagcctgaagtatgttttgcaagtgaagaaaaaatggaaccagctttggggattttgagtattccatcaagtaattttgtgaaggtacatacctgattcctggatatcatattcggcctatcgtgataataagattagctcctgcagttacttgtttctaaccttttgggaagtttcactatgtgcaaaactaaaaagccagaaaccttatcctgtttttgatatattccagatttgtgtaatatgcaagcaaatacatggctcatgcactcagtgttgcaagtgctctacgtattatcatgccatgtgtgcttcccgagctgggtatagaatggaggtaagtcatattatttctgatttatcccgttccataataagttcttcatttgaccagtactaaatcaaagagctgtaacatttggtaacatatgcatttttcgaatgtagttgcactgcttggagaaaaatggtcgacagataacaaagatggtgtcgtattgttcttatcacaggtaaatgttctcaaaaccttgtttgcaaaatcatttccatctgattttgggtaatgaatttgttctctgttgtttttggtgtagggctccgaatccagatactgtgttaattatacagacgccttcaggggtcttttctgcgaaaagtcttgttcaaaataaaaagaaatctggtacgaggcttattttagcaaacagagaagaaattgaagagtctgccgcagaggataccataccaattgatccattttcttctgctcgttgtcgactatataaaagaacggttaatagcaagaaggtatctttgttgaattttcacaaactctgtatgcataggtttaaatccttttttgcttagaagactgatccattatgtgggtgtttgtgatttttagaggacgaaagaagaaggtattcctcactacacaggaggactacgtcatcatccatccgcagcgatccaaactttgaacgcattcagggtaaaaaataatctttctgtagtgccaatatgcataatgcacctggaataggcaacttgggactgagtcattttgttgaatataatttgtagcatgtggcagaagaacccaaatcattttcctcgttcagggaacggcttcaccacttgcaggtaagcattcctcgcatatctgaaggagactgtactatatagttgtatcttgttgtaataacatctgacaagtttcatgtgttgtgacagaggacagaaatggaacgggtctgctttggtcgatctggtatacatggatggggcctttttgcgagaagaaatattcaagaaggagaaatggtaagcagagccatcagaacatacttcttccaagaaagaaaatctacggcatttcctctgttgtgttgacgaatattgaaatgtaatttctttccaggttcttgaataccgtggggaacaagtgagaggaatcattgcagacttaagggaagcaagatatcgaagagaagggaaggattgctacgtgagttgaaagcgatatatcccttgtggcagtcttaacatgtgtgcatagagttctaaaactttattgttttaaatttgttgcagctgtttaagatcagtgaggaagtagtggtggatgcgacagagaaagggaatattgctcgactaataaaccattcggtaagcaacccatcaagtatataaataagttgagtgattaccaacagattagagtcttgagtcctatacctaaatggtgtgttgtgtgatgcagtgtatgccaaattgctatgcaaggattatgagtgtaggagatgacgaaagtcggattgttctgattgccaagaccactgtagcttcctgcgaggagttaacgtatacacatcactctcttgaacataattcaagtatcaccctttgattcactgaatatgacatggctgtgtgtgtttttgcagatacgattacttgtttgatccagatgaacctgatgaattcaaggtgccgtgtctatgtaaatcccccaactgcaggaaattcatgaattagagagttttatgtagatgatcttacacataagaagaagaagaagccgagtatcgttttgtcctcgatgactactaactcaagaacccgttgctctccacacttgaataggaagcttatggagtttaaagctgatgaaacttctgaataagacacttcttcaaagctccaaggcgtttattttgtaggtaataggactagttgtagctaagccctttttcacatttagcatttctgtatagctaattttcagaccttatccattttcgggtttcaaattactcaaaagatcagaaaagcaaaaaagaaagacaatgcaaatcatttttggtttctataatgtttattttcttttattatttctttcggtacgaaatgagtgaagatggcacaaaaggaacatgagaagaatatgaagcaatggattttgagaaagagaaaaaaatgcattggaagtaaaatgatttagaaagaaaaaaaacaaaacagaaatgaaatggaattatagaaatgtcttaatgtgtactttggggtgaatgatgtatccgacttattactgactcatcagattcatgaactaatggttcggttaccttcggagatacatccccaacaactacacttccatctccatcaccatcatcagcttcagcttcctcaccatcattagctcccttcttctcttctgcttcttccatgttctcatcttcagataaatctttccgctcatcaacatccatagcctcgagagtcggtggtgctactgtcaaggtaactgcatcaccttctggaacaccatcatgctcaggagctgtctccattgtttggtctacaccagctccatcatctagcttagcctcttgctcatcaccttcaatgtggtctaaagccacagcttcctcagaaccttcaatgtgatctgaagccatagcttcctcagaaccttcaatgtgatctgacgacacagcatttagagcctcaggtgaattgtctggattgggagacgaagatccttcatctcgtgtttctgtctccattttggcaccagcatttgacgacactttttgcagttccttttgggatgtgtctgaatctgatacatccgcaattttcatatctgttgcctcaattgaactatttccattccttgcatcattcagatcatcattgttttcaactttaaccaagttggaaggaggcacttgaggagcctcgtgatttttgacatttggaagaccctttatttcaaatctttgctccttgtagaaatccatagcaatctgcaagtgggaagctcaggttattgtattgacataagtctcgaattgccaggagctactaccagaatcttattttccttgtcttagtgcagtacctgaaacactgaactgttttgagatggaaacaatgaaagagccttcaaggaattactgttgcttttggtcactctctttccaccttcctgtaattaaaagaatatagagagatatgagaaaagggtctcaaagttgcacacaaatagaatgattgatttctatgtctgaggatagagaattttaccttgagatttacaaacacagcagtcccgtcatccattgctagatgctcttcgcctatcaataaactaatgcatttacgcagctcggcatcagcaagtcctgccgatacatcaagctttgagagataatgccggcagtaacgttcagtgttatcaattgtttctgaaacaggatcgtcagctgcaacttcctccatcgttttaggagaacttgcatgcagttcttttgctggagatgttagattcgacccagcttcaacgctttttgccctgttattatcagagtggcttgtttggccgccaagagactcatcatcagcaacctgagctgagttatcatctttaacagacattgatgagacttccatgctcgcatctccatttcgacttttccattcatctgcaccagattcccagccccggccattcatccgcctgttttggtcccattcagatcccccatacatgtttgattcatccctaacactattactcatatccccaaaaaaaccatgcatgtgagaagcgcctgaactgtccatcatattctgccacccaagtggacgcatgtgaccagagaacctctcagcatcgggtatatggtaagagattccctgatggttcatttccattgaaggtctcaccccaaagagagctggagatgggaattgtggcatcatagtttggaaagctccatgaggtggaacgtgttgaaatggaaaatatccattggagagtggagatggccagcttgggacacctctccacatattactttgccctcttcccatcatcgcatcaacaccgcctctcttatagcgtccaccagtattgaccctgttatcctcttctcgagggcccactctagggctactaacgccactcctagattcaggtcgtggagggaaagaagaattgttctggttggctttattgttaaaggataattctgcctgggacgtctcatctaccagatgcctttcctcctccgttgctgaataatccctagcgttgttcctatgacctgtttcttcaacctcaatactccgtcttgcaccaccacgattgttgtacctccgctcaagactagttgaagagggagatctttcaaccattggtcggggtgaagcttttgcggcaaaagacctttcagccggaaactcgcccaaaacaccatcttccatatttgctgttttctcagaaactttttgtcttgttcctctctctgatcctccagacaactcagccacctcccttgaagaagcccctttagttatctgatctgaggcattcctgtttcaccacaacaaaatattgatcaatattcttcaaaagcttaccacaaaatataaaatctgaaatccaggcagcagcccaaatctccattagaataaaatagtccacaactaaaaacattaaattccaaagacagcacacaaaacgtttccaagtacaaagagcaccaaccactacactaaactgcttaaagaaaaatcatacccattttcttcttgaaccactgaactggaaagttgacgctctggtcttgtcatatcaccatcaggctctactctgctactccttgagcccgtgattacgtcctgataatcctgataatctggagacctcctaccgtccctcctatccttataccgaccactttgatcatctagacgcgacacatcacgatcattatccctttcacggtcgcttttactccgtttcccatcatgataatagtcacgactacgatctttttctctgtcatgagtcctgtccctctcatgatcccggtcacgatctctactcctatcacggtcccaatcccggtcatggtaacgatcatgctcataatcccgtcgatcgcgatcacgttcccgatccctatctcgatcacggtccctatctcgctcataatcacgatcacgatccctagttctttcgcggtcccgttcatttcggtcactttctctatcatagtcccgattgcgttcacgttcatgatatccatcaagttcactgtcaggctcatgaccatggtcattatcctgaaatttagatttctttttactctcatctcgagtgagcttttcatcagacctcagatgttctttagtaggtcggtcatctctctgcttgtcacctttctgtttgatgtcttcttcttctttgtcttcccgatatttatctctgcttttctcccccttatgctttccatctttaatgtagtcatctccagaagtgagaaccctgtcaccaacgtcatcactgttatcgtgatgcttgtctccagtaccatgatcatccctcttacgccttgatcgcttctcagtataattttctgtacctggactccttgcatgatcctgagcttttgattctgaattcaaaagtaagagaataattagcataagaccctttgcagttttctagactatccaactaaatgtgagaaatctttcatcaaaatacacctatgttaaccagttaaacacagcctccaacataacagcaagtaaagcaacactacctccattaatcttagaaaaggcagtagaatagaacataacaacaagtaaagacgctaaatcggcatctaagttcatattctagtaagaactctgaaccaaaggaacagtctttcaaaacaacactaactaaaggcaatgtatccattttcaggttcctacaaatcaaccatttgatatcagatcaagatatcttaccagttttatcagaaccagctttggacttatgatgatcatcaccatcataaaacttgtcacttttcccttctttatacttcctatctttctccttatcaacatctttactctcccttctactagactctctatgcttcccatcacttttaccactactcttcttcgtctcctcaccatctccctcatctctcttcctactcttctcactcgaaaccttcgtcttcttcgaactctcacctttatcatcatctttaccattccacctatcactaccactctcaccactcttccctttcctacgcttcgacgaagaagaagtatactcctcataatactcaccattaacagaatcataatactcttttctcttatcaccagaaccagattccttcgaaaccctaacagtagtactactctcctctttactcttcttctccttcaaactcgtctctttctccgaatcggaatactccttcgtcgcatctttatgcttactcgatttatgcctcgtactccttggcatcttccacaatctctaacaatcgcaaaaccccccaaaaatatcgaattttcaaaccctaaatcgagattgaggtttttagggactttggtttgattgaatcttacagcggacttaaagattaaaaaaagactctcacggcggcggaagaatctagatcgccggcgatttgaaagccggcggcgagatttaattggagaaaattacaaaagaaccacggagcgggagatatagagaagatagagagagagagagaggaggcttaatgccctttcaatgttgaagaaaacgagaaactgttttttttcagacaagaggaagactaagggattatttgtttaatgactatcttatcctttaatcgtgggttttattacagttttttgccacgcacgttatcagatcggattttgctttcgtccggtttttgggaaagtagtggttcggttatttctcgctagcgtcgtgccacgtcacgccgcgactcaaaaactggaaacagctggagcccaataaaggcccattaagaagttattggcctagtaatgcccaatgagagtttttattagctaatgaccatattaaccagtgatcgtgggtattattacggtttatgccctgatcccctaacgttatcgctttcgtccggtttagtaaagcagtgcttcggtttattacgtcacgtaactcaaaactggagacagatgaagcccataaaaggaccattacgtaggtagtggcccaataaggcccaatgagagttgggatgagatatttgagaggcagaggttgacgtgggtcgacctcgaggcgcgatgcctcaggcgtacttcatcacgcaactatcacgagcctctctgtcgttatatacgactttcagtttttcttctgatttgggaaagaatcaaacttttgaatgtgaagttgcttctttcgtctcaagatctctctttatctctctatctgtttgattggtaagcttttgattcgagtgttgtaatgattgatgaaatgattgtctatttacggcattaagttgttcacgtagtctctcttcgattctcttgtgttaaaattagataaagattatgactttctggattatttggaagatcagtgttggtgaattgagtttcctttaatagtaatgtgaagtagctgtgtttgctttgtttgtgagtgatttgatataaaagttgattacttttgaatttgtatgtagagggtttttgttggatggcactttgtggtgtttgttcgactccaaatctgccgaatttacaagtgtttcgttctgttaggaactcgagcattggttataaacgaaaccatagtctatggcagctcagaagttcatcatttcgtgctaaatctgtgatatttcattgttcatcgtccttaagacagtcaccatctaatgtggaggagatagatgataatccttcggtatcattagaggatgaatcagcacatgtgatgcagttcaagtggtctgattttaggattcttgatcgtgttagcattggtcatggcggcagggtattaccaaatttgatgattgtcaaatgttttctatcttttttttggattagcttctcattgacttttactttcttacaggctgatgagcttgtgtttgaagctatagttcaggttccagataggtcagtttctacttcatatgtattacaagatttcaagatgaatttcagaggcttcatctgtggtgcttcaatttcacagccctttgtttaaccaaggagttgttcttcggaaattgaataccactcgagctcaaagacgaggaagaagagctatagaagttcgtcctcccttttaatctattatgttacttattgtaatctcttcagaatgttgaccggggtttttactacttgcaggtttttaagaagctagttcgtcggagacttctctaccattcttactcaatgcaagttcacggttatatcaccaataacttaagcgatgatcagtactcatttacccttgtacatggggtaagtgcctcaaaatggtgcatatagactgtttcatcatatttttctaccattcattaatttttatctcttcttgtagtgccatggaagtttctcgattaggcactggcttcaacaatctgattggattccaacattagaagctactcttgcattagatgaagaatcctttcgaagggtgggtgatgatactactggagggcctgcagtttcaaggcagttaagactaatccgtacactaatgagggatattttgatcggagtatgtaatttggtccttcgaacaagcagcatatttcttacttttcgttgtgatcttcttaacatgttttttggtgtttgttcaaacttgaaggtcaattacttgcacagccatggtctggctcacacagaactgagattggaaaatgtgcatattagccctgtggatagacatatcaaagttagtttagactttgagtagtgaagttttattattcatgtttcagttttgtcaattaaaatcagagttcatttccgactataggtagggattctcggaaatgctgctgactttaacggggatgttccaagtactagcaacgcttacagtaccatggacagacgacaaatgatgatagcatttgacatgaggtattttgagaagagatcgtaattataatatctgtttgttgacattactcggcttaattttaaatttctttttcatgatcaaagatgtgttggattcatgatggcaaaaatggtacttcaagaattgatggatccattaatctttgcgaaattgaagtctttcctggcaaaggtattattacttaggctacatagtttgatgttatgaattgtatgttgattttcgttaaattttcttctaaatatatatctaggggaatgatccttcctcgctgcgggagttttttgtgacgacgctcaatacaaactctgaatctggaaataccggagtgcaagtaagtaatcagctaagtgctattactagttctttcattcgatgtgagatttagcaaatgttttttttctctcagatacttgatagaaactggggagcaggttggcaccttttatctttgttaattgctaccagaccttctgaaagaataaggtaacataacattagtgcacgatagtattaccaatctataggctaaacactcagaagctacatttataaattctgttggggtttggtgcagttgcttggatgctcttaagcatccctttctatgtggaccaagatggcgtgttgccccatcaatggatatcatcagatggggtcttggatcaaccgcagtaaagatttcagaagaatacatttaccgcatgcctcaggtgtgtatatatgagatattttgctgtcggtttaaaatgtttgaacctttactcacccgctcagtcatctaaccggaaacgattcttatacagcgccaaagacttgcccacttcattggactgatggagatgctaaatccttatccaaagccaaacgtatgaattaccacctctcatgattcttgagctttgatatatgtattgcttattctagtgtgttatgtgtgaaaacaaaattgttttaatctcttgtttaacacagtgttggttggagcttttaccgggaagatggcgtcttttatactcaactggaaagcacataggtctaactctgcgtcagccttccacacgtgccttaataggcaacgttcacttaacgataactcgagcttcagaatccataaacaacacttcactttcctttacctctgatatacgcttcactgccataaccagcaaagactggccacacaacaaaatcggagctgctgggaaattacaaacgctctctcaattcagactaatagctggaaaaagactttacctcaaagaagagaaaaagaacattggtaagttctcaatgggtgaaccagatgctgaagaaggtttagccgagaagcttgaaaccgagaaatggaaaaaagtcgtgcccttcaaggagtttccgtcgagtcttcctgtagcaaaactcgtctctggagaaatcgaagtgacgatgaacatgaatgatcatatagattcacctgggagtgtgattggagaagttagaaagcaaattccgccggaaatgttcgatctttctaagcttgtgtgtgggacttatatagacagtaggttacttgtacttaggtgtgtaaatggttcagcattgttgttcacaaggtccagcttggaccataagtctatgtagccatttggctcaggttcttatgtatataacaaatgaatcattctttttgggactaaaccgttgtagtctctgtgtatgttgtggtaatgtatgcttttggcttttaggttgtaataagagctttttagtaaaagctttatactatggtattcttttcatgattataatagaaacacaatgatttgcaatacatctgtctaaagtttgttctgcatatgtaaatcaaattcgtaattccttgtattcgaataacttttgataatattttttattcgtaaggaatagcatccaaaaaaatgtaatatcaaggatttatatgagaatgtttaaattggatcgattttctttcaatatgcttcaacttttgtttaaagtaagtatgagacgtggagatttgatatagaaatgattctacaattctgagtacatttttatacatcttttactgtctatcaaattaaaatcttgacaagtgtagcaaaaatgtcaaaaaggagaatctcttttgtcttttccagagtgaggaaaaaaaacgtgttgtagtccacctaacatggtctaggggacaggcttctttcataccaaaaaagatcctaataatacctgaaattcgttttacttaaagagaaattaaaccttaaaacatataactcaaatgcagaaatatatcaaccaaaacctaagccctacaactaacactacatatagagagtggtactattaaacaaacaagaaaaatacactaatgaactaggacacaaactatggccaaaacataaagttccaagaaatgtagtttatatagttaaattataagaggagggccctatagagactagagagagagcttttgacccttagaatcagtgaaaggtgataaagagtcttttattgtgtggccattgattgatacaaagactcctcaactatccaaatggccacattgactcttctccccattcttactccaaaattaataacttccaaaacaagaaaatattcatttttattgccaaatggctcgtcatggtcaccactatccccgacacattgacatggccaaggttcgatcccgcttctttcaccaaacgtggcaataattacaatttctttcgtttggccttgttctgatacgtgtgttatggaatgcatattccattgagacaggatttgatgtcctaatgtaaaaacatgacttgacaaacaaaaaaaggaaaaattttgttttcttgagacgtgattctagtcgcacagattttcgttatcatcacgaattctagaatagaatgaaaatgtgataaaaatctttattcatcaagattctcatttcagtctcatcacacattttaattgtttttctcttgtccacgtctatcttttagacttttacgtaccataacttttttttgtgtgtgcaaaacgtaccatacctttaacatataagattctgaaggaaaagaattgtttgaagaaaaaaaaactttatattgtataccggtttctatatacttagaaccggataaattctagagcatatacggttgtaagagaaataagctgaaattcacaaagtgatagtggagctcaaatcttaacaaaatcgttggactacgatcatttggattcaacaaacctttccttttctgctaacaatatatatatatttttatagcgaatagtagtttaatggtagtagtgtaagagagtccaaaaacataggttaagctaacaattaattaaataacaatttagaatatacagattacgattacgccgcatgacacatgtgaagcggagcacatggacgaacaattggttcgttggcctcaatctgctccgagaagtcgcgtctcttctcttctttttttttgtatataaatctattggcaagtgccaatttgcttcttgttgtcaacttcatttaataaatcttgttaatcaagaaaagcgtttacattcagcattatgtgtttttcagttatcagacaatagtgaaagttcgttaaggtggaaaaacatgtgtaggaaaaattagatttgtaaactggaagaaagaagacaaaataaaaacaattagtaatactaagttggtttgatatttaaatagtaaaatagatgagaggtgaaaaagaaatgtttatgtctttctggttcagtgaaccacgtgaaaaatgttttgatcaaataggtaagttttgtttgtgtgaaagagatatgacgttttgaattatattttccataaagttatcaatcaactaaaagttactatgaaaaagataactaaaaagacagcaagaggcgattgaatttacattggcaagttcattgcatttattttctaggctacatgctctttttactgttggttgaaatttgtatttttctgttaagtattagaaatatgtgaatcttggtcacccatatgaattctcgttgtatttacatgttagcctaattaatgtgcatgatgcttttataagattttattggattcaaaacttctatttcaagcaaagacgagtttcatacatttcaatatcaaccgacctgttctacttctttttctttgtttaatttgaaaaatacaaataacatatgaaaacaaagtttgtattcaagtctaatatttgagctagaaaaacaaataataaatcgaaactaattgtgcagcacgagacgcagcatagcgtcaaaatgacagttgatcagtttgaagttgtattagaaataacaaaaggaaaatacaattgtgttgtccacgctcactaatagccaaacccaaaccaaccatttactatttctatataaaattcgtgcattagtttattcaactactatacattttttaatattttaaacagaaagaaactttttaattaattacgttaatccggtcaaaggcatagttttttgtcgatgcaaatttatattcttaatttattgctccttgggctcgatgacacttttaaagtagtcggtaaacgaattgatcgtgtttatttttataggtcaaaatgatctgtttatcgtaatcatggaagcgtattactattggtacagtacaactcattactattggatgaatataaaagagttccaataaaaaaaaacagagaaactgaaatttaacaatatgatggcttagtagtggaccttatgctcttaccaattctatgtttgtctacgatcatgtattagatttgattaataacattgaataatatcggaatgacataaaataaatgaacttgtagagtgaaataggttatatattgatcctggatttcgttctatagcgattaactagtaaaaagttagttttaatagaacttttcataagagagaaaaattgaacaaaataaattatacttacactacagtatcattggattaatgaaataaaaagctttttaagtgtgccttccactttcacgagaaaacaagtttagtagtagaaaatagaagtagaattagtctattaaggcgacccacttagcaataatcaataagcatgatgcatatgtgttgtgtggccttctgttagtggaattggaatctttaaagtctttaaaacgattaattaaaagaacaactcatcagattcacttctccatgatgggttgttattattagttctgactttatgagaaatgggttaattaatctaggatcaaagaaaatattattaattactttttctattttataatataaatattttgttttcgaattcctatgtaattatattctattgatttattatgttatgactatttgtattatgcaattttttaatgatttgatgatttattaaaattaaatatttttagtctaagtattttaattaaaacatcttaacagaaaggatttgcctagtcttatggtgattagatcaaataatataaaatctttattgttttcttgacattttttttttacatccttataattttaattctcaaaaagtgatgtttataagttttttttttgtttttttgggtgaaatgtttatgatattattaaatttactaatagccggttacatgaaattatacgtcggatactcggattaatagttatatatatatagtccctgtacattcgaggaatttttgcgttttatgttttgctaaaacttgtatgtgccaaaaaaaaaaacagaaaatgttttgttaaaagttaaaaccatgcttttatatagtttgatatgcaataacttatatcatacaaaaaaaaaagtctgagacgaaaaagatatccttactgtacaagtcatagcatgcatatgattcaatatatttgataagattctgttttttttttaaatacaaatatactttatcaagttgaccaagtactttatcaaaaaaaaaagagtaatattagaaactaactatagaattgaaaagaatcaagtaactaaccattgtcagtttttctatggatatataactatatgacggcataagaaaatataaaactatccttgcaagttgaacaaaaaacaagcttatgtagatatatttaatgtttttagcaaatcgcatgaaacatgttaaaatagcacggtatttataaaaaagatgacattttataacgtacattttacacaaataacatgttatataaacaaatatcgtttcatttgaaaagttgaaccaggaacaagcttatacgaagataaaataatagatttaagaaagttttaacatttaaatcatgtttttagaagaaattatatgtgattttaataaataatgtgttatatgaaaaagtagcatgttgggagagagagatttctagttatcacgtgtaattcgaaaaagtagcgtggtataaaagaaaataacatacaatttaaaaaaaaacataacgacggaaattccaagaaagaatcaaaatcgaataaaaaatgacaaatcttctgcaaattgaaggagagatgatctatcaatataaataacgtttgggagcctacatttatcgaaaaagagatcgggtggttgtgatggtggaagatgtggtggttgtggtggtggaaaaaagaaagatgagatgattctaagtgttttatatgattttgaaaaacagcatgtaatatatatatataaaatacgaaaatgggtagaaaggtaattgcaagtgaagaaagagagtatggtctgacgccatggctattttgttagttattttacaatccatagttatttagtgcatattctaaaataaaaataaaaaattgatcaagtaatttaaaaaatgctattttttaccaatttatgttattttccgttaatgttgtccatgttaaacataacacctttaattttattttgtccttaaacgtgacatttatattgatggaatctctatacttttaagaggaaaaaaataaaaaaaattggaaaagagaatggggatgagtaaattgaaaatgatgtcataaataaagtttgtcgtgtcgatagatgaggtggacagattcataggaatggtcacatttatgatgaagtcgacatattggtttcgtagttaggccacctgctcttctcttcataactcttaagttgcttaaacctatttggtctttatcgtcaaccgcttgtcggagaatgtgttaatttttattagctccgaccgcatcaagttagttaaccatgttagttatgtttgtatgatcgacaatgtgtattttgtttttttaatagtgtgggaagcatctttatatatgtcttgcatatctcttttcgaactaatccctttaacaattttataacttttgatacaaatgacataaaaaaaacattcatcaactacttatggatattaactagtcactttatacatagtgttagcttcaccatttgttctacctacctaacatttaaattacatgtggttggtggcagaattgatatattgcttcattttttttttgtaaaaaatatatttcataattcctttactataaactatacactgttgcatgtaacaaaatatttatacattattcaattgtatgcgtatatttttgaaagaggtataatttaatagagaaacactaaacatatatagtcgtcaactttttggatgcatagttcgattcgtttatcagtgttgtgtgttgttacatatttattcgtttttggtcctcctagacatagaatgacactgataagaagtcattaaaattatataatattaataactattcaaaggtattttgttgttgtcaaaaacaaaaacatttgaaagatttcttaccaaaaaatatgttaattcttgaaagggtcaacattttgttttcctcactcctattaaatccaagttcaaaccaaattatatttaagtatttaactaatgtcgtaagattactatttgtttttttttaatgagtaattacggttggccgccgcatatggaaattagaaaacaaacttggtgcagttcaattcaacaaatgattcatcatcaatggcgtcacgttacgtgtccactgtccaatgattcaatttccattactaatttttaacacatataaccaaagcttgactatgaaacgtatcaaattagtaaaccaatctccgactaattaactactttatataattatagtttaacccccaaaactaatcagatattaagactaaccccatctattaattttgacagctgtcttaacagcggatttgtggaggctcgtagaggttttttttttttttttgtattaaatttaaagtagccatcaaagattgttttcatctatggtggtacacactttaagtagttttcttgtgtcacatattacacgtaacaatcaactaccaaaccccacatatataaaaatctaaaatttatccacttataatttttatttatttttaattattattttagttgaatgcatttaaaaattttctttttatgaaaccgttggttttttaatattaattttttttacagatattcgagatggacgaagattatctgactaaaatattaaggctttgagattattgggtaaactaaatttattgcttataaccaataagatgaattagttacacgttattaacttgaatttttctaatcacaaattggaagtttgctacttacttagcttagtagtttaatcaattcaaaggtaataatagagtctaatggtaacaatagattttatatttgaacatgaagattctaaaaactgacaaaatattttcattttcttaaatttcttaaattatacatatatatatatataaattttttatataatgtgagaagatatgataaccaataaaattttgctttcatatttttattgacaaaaactccaaatatgacgaaaccgcacggtacaattttaatagaaacaaatatatctatataataatatccgcagttgaatcgcatgtctccattgggagcctaataacaacccaactaataacataattattttaatacttagtttacatattaacatttttaaaaattgttggcttaaaataaaataaaagataaaataatgaaaatgaaagattctttttaaaaaaatgaaaaatctctcttatctaaaaagcaaaacaaattttttctttctaaatctggacccaaaccccatatctctcctctataaatataaacgtctcgtctcttaaaaaaatcgtataaactcttatatactttctctagccgccacattttaatagaaataaaaatatttctataataatatttgtagttgaatcgcacgtctccattcgaaacttaataacaacccaattaataacagaattattttaatacttagtttacatattatttcttttttaaaattactgattcaaaataaaaaaaataaaaaaaaaaatttaaaagaaggaaaaatctctcttatctaaaaaagcgaaacaaaattttctctctcttataaagctggaccaaactccatctctctcctctataaatataaacgtctcgcctcctgagaaaaacgtataaactctcacactctccctagccgccacctaccctccgccgcctccttttcgccgcctgcttcgctccgccgcgcgcagcgcttttagtctttttctgagactgtttccgaagaatctctctgttaggattttgtttgattctggtcgttatccagatcagagaaatccgtgatccttttttctctctcactttcttctctgaaataggaaaaacaaaaaacaaatctgataatcgaaactgatcactcactgctgattccgtaacctaaaaaatgtcggcagcttcttctagctccgttcttcacctccgaaccaaccaacaactgttatcactccgatctctcaaaaattccacctccgttgcttctcaattggccgttacgtctggtgttagccgtagaagatcgtgtacggcgcgatgctctgtgaagaaaccggtgattcctgagagtcctttcctagggactcgtgtgcggagatccggatccgagacgcttcagttctggagatcagatggtcctggacggtctgcgaagcttcgaacggtggttaaatcgtcattttccgctgttccggagaagcctcttggtctttatgatccttcctatgataaagactcttgtggtgttggttttgtagcagagttgtccggcgagaccacccgcaaaacggtactgttttgaatcttctcatgtgatgtgatcattgacatatatgatttgattgatcgatgacatgttgttgatgattttaggtgactgattcgttggagatgttgatacggatgactcatagaggtgcttgtggttgtgagagcaacactggtgacggcgctgggattcttgttggtctgcctcatgatttctatgcagaggtttgttttgttctgttatctccagattaatttattgtccatgcaataagatttctgacaggatctgaacttatgtaatgttattttattgtttctggttctgttgttgttaattaagttttaaaactgttgatgtttttgtctattaggctgcgacagagcttggctttgtacttccttctgctggaaattatgctgttggtatgttcttcttgccaactgttgaaagcaggagagaagaaagcaagaatgttttcactaaggttgctgaatcacttggccactcggttcttggatggagattagtgcctaccgataattctggactgggaaactccgctttgcagactgaaccgattattgcgcaagttttccttactcctacaactaaatctaaagctgactttgagcaacaggtaattgttttgcattgaaaatttattcatgtatcattaacactgggagatgatgttaatgattacctttgtttttgatagatgtatatccttagaagggtttctatggttgctattcgagctgcgttgaaccttcaacatggtgcgatgaaggacttctacatctgttcgttgtcttctaggtatttagctatttcaattaagaatgacatgtttgtctcaagtactgaaaagttaacctaacgaattgtttttcgtgatttaggactatcgtctacaaaggacaattgaagcctgatcaactaaaggactattactatgcggatcttgggagtgaaaggtttacgagctacatggccctggtaaatattttttctattcactatctctttttttatgctgactccatgctccaccaacagcatgtgaaccaacggggtaaccaaggagatgcgaagttgaggaatgacttctgaggcctcttaagttcctccaaaaccttgataagaattttaatttggatgctggtgagttggtaacgtcaagtgagtccagaaactcgttgcccttgatatgtatgataagttatcttaggctaaatgatcacaatctggtgattaagactaaaattttgttggttaaggtagttaacaattctgcaacattagaacttgcccccaactatatgctgttgaagttgtgtctaagaccaagtggtaaagttttcagttgcatacatacacattttaatgtttgataactaatgattgactatactcggttacatgtttaatgattcaggttcattctcggttctctaccaatacatttcccagctgggatcgtgctcagccgatgcgtgttttgggccacaatggggagatcaatacactcaggggaaacgtgaactggtatgttgtcagagatagcttacattaaagctttcatgtaatttaagtaacctgtttggtgccttagcatttgtgtgataaaaatgccctttggtatgcaagtgcctaagaagttgagtctgcctcattttcattttaattactgcgttctctagtgaattttgttttgatatttcatcacaggatgagggcacgtgagggtctgctcaagtgcaatgaacttggattatcaaagaaagagttgaagaagcttctacctattgtggacgttagctcttctgactcaggtaactctcaatctcattatatgcccgtacgatgtgttgaagttgaactaactgtagatcacaactttgcctatgatattatggacctgtgacacgtttctatattgtgttgttaacatttttaggtgcttttgatggtgttcttgagcttcttgtccgagctggtagaagtcttcctgaagctgttatgatgatgatccctgaagcatggcaaaatgacaaaaacattgatccaagcaggaaagagttttatgaatacttatctgctctaatggagccatgggatggacctgccctcatatcatgtaaattatatcctgaagttaacacacaaccataactttatattttgttttttagattgtaactcttttattgaatgtcttgcagtcactgatggtcgctacttgggtgccacattggaccgtaatggacttcgtcctggtaggttctacataacccacagtggaagggttatcatggctagtgaagttggggtagtggatgtaccacctgaagatgtgatgaggaaaggaagacttaacccgggtatgatgcttcttgtcgattttgagaagcatattgttgttgatgacgatgccttgaagcagcagtattcactggcaaggccttatggtgagtggcttaaaaggcaaaagattgaacttaaagacatcattgagtcagttccggaggctgaacggattgctccttcaatttctggggttgtaccggtaagctgtcgctaaagaattattgttcccctaattcctcttcgttacctttattatggttagttaacctttttcttggaaactaaggcctctaatgatgatgactcaatggagagcatgggcattcatggtttattgtctccactaaaagcctttgggtatgtttgtttcttatacttgctaatgtatattgatctgttattctttgttattggtctcacgtttccttttgacatgtgcatgcagctacacagttgaggccttggagatgttgctgcttccgatggctaaagatggctctgaagcacttggttctatgggaaatgatacccctctagctgtaatgtcaaacagagaaaaattatgctttgagtacttcaagcaaatgtttgctcaagtaacaaatcctccaattgatcctattcgtgagaaaattgttacatcaatggagtgcatgatcggtccagaaggcgatctaaccgaaacaactgaagagcaatgtcaccgtctctccctaaaaggtcctcttttgaaaatcgaagagatggaagccatcaagaaaatgaactacagaggctggcggactaaagttctggatataacttatgcaaaagaaagaggtacaaaagggttagaggagactttggaccgaatttgtgatgaagcaaatgaagcaataaaggagggctacacattactggttttgtctgatcgaggtaattgacatccttagaaactcttgactctaggatctgttattcatctttgatcagtctttgccatgttcttactttttttttttaatgtcttcactgtttagctttctctgcaacacgtgttgctgtgagctccctcatggctgttggtgccgttcatcaccacctggttaagacacttgcgcgcacccaagttggtttggtagtggaatctgctgaaccacgtgaagtgcatcatttctgcacacttgtcggatttggagcagatgctatctgcccatatttggctgtagaggccgtttatagattacaggttgatggcaaaataccacccaaatctaatggggaattccattccaaagaagagttggtcaagaagtattacaaggcaagtaactatggaatgatgaaggttcttgccaaaatgggaatttctactctagcctcatacaaaggtgctcagatatttgaagctcttgggctttcatctgaagtaattcagaaatgttttgccggtaccccaagccgagtggaaggagcaacatttgagatgcttgcacgagatggacttcaattgcatgagttggcctttccaacccgtggctatgccccaggaagtgcagaagcttcagcacttaccaaccctggaaactatcactggaggaaaaatggagagattcatctcaacgatcctcttgcaatagccaaattacaagaggcagcacggaccaacagtgtggccgcctacaaggaatactcaaagcgtatcaatgaattgaacaagcaaagtaatttgcgtgggctcatgaagtttaaagacgcagatgtgaaaattccactagatgaagtcgagcctgccagtgaaattgttaagcggttctgcactggtgccatgagttatggatcaatttctctggaggcgcatacaacccttgcaatggccatgaacaagcttggaggaaagtcgaatacaggtatattttttttctctatgaattttgctgttcccttttcgttctcttgtaaagaatactaagacatcagtttatgatcttcttaaggtgagggaggggaactgccatcccgtatggagcctcttgcggatggttcaaggaaccccaaaagaagttcgatcaaacaaattgctagtggaagatttggagtttctagctactatcttacaaatgctgatgagctgcagataaagatggctcaggtaccctaaaatataacttgacataatgttctcttattctcataccttttgcacatctttgggtttctactgtctcaatgttttgtttttcatatcagataatgctctttgcacaaagtagttataggtgccttgcaaaagttttgtgaatattgcatctaaatgctgtttcaagtgtctaacgtttttcttgaatgccatacagggtgccaaacctggggaaggtggggagctaccaggccacaaggtcataggagacattgctataaccagaaattccactgctggtgtaggacttatcagtccacctcctcatcatgatatctactctatcgaggatcttgcccagctaattcacgatcttaaggttcctatttatgctctcccaactcttactttttgaattattgtcctttgtctaacatccatttcttttatctcttgtagaatgccaatcctggcgcacgtattagtgttaagcttgtatctgaagctggtgttggagttattgctagcggtgtggtgaaggggcatgctgaccatgttctgatagcaggtcatgatggaggtactggtgcatctcgctggaccggtattaaaaatgctggtcttccatgggaactgggtctagctgagacacaccaaactcttgttgccaatgaccttcgtggccgtactgttcttcagacagatggccagctaaaaactggcagagacgttgcagttgctgcacttcttggtgcagaagaatttggttttagtactgcaccccttatcacactagggtgtatcatgatgagaaagtgccacaagaacacctgccctgtgggaattgctacccaagatccagttctccgtgaaaaatttgctggggagcctgaacatgttattaacttcttctttatgcttgctgaggaagttagggagatcatgtctggacttggttttagaactgtaactgagatgattggtcgtgcggatatgcttgaacttgatagggaagttgtcaagaacaacgataagctggagaacattgacctatctcttttgctcagacctgctgctgagattcgtcctggggctgctcagtactgtgttcagaaacaagatcatggtttagacatggctttggatcaagagctgattgcattgtctaaatctgctctggagaaatctcttccggtgtacattgaaactcctatctgcaacgttaaccgtgctgttgggacaatgctgagccatgaggtaaccaaacgttaccacttgactgggcttccaaaggacacaattcatatcaagttcacaggaagtgctgggcagagtcttggagctttcttgtgtcctggaattatgctagaacttgaaggagatagcaatgactatgttggaaaagggctctctggaggtaaagttgttgtttaccctccaaaaggaagcagctttgatccaaaagaaaatatcgttattggtaatgtagcactttacggtgccactagtggtgaagcatacttcaatgggatggctgctgaaaggttctctgttcgtaattctggtgctaaagctgttgtggaaggtcttggtgatcatggttgtgagtacatgactggtggtactgttgtggtgcttggaaagactggtagaaactttgctgctggtatgagtggtggtattgcttatgtccttgatgtggacggaaagtttaacaccagatgcaaccttgaactggttgatttggataaagttgaagatgaggaggacaaaatgacgctcaaaatgatgatccagcaacatcaaagacacaccaacagccaacttgctcaagaagttcttgcagactttgagaatttgctgcccaagtttatcaaggttttcccaagagattacaaacgtgttttatcagccatgaaacacgaagaggtctccaagcaagcaatcgagcgggcttctgaggaagctgacgagactgaagagaaagaactcgaggagaaagatgcatttgcagaactgaagaacatggcagctgcttcgtcaaaagaggagatgtcaggaaacggagtggcagctgaagctagaccttctaaggtagataatgctgttaaaaacggtggtttcattgcttatgagcgtgagggagttaagtacagggatcccaatgttcgtcttaatgactggaacgaagtcatggaggaatcaaaacctggaccactccttacaactcagtcagctcgttgcatggattgtggaactccattctgccaccaggtatacatcctcagataaaatgccttttttctttccaagtattcttcttgcagcttgtcaaagactggttttgttgtttatatgtcaaggaaaaattgcaactaggtgtttcatgaatgaaatccttaacatttttgtttttgaaaatttacaggagaactctgggtgtcctctcggtaataagatccctgaattcaatgaacttgtctaccagaacagatggcaagaagccttgaatcgtctacttgagacaaacaactttccagaatttactgggcgagtatgccctgcaccatgtgaaggttcttgtgttcttggaataattgagaaccctgtttctatcaaaagcattgaatgtgctattatcgataaagcctttgaggaagggtggatggtaccaaggcctcctctcaagagaacagggtatactttctaagtctattccatattatcttatcttccactgttgtgaggctcacatacatcttgtcttccactgttgtgagtttacatttggctgatttatatgcttctgctgcttgtgtggtttgcaggaaaaaggttgctattatcggaagtggaccggctgggttagctgcggctgaccagctgaacaaaatgggccatttagtaaccgtgtatgagcgctcggacagaattggtgggctgatgatgtatggagtaccaaacatgaagactgacaaaattgacgtcgttcaacggcgggttgatcttatgaccaaagaaggtatcaactttgtggtcaatgccaatattggaaaggacccatcttactcccttgatggacttaaggaagagaatgatgcaatcgttcttgctgttggttccacaaaaccaaggtaatattttgtttcaaacaatgctgaattcctatttatgttaccagacgttcaaatggattatggtgaactaaccgagacattattggggtaattttgcagagatcttccagtgcctggtcgtgatctatctggtgttcactttgccatggagtttcttcatgcaaacaccaaaagtttacttgacagcaatcatgaggatggcaattacatttctgcaaaagggaaaaaggttgttgttattggtggaggtgataccggcacagattgcatcggaacatctatccgccatggatgtaccaacattgtaaacctagaacttcttcctcagccaccctcaacaagagctcctggaaacccttggccacaggtttgtttcagatcttctacactcaatccttttagcaacttcttcaagatttttgcatccattggattaaaaagagttgtgagcaaggttggatattgttgattttaatgagcttccgtgtgaatacagtggcctcgtgtattccgtattgactacggacatcaagaagctaccaccaaattcggaaaagaccctaggacctatgaggtcttaacgaagaggttcataggagatgacaatggaaacgtgaaggggcttgaacttgtgcgtgtgagttgggagaaggatgaaaccgggaggttccagttcaaggagatcgaaggctctgaggaaatcattgaagcagacctcgttttcttggccatgggtttccttggacctgagccagtaagtgattcccgttgtgtaccctcttcttatatattgtgggtcttgtggcaatgatttaaaaccaattgcttgtttttgtttttacagacacttgctgagaagctaggtctcgaatgtgacaacaggtcaaactttaaggccgagtatggccggttttccacaaccgtggaaggtgttttcgcagcaggtgattgtcggagaggccagtctttggttgtctgggctatctcagaaggacgtcaagctgcagatcaggtagacaaattcctcaccaaaacggatgatgacgaagacgccaagctacaacaagaccttaaccagatgaaacacaacactatcacaaactgaggtaaaagaaagccttactcatctgaagcaaaagtcgagagagaaagacaactgatgttactcttttagaggacacacaggcgtaaaggaccgacttatggcagagatgaaggaagagagttgcagaggaaaagtaccgaacttgatgatttagtagagagaagtaaaagtttaggtttgtttttgtttattatcgtccataaagtaataatgattcataagtacattctctttgtaggatttcagtagctttcttttgttaaagctttctgaaattgaaagccttttgttttttctctatggctgtttctaagtttgaattttaaggaattgtaatgcagttcctgcttcttgtttttgccctctttgtgttctttcatattatttatggtggtgtaaactgtaaacaatgttaggaatcataagacttgctcagtaaaatagtgaaaaaaatgatcttcaattacacagtgaagattgaggtatgtaaaaccggtatgtagtttgtctccaacaaatttcttcattttttctcggtcccaaccagttggtagatgaaaagcggtccaattaacaaacggattcgtcagttgtctctcgtcgcaaccattcaatcctacgtgtaattcctcagttgtctctggtcttcaacaaaagacaagcccacaaagagaaaacaaaaaaaaagtaaagaaaaagaaaattgtgaagcggtgaaaacaagagttccaaaaaggtggctcctttttgtttctggagatgcgttattgtgacccttctttgaaatttagggttcattttctcagatttcgagttcgttgtgtttgaatctctattgggtttactttcttattcgatttgggggaaatggctgattggtatcagcttgcacagtctataatctttggtttgatcttcgcttaccttctcgctaagctaatctctatcctcctcgcttttaaagacgagaatctctcactcactcgtaaccacacgactcaatcggagtatgagaacttgcgaaaggtcgaaactttaactgggattagcggcgagactgattctcttatagctgagcaaggtagcttgagaggtgatgaagatgaatcagatgatgatgattgggaaggtgtcgaaagtacagaacttgatgaggcatttagtgctgctacggcttttgttgctgctgctgcatcggataggctttcgcagaaagtttctaatgagttgcaacttcagctttatggattgtataaaattgctactgaaggaccttgtactgctcctcaaccatcagctcttaaaatgactgctcgtgccaagtggtttgtctaacactcttattgattctctgattcaaatgtttgggactgtgaaagatgattgcttgatcatgtttacttgtgatgtactgatgtttcttgatcatggatgtatattattttgatttcaccaagttcgtatctttcattgctaatgtatggaaaggattgcttttgttggtgtattgattagtgatctgattcaaatcttatgactgtgaagattgttacttaatcatgtttacttgtgatgtactgattattcttcatcctggatgtatcttgctttgtgtgagtaccgaaaggatttgcttttgttgttttgttgattggtaacttagggatgcattttgatcgactgagatttgttatgatcttttttgttctaggcaagcatggcagaaattgggtgctatgcctcctgaggaagcgatggagaagtatatcgaccttgttactcagctttacccagcttgggttgaaggtggctcggttagttgtcttcttacctgcttctgttattcccatttctttggactgtttatggatggtctgttttcgttcttaaatctgtctttatttcttggcttgtttgcttcgttgcggactattagaaacgaagaaatcggagtggtgaggctgcaggccccatgggaccggtttttagctcattggtgtacgaagaggaatctgacaatgagttgtaaggttcctaagcaattagttacagattcatctatgaacttttggttttcttttctcagtttctctatatgactagctgactagatcagagaaggaatgtatatatcataatactcaccttaggtagatcaaagaatcatgtgttagtttaaatcatagtagaagctctgttcattcttgcgttcttactccatgttccaggaagattgacgccatacacgcctttgctagagaaggagaagtcgagaatctattgaaatgcatagaaaatggcatacccgtaaatgcaagaggttagtagtcttgtatcattttcacagaatgttcggatctggtttggaaacttaacagtttctccatcttggaaatgtcagatagtgaaggtcgaacaccactgcattgggctatagaccgtggccatcttaacgttgctgaagctctggttgataagaacgcagatgtgaatgctaaagtaaataaataaccaaaaccccctaaactaattctttctctcaattacagacttttatgtttttgtcgctgacaaactttgtgcaggacaatgaaggccaaacctctctacactatgctgttgtgtgcgaaagagaagcactcgccgagtttctggtgaagcagaaagctgatacaaccattaaagacgaagacggaaactcgcctcttgatctctgtgaatcagaatggtcttggatgcgagagaagaaggattccaattagtgttttttaagtctttaaaattgtgtgtcaaagctagatgcttgtgtttttcttacatttcctctgagcctctttgcttcctcttaagcttatgttttaacatacaacaacacaagttacatatgatatagtagctctagtttttattggttactatattgaacccagagagatcatcatcatcaatcatcataactcaataatagttttttttttgttagtataatgtttctctctttcgttcgtgaccctttcatgttttttcagccatctgaatcattattatcatacctgtaaaacaattttgttgattacttgtaaaatttataagtattttaaatatgatacaaattgtaccttcggaataagaaaagaaaaaaaatcttcttcttcgcatctcgctgtaaaacaatccggaccgttgattaattaacgatgagaatatataaggtggggttcagataaggaccacccaacacgcgatgtacgacataatcactccagattatatcaattctttaatcagaaatatatttttagtgtgcaaaaatcataaagaaaaatattttccctttttatatatatattgggtaattcagatttttttctatttatgtttttatttgaaaaaaataagatacactgaacaaacaattatgattggaaacaaattttcatatttagaagatttatacaacttttttttaattgggtaattttaaaagatattttcctatatatagtttttataaaaatattaggatacactgaacaaaacctaaatatacaattgagtacaaatatatataagtttggaaaacaatttcaaaattaatagatttacataatttgtgttcaaaacagtttttttatttgtttatataaatatttggttaaaagtttaataataaaatttaaagtccatcttcacatccgattcttctcttctcttctctctctctcttccctttttcgctggaactgatttttttcttctctctctctctctctcttccttctgggcttctagggtttgtcctctccagtccccgatttccgctttatccgatcggccgccgccgagattctaggttacccttcttcacttcatctattcaactttctccctaagatccatcttcagattcatcacttcccaattcgctttttttttttcctgattcgatctcgattcgttcaatcatccatttccaactttagtttcgatttgttcactgttttatgatttgaactcgttcgtaatctgagatttgcttttcgattttttagttagattcatttgttctattaacttgttgatttggtcatcttagtaactagtttgatttcgtgttttatattcgatttcgtgctcg

SEQ ID NO: 891 - DNA, 82952 bp, Arabidopsis thaliana
gatctgttgttctggctgttatagttgaatctgacagtgtttttaagcgtcaatggctcgtgctttgatctcttattgctattacatggttttttcgattcatagtgatttagtagtctttcacctttatggctttttggatcgttgacgagtttcttcatgttgttggcttaatttactgattctgtcttacttcttctttattttcagttttgctgaatctgtttgtttctgttgcagataaacctatggcaatggaggttacgcagttgctcattaatgctcagtcgattgatggaactgtacgtaagcacgcggaagaaagtcttaagcagtttcaggagcaaaaccttgcgggtttcttgttgtcgcttgctggagagcttgcgaatgatgagaagccagtagatagcaggaaattagctggtttagtccttaaaaatgctcttgatgctaaggaacaacacaggaagtatgagcttgttcagagatggttggctctagacatgtcaacaaagtcgcagatcagagctttcttgttgaagacactgtcggcacctgtgcctgatgttcgttcgactgcatctcaggtcattgctaaggttgcaggtattgagttaccacagaagcagtggcctgagctcatagtgtctcttctctcaaatattcaccagttacctgctcatgtcaagcaagccactttggagactcttggatacctatgtgaagaagtgtcacctgatgttgttgaacaggagcatgtaaataagatactcacagctgttgttcagggtatgaatgctgctgaaggtaatactgatgttagacttgctgcaacccgtgctttatacatggctctcggattcgcccaagcaaatttcaacaacgacatggagcgtgattatatcatgagagttgtgtgtgaagcaaccctgtcccctgaggtgaaaattaggcaggcagcttttgagtgtttggtatctatcgcttccacatactatgagaagttggcgcattacatgcaagatatattcaacatcacagctaaggctgtaagagaagatgacgagtctgttgctctacaggcaattgagttctggagttctatttgtgacgaagagattgacatcttagaagaatatggtggtgagttcgctggggattctgatgttccatgcttttattttactaagcaggctctccctggtcttgtgcctctactgctggagactcttctgaagcaagaagaagatcaagatttggatgaaggggcttggaatattgcaatggcaggtgggacatgcctcggtttggttgctagggcagttggagatgacattgttccacatgtcatgccgtttattgaagagaaaatatcaaagcctgattggagagagcgagaagctgcaacttatgcttttggttccattttggaaggcccttctgccgataagttgatggcaattgttaacgcagcgttaacatttatgctcaatgctctaacaaatgacccaagcaaccatgtgaaagacacaaccgcatggacccttggtcggatatttgagttccttcatggttcaacaatcgagacacctattattaatcaggcaaactgccagcagataatcacagtactcatccagagcatgaatgatgcgcctaatgttgccgagaaggcttgtggggctctgtacttccttgctcaaggctatgaggatatcggtcccagttctccgttaacacccttcttccaggaaattattaagtcacttttagctgttgcacacagagaggatgcaactgaatcacgcttgcggactgcagcatatgaggcattgaatgaagttgtcaggtgttcaactgatgaaacgtctaccatggttctgcaattagtaccagtgataatgatggagcttcacaatactttggaaggggaaaagctttcattggatgagagggagaaacaaaacgagttgcagggacttctatgtggatgcttgcaggtcatcatacagaaattaggatctgaaccaaccaagtctaagttcatggagtatgcagaccaaatgatgggacttttcctgagggtgtttggttgtagaagtgcaactgcacatgaggaagccatgcttgccattggtgctcttgcttatgcagcaggtcccaattttgccaaatacatgcctgagttttataagtacttggagatgggtcttcaaaactttgaagaataccaagtgtgtgctgttactgttggtgttgttggggatgtctgcagagcattggaggacaagattttaccttattgcgatgggattatgacacagcttctgaaagatttgtcgagcaaccaattgcaccgatcagtgaagccaccgatattctcctgttttggtgacatagcacttgctatcggtgaggattttgataagtactggaggtattcaatgccgatgcttcagagtgccgcagagttatctgctcactcggctggagctgatgatgaaatgacggagtacacaaactcattgagaaacggaatccttgaggcttattcaggcatatttcaaggtttcaagaactccgccaaaacccagctcctgattcctttcgcaccccatatcctccagtttttggacagtatatacatggagaaagacatgtaagtttggttacgacccaactgaatttctattatgtcatagcagttgtttaattttgtggtaaaattgccttgggacagggacgaggtggtgatgaagacagcgattggggtcttaggagatttagcagatacactagggagtcatgtgggtggtttgatacaacagtcagtgtcaagtaaagagttcttaaacgaatgtttgtcttctgaagaccacacaattaaagaagcagccgaatgggcgaagcatgccataacccgtgccatatctgtttgaaggctcttcttttgcctataagaaagaaaattccttttgctttttagtaaagtctgcatgcatctctgggtgggttgagtcggtcggggggaggggtagagctgcaacatccgagtcacatcagcatcatcagcatcagtttcatttgcatcatcagcataactggggtcagtcagggaatcgttgagtcgtggatgtggggaatgatgagttttggggtaaataatgaaactggaagagtcacgggtgaaagtttcccgggtaaggttaaatccccgggagtagaaagaggaggaagtgagtcatggtcgttttctggtgggttttgggacaaagttataccaaaaaaaaaaaggtttcatggaacatctcataatacattcttgttttttcttttctctcatatgttcttcaaccccttgaggagggagaggtctcaggtttttatcaagtgggggcattattagaggacaatcccttgattttttcttttgttttcttttattatttggttagttgcagtctttgcatcatcattttgtcttttgggggggtttgtatgtttgattaaaagcattattcacatttttatttttatataaagaagtttcacatgtctgtctatcttctctttgctatgatgcagtttagggggttttgcatatatacttgtgttttgtttgcaatcaagtttcaaatgtcacatacaggaacatttttattatatggtgtcatgtcttagggtcttaaagaggtccacatctattcattttactatggaactgtttacaatcgtttagaatccattatttgatttggctcgaactatatgggaaagggcacatgttaataggagaaaacgtcctgccttactctgcttccaaagagtcaagttaagagatcgaagaacatttcacattcacgctgtttatggaaacctcaattttgattgtatgtgttgcttttttttggttttccaaacgccaaatgcaactgataccgaacctatattttgaaaaatgttttcatgtgtatttgaaacattctagaccattcaagttatggtttaaattagtttctctcggttctatgtattagtcccaaaccatgtttctgacgtctcgagaatttttctcttgaactaaatatataatgtcataattcattcgacatatctttttcgaattgatgatttaggcgagagaaacgttggttctgttggtatttttttttttttcattgtgatgacatacccatttaaatctcactcaaatggacaataaaacacataaaagatagatgatggctaaacatccaagagaaataggacacgccactctgaattgaaattgggagttgaaaaagaatggtggtaatacgaagtgggccttttttattgtcaaaggacttgtccaagcacacccacatatatcacatacactgatacacacacaaaaaaaaaaaacatttttgtcgtccgcgacgatttttttcatattcaaataatttcattacggcgttaatactttattttgcgactttaaactttacctttagtctttaaatgcaatactgaaatagcaccgaaagatatatgagcgtcgtcagctgaaactgccaaaaaaaggagaaaatcttacgatccaagttattagtcaaaagaaacataattattgattaaagcatgaacttcttgcgacaaaaaataactccaatttttctttcaatagctattatctaacacattttaccttaaggttacggatcaatacatttttaaaaataataatgattagtaaatactttcttagaagatgaacgccattaaagaaaactctgaaaaaaaaaaaaaaacggatgttttttaagaaaattaattcgtttagtaggacaacgaaaacctaatatataagctaatttaatggataaaaactagaactttggttcaaactacatttatagatctaactatgcgttctcattgcctgatggctttcattttttgatgttgttccttctaatgttgatacgctcttaagcgatgatgttattgggtatgtgcgcctaaggcaagtaagtttgtaatttttcttataatttttagtctcccgtcttctacagaaaaaaaaactacacttatgagatgaattgtatattaaaaatttaaaacgaaggaaatatttaagaaaagtagtgaaattattagttgtgggtgtctcgtgatttattattcgcgttgtaaactatgttagtattgaaattgtgtttttgttctcttttttttttaactaatagacgtacgttttttttttgtcaaagactaatagatgtacgtttcgtcgtctttctgtgtagttgacattggacaacagaagttaagacttaagacacgtacgttgttgcccaataaaacattgctaatttagtggctcattggtttcttattcatcactccttttaaacgcaacatataattgccgacacattgattatttccctactcacgaactttcccttttttttttttttttttgtgaagtcatgcatagtcttcggacagaagagctgcacgtacatgtgttaactgttaagtgaataatgttttagatagtacaacgattctacttaagcagtttagctggtttaatgtacgtgtagtctatattagtttttatcatattcagatgctgaaaaagaatctgtttcattttattttttatagaaaactgcagatatttacttggaggttgtgagaaaacattttaagatggaaataattaaccagttaagaaagttgaagtgcgaaaccatttttttatatgaaaggatctatagaggggatttataaagtcttctaatctaaaatatatgggttatggtgcaatacacacacacatatatataagtataaccattcatatggtgactttttgggggtaaaagttctttagtttttgggatttagtagaattatggattttaggtcaaaacacataatgttatgaggaacgatgtttattaattgtaaaataagattttgggggatagtggtctctcactataataatgggtcacttaaaaagatgcacttctctgatacattttgcaggccactcgctatgtctgtctcaatcctagttgacttcttataaagttgtgaaggccgaaatggaaggattagttccactatttctctttatttgtatcaaattatttagtgtttggtaccacggattttaaaatctgccctaaccatcttttgacttcctaattacttacgttattcccctgtctaggagttgcctaccatgttggtttatgtgatcgaagtttactgaacttagtctatctattttgatccctgtaaaatttacattgaccgcaaggaaaatgttttgattccacatttaaactttaatttactagtactgatctttgttctaatatgtcaactgtacatggtgtatttaaatataacaaccaaaatttcaaacagaaattggattaaaaggttttgaaaataatcattggattaataagtgtgttcaagtttgggtatttgtagggtctttgtttgaaaagtgtgtacccttgatacaaatcttcgctttcgttttgattcattaacagcattgaaaacttacaataattacgtacgagtttggtatgattccatctttacttttgataatggacccaattatcttagcagaattcaatttccaataaaattttgcgtcaataagtagacttaagatcacacgtggtgctgcactcatcgaacctatgatacattacagctgtatgggaaaaagtggtgaaaacaatgggcttaaaagttaaaacttagattaaaatcgatcatgtaaccagaatgaaacttttcctttaagaaaatatattggttttgactaaaatcatctaaaatgaaacatcacttagaaataagaactagtataatagagagtgttttgagatcaaaccgattaaaattgtaaaataaaaaaaaaatgttttctttttttaatgaaactcaaaggatataatgaaaatttatatggtcaagagatgaacttccactcaagttaatgaattaggtcacttttcttgcatcaaacaaaccttttttcattatgatttgatccacatatataacctttcggatggcttagggcacaacttactctaattcaagtatttgatggttcccacttcacttggttcacaaacatttacagttagtaatctatactcagatttaacttgttattcctaattacattttcctatctggcaaattaacaatatagataaactatttatctatcatcaaaaattgattgccagaagaaaaaaaggctaattaaaagaaacgtcaactttttgtttggtagttaaagttttgtgacttttgtctatagtatatctagtacggtctaattaacataatcataagataaaaacgatatacagaatttgaaatttgaacaatgtcatgctataaggaaaagtgtgttaagaaaaaaagtgaggttactagctaatatacgatttttgtccacaagcataaatagaggtaagcgttaagtgttcctttttgggagatgtaacacaatcaacagttaagttgactttttcaaccttttctagggtttgtggcctgtaggttcattgcgttaacccaataacttcttattcttctcatttttgttcttgctactatcatcaccattttgatgttagtagtctcaccactgttttcacctttttttgataattgttttgtgatatataaaaaaaatcgatatctacgtgatattcttattttaaaaagttatattgataagagctttacatattttcattgtcataaacagaaccaaccatcttagtcatggtcatcatcattgtcatagtcatcatcatcaccattacgactaatattatacatggaccataacagtttccaccacattaacttgaccgtttataaaatgggaactaaccttccccatcttctcatatgaaaatccattttgtcctcattttccattgattagttgcattctctcccctaaacgaacaaagagtaatcatcaaaaaccatataatatgcctcttaggattgaacccctatctctactcttcctcattctcattatatgctcttcatcattaggtaaacatataattgatattcatatattccatccttttcaatttatagtcttttaactttgttttaagggatgactatcaaccttgcgtcccaacacatccatcttagtccgagatcagcttttggtattatcttgttgaacattagtcttttcttcgttgttgaatctagtgccttaaactaccttaataccattgattattaattactattatattggtgaacactttttccattctttctccaaaattaaaacacatctaactaactagtatgggttgaaataaataagtcacttaaagaacaatgtatattccgctaacagagtgttttcttttagccatagtggaaggctctatccagctcgacggtgcgaagatgcatgagagttccatgctttacaaggtatacatcatacatgtagatgctttacgtttatatatgttcttatcaacattagaaatgttgttaatgtccaaatattgacaagaatttatgtgtttataattaaaaagagtgaggaggtgggtgtgaagaagatgggtcataggaagttgatgttccactcgacagcggactacgacgacgcaggacccaaccctaaacacgacccaaggagaaggcccggaggcaagggttgaatcatcaacacagaactatctctgtcattatatatatagtagcatatatataagcacatgcactaatatctatatatcatatatgaatatgtatgtgatgtatcctccattctgactctttttgtttgaggatgagctcagtgtaaaatacccttcggaaacccgctagtgaaaggattagtgtctaataacaagacataataaatccttatttattatcatcttatttcattgacatatataatatagccattatatcctgtgtaatcgttatatcagaaaataaataaagtgttatggttatttttagttctgtatagtattattataaatgcgtcttctacaatatttcacattagttgatgatttcaatcttatgcagtcaaacacatagtaaaaaactctttatcagcatgatcactaaacgaaaaagaaatgaagacagattttatgcttatcatagctaaaaccttatatgtcgctattacaataacatagtacaaatgaaacaagattgcaatggttgatttaaaaaaagaaaatataaaactaaaatgaaaaaacaaatataaaattaaaacagttgcgcatccagggaatcgaaccctggtcagtaccgtgggagggtactatgataccactacaccagatgcgcttttattcattgtctcttctcttacatatttatagcgaagactagttactatggttatacatatttcacaagcatacataaaattcacatactaacacttaaatatgtctatgtaaattattgaagagaaacagagaaaacgccttttgtttggttacagaatttacaagaatcgattatacaacctctcataactctcttgactcctatccttcaacctttacttagtttcatacatctttgtgtcaacaaatcttaaatcttacatatataatacattcaaatcaaaaccttctctcttctctatcggcatcccaacacaagtcttccttcttcgtttatggactcattcctacatattttctgaaggtctatgtaaccaatgatagtgtcctcaaagaccacatcctccaaatttgcctcctcaaatgtcgaaccggataataccgtgttcctaaacaccgcacctttcagattcgatttcccgaaattcacccgatcgataacagcattagtgaaattcacccctagaaaagaattcacactaaaacattaattaacattttggtccataattttaccatatgctttcaaatttcaagatttaagtctatatacctttaaagcttgcttctacagcataagcttttgacataacaacttcagtcatatctgcaccatcaaacttagccccaaccatcaaggctgcagagagagtcttgcctttgagattagtttgatcatttgtgtaatcacagaacctaagatccagtggtttgtcatagacaccatttgcttgacctatcgtgttaccaacaaatgctttttcacaccggtctggttctgttgataacggaggaagtctctgaaaaaaacaatccatttatccatttctttaaattctaaaacatagccatcttcagacacaaacatagaaaagagaaagggccatataatgtgacagacctggttagcagcaataacaggagaagctattgtaagagtgcaagcacagagagctgcgcaagcgatagatccaagctccttaagaggaaagagactcttctttacaccttcaccattttctctgttttctcctgctgagaacataatgcaaatcaagatcacatacactactttagcttcactttaaaagcaagattttgacataacaatattcataaacccatctataaagatgaattcattgaaggtaaagctaaagattcttgaaaatacttagaaatttcgaagaaccgtacaaccaagaagaagtagcagagagatcttgaaaaaccaattaaagcagagagaaaaaagatgacatttaccggagcagtgtactgttactaaagatctaggctcacggcggaggtttacagagaaaaacggtgaagagatttgattcctcgtgaattgaacaggaagcgaagccatggaagtgtgtttcagatttttgttcgaacttggacaaccatagagttttatcaattcgttatggatcatgcctatgacgtggcatgacagatcataatatcagactatatacgatttagcccattgggcctgattactatttggtccatttgtaaatctttcatcggttttggatataatatcaagtagtgcagcccatcggttaaacatctacagtatattattgatgacttctaacccacgcaaaatatatgatttaccatgctaaatacgtaattaatagcttaatagtaaatattttattttatatatttttatttatgttaaaataaaatttatatttgtatttattacattaaaaacgattttaaataataaatgattatatttattttgtgtaagctaataaaagatattaaaaaaattgattagtatgagaacatcttctacaaatgtaaggttatcttataagatacactcggaatattattagtaagatttttgtttccatagtctatcggatccttctaggtcaattaaaagttaaaaccctagagcacaaaaccatcattcatgattgcacacactaatttgtttgacacaacaatttcctaacattcaaccacaaactcttaccttatctcgatttggtcaatcagaaaattttcagattcattgatcatcatttactatgtgttctcatatatttgcgatttcttttactgcttagtcaaagagtgggtaaatcgccaagacaagtttcaacaattcttgtaattcatgttacaccacaaactctagttttttttaactgtatgtacttggaagaaaacaagttttactctgtacaaaatttacagctacaaatctccggagcctctctttgaggtggagagctcttacaatctattgatttgtctcttataataagtggaaatcaaatctagaacaaagctatataacaaactcatctacacgttagagactcaaattacacataatcaacgaatcaataatcactacgttagaaatttatcaatacaaaatcctaaattgaaaaaaggatcttaggagaaggcattggaagatctttcttgtggaagtaacgtcaacatctttctccttcaaccactcctttacatgatcactactttgcctctcttggttttggaccctacaataatcgcctgtcaattttcagacaaatccgtactgtctaaaaaccatctccaaccgccactaattgccaaaaacagaaacatctgttccttatcatctcctgcgtctacatcaaccgattgaaacctctcccactgaccacttcttcaaagatttttctacaagatgatgataaatcttgaggagaagtaacagaattgtatcactttttgactaattgatgtatctccagagatcttagagtggatctggttttggacccaccattgcttcatgatctgctagaaccatgtgcttgtgcctatcaagataggaacaatggcatctgatttgttttccaaagttgggaaaacgaaacaggttttttcaagtagtcacaggcaacccgtagttctgaaatgttcttatctgtccatcccaaccacctgtgactatgaccataccccaagatagagagctggatgctctctggtaagaggacttgagaaacttgtaatgagatgcattcatcgcggatgtggacagaggatttgcgggtaggttttcctctggccatgtcgcactccctttggatattgatccggggacaaatccttcgttgtgagataagcatgatggagaagaaaacgggagagttgtgttgtgatctgagaatccacaccatgttgctgcaactgatgcattggcggagaaacgttcaaaagatcgaatctttttggtttctgattcctcatcattgctccatatatatacattggagtcctcacaagctgaaacaatgtgttttccatcagatgtgagagatgctgatgtgaggcttctcgtcttgcaaacgcctaaagattgaaaaaacagagatgggattagtttagaatcaataatagagctatgcaaaagaaaatgaaagttgaaggagacataaaaagaaacatacctttgtattttctgacgacattgttgccttggagaattctgactttggaatccgcggaaacaaccaggactttagtcggttcttgtggtaagaactggaaaaagcaagtacgatttgttaacatctcacaaatttcaagagaagtaaacgaagtatctagagaaagggaaagacataggagacattacctgaaaaccagttatgcgtttatttgaagacttctttttgttatgcaaatgtatctgagagtccagttctaaaaattctccagacatgttaaagaatctgcaactcccgttcagagaaccgatgattccaccttgtccatccggacgataacacactgccgatataatgtctttgagatctgcccaatcaacaacgctgcaaccggaaatgttccaaattcgaacctttccatcaattgaaccactcatgaaataattctcatttaccgggttgaactgaacagaggttactgcaaaaagaaagttgcaggcaacaggtaatgtaagatcaatgtagtaactgaaaaagaaaaagagatctagaaaccaaaaagaagaagaagcataccataactattgtgagcgaaaactccaagacaatcattgctaccaactttccaaaggcggacagttttatccattgacgccgaaagcaaatactacaccaagaaattacataacaaaatgcctcagtttttcgcttccgttaaagcaatggttgcaagttaatataagaaaatgcaaaagattttggaggcttacattatcttttgaccatgagatgtccaagacttcacccgtgtgcccacggaattcatataatggtttttccataatccgaaaaactttaggagggaagacaacacaggctgaatcagatgttttcctgaaactttctgtagtcttctttggtttctcctcatttaccaaaactggtttcaactgagaaagatcatttacctcaaagtacatacacgaaggatctatctcgttaaggcaatcccttcgtagtctagatttcttatcctcaacgactttccacaccctcacaatcccatcttcaccagagcttgcaagaaacttcccatcgttgctaaatttcatcgccaagatggcaccatcatgagctttaatgtcttgactctgataaagagctgaaagctcctttgcctgcttcttacaatgcttaaccttaactcttgaaatcacatcaccataaccagaagaagctctcattctaccaccagattcgatatttgtatccgcggtacatcccatagaccgaagcctcgataaccatcccttcttaaaactcgtgactagccctgcgatattcctctgcttctcggtttccttcacttggcaatatctggaactagaacatgacgccattgaagagctttgtcttctcgtcacatcacatccacccacatttctgtctactctcaaagacaattcctcggaaacttcaacgcttgaaccagacaatgaaacctcactagaagaactgctgcactctccagatctctcctcagcttcaacagaattctcttcacctccatcaaaacaagactccacactacttccagaaaccgaatccttcgtctcaacacgcccttcttcttcaactcccatccactccaagaacttcctccgccgctccacaacacttccaggtgaatcattccatacatcaaatccaaaaccacttggattcaatgccatcatctcttcgttagcatcgaaaaactgcaaatcttcctcttgagataagtaatccattattccttgagctattgtcaatccatgaaacagagcttaaagaagaagaatgcttttctctcaaaagaggaatttccccaactgccagttttgcttccaaacaagcaacctacaaggcaaactatatataatactttagacaataatattttaaagaagtttacaaattaagcaatcacagagttcgagataaaaaaatcagtttaaaaaaagaaataaaaagagtttaacatcaatctcaatcctaaaacccattgaatctagtctctctgagacatttacacaaacaacttatgtgggtcgataaatgtgtaagcaacgaaaccaaaaacccatcaaaagagaagaaaaaatggtttatttagcacacagagaagctgaaatcagcacaacaaagtgaaagatctcatttttagatcctaagcaacaaaaaatccgcaacaaaaatgcgtgagcacgagcatcaccaattcaaattttttggtaacaaagattaaaaattgcgtacatgggttggttcgtcttcacgaggtttcttcgaaattggaacaaacacatcccaaagaagtagcaacagtggtagagagtctaaagaaacacacacaaaccaaaaccagagagaattgtaaaaaagtaaaaagagagaaacttttattattgaaagggaaaagagaagagaagaaggatcaaaggatttttattgaaatctgtgaagaaagagacaataaggaagaagaagaagatgggattgtccggagggaatagagagtttttggagacgaatctttgtgtgtgaccgtttgctttgccttatttaacctctctgtctttatttcaattttgttttcttctcttcagattattcggtaattaaatctattaatcacacgaccaaatatttcgtagtaattaattataatcatttgttatcaattttagatctttttttttatctcctcgtgctctctgtaatactactactaatcagtaataaatcattccctctgtatatgattaggagaattaatacatttatatgtgattctattgaaacatttttttaagttatttaaattttattttttatgaaatataatgatattattttagagttttattcattttcgttacattatagttttaagggtcaagaattattaatcgtttatgcgtagagtttctttttgatattttgaagaaaatattttgtggtacatgctttgttggagcccacatatttgcatgatgactacgcggcatgttccctattcgctttgcgtttgatcagattctaactatagtcctttgatctcaattatctgtcacattaacaatctaatttccagttgtttgataccttaattattcatcttctaataaactaaagttctttttaacttttttatttgcctcttagcactctgtgattgtttggcagcacacaaggaatatttgttactcttttaagtgatcatcatagagatttatattaaaatataggatatgatttttgggttgttccttatcaaattaaaaattgcaattaggaataatgatttaattttaatctataattaagagaatgatgtgatttatatgagttatctatatctaatcatttaaatggaccaaatacaaactaaaccgacaagattaaaacgaattgtactatatatcaagtttttatttatcaacataattgacgactaaaggccgtcattgctgagctaagtctgtctttctgttgaagcaattcacaagtagaaattaattaagcaaataattaacaatgtaatgatgaaatactactgcctttagagttgcaaggcagagtacctggattcatgcaggcttgtattgtaaagagaatatctgttttcccatttacatttttgtaattatttatttcgagtcttaaatttttgtttgttacttaaacaaaagatcttcaagatttcttgataataatgatgttagtatgcatgcatcatcatattaaaatagacactatgggcaacttggttttctcctcctactattttcatcttcatccgagaatctgagactctattagatataatctaaaactcttttttttctacaagcaccttaatgtattttattttatttttttttcgaacaagcaccttattgtttttatgttctaaaataaacgtaagaatctagactttgcctctcttttttgtgatatttgattttctctcctattagttacacaatcgttttttcaaataaaaatgcttcggaagaatttgtaagaaggtaaaacaaaaacaaaaactgagaaaccttttttgataaaagtttaatatctcacaatttaattagctgaaatatgagtctagttattatattatagatcatctagaatatgcgtacacatattattctatgatccatagtgtttattttgtataaggtaataacagcaacaacaacataatttaaccggttagttaataacattttcatatagctagttctctccatttatatatccgttgcgacaatttcaagtatgtagatattattagatttgttactaatcgaggaaaactatgagcttaattgcaacaattcgaatgtttagaacttatgagagatgttctgaaacgaaggaacatgttggcttattgacagccatcaaaaatttcatcatatcgtgcataaagttcaaatccaaaacttatctccttatctttttgtaagataaagtaaaagagttttgtgtccaagtaaaaaagaagtgttcgtgtccaagtaaaaagagaactattattgattttgtcagcaatgtgttttgtgtagcatctataatgtgctgatgtggcttgccagctaggtaagctatcaaaagcaacagtttaaattatagataaaaagcgcacgaccatccatattatattttatttttgcaggatttctatagtttatgacttatgatgttattatatttgcatattggtataacaaattataaaaatattgtttcaaaaaagatacggttcatagaatggccacttcattgctttggttgttgaaacgttgatattcttccttcatgttcatcaaacccaaccagattctcctaaccttaccagcttcattattacctcattatagtcctgtcacttttcatttaaaatttgtttgtttcattaaaacaacaaaataaatttcaagatttatgctttgttaacgtcaataaatcacaaagaaagagaatagtttcagtgaagtttccagtttgtattctatttctatccttatattcatactaaaaaaaatgatatgtagagtttaaaattaagagaaggtagcaattaaataaccagtaactgataagaaacaacttataaatagggttatacaaaaaaaaagagcaactcataatgccttatatatataataaaataagagaaaaaataacctcttcttatggttatggtgcaatgagtaaaaatgtaaaatagaaaacaactttagtatttgtcataagttttggatccaatggtcaggtatttaagtggcatttaacttgattctttagatgaacctccctagttcacatactaacatgtgtctaatttcataccaaacaaaattcataatttcttttatatagattgaaggaatagtaatagacgttaaaaaaatcgaaggaagagtaatgctgcgactgaaaattgaagataatgaaatatattatatgattccaagttttggcatttttaaatgttttaaactggatgactagtaaaagggtgattaaccttaattcactctgccgacatcattaacaaaactaataaattattagattaatgcttaatagtctcgccaccgcattattctaatagataataaatggaatattctttcagacttgaaagaaaaacaaaattctaaattattagagataaaactaacagcggattcttttgagtactaattatatacactagtatagtaaatatttagtaaacaagacttaataatgacaccacaaattataaaaattcgcctgtcatgttagaatgcgaccctaacccggaagattggttaatatgataatacagcattttacaacaaaagcgtctatgtatatcagatgaagatttgaataacgtaacatattttagttttttttgcatccatacattacttagctctttattcaaagtatatctagcaaactgtggaaaattatttgcgaataactccttcgtccttaattttgggaatttgcaaaataattatcaagcggtttttaacaattatcatattcaatattaatacgatattttgaataatatgcacgatatataacacgttgtttaaaaacatgtacgattaaatgcatactgtaatttaattgaatgatacggagcgattttataatctttgctctatagatcgctatcaacctaataaaatcttcaattaaggtaaaatcaacaagaacaaatttaattagtatgttctgacaccatgagttggttaactttaattacttttcttttcttttttttgggtacaaaaatagacacgtactaggaatcaaaccgtataggaacattttctaaatcaggattatttagccaacatatatagtagtaattagaaaaatagatgattttggctatcaaacaaacaaaattagatgattttcgatatataatcttgtatggttgagccgcataaccccatcaagttttaagatcatgactattggagacgcatgcattcatttgttgtgtttagttaggttttttaacggataatagagttttgagtttaccaaactaattctgatcgtaacaattgtcagacttcaaccaacaaaaactaagaagtaaataagtaacagttttcagatataagtaatatacaaagttatgttattttcttatacaaaaattgttctttagtgctaatatatagatatacaccaaatacataaaatttgaactcagactagctagttctagaaattgtagtcgctatgaatagattgggaggtaattcgcttacatagttacatcgcataattagtgtaaacttgcaaaattaaaatgcaaatattattacgtaggagcatacgtgttgtgttgtcctttttcccaaagtgattttaaaactaacgacgtgttcacttgcgatatttgactcataaaactagctttttagcttctcttgtacggattcatacaatatattttggacccactatatggaccgtagtatctagccatttcgtgaattctatacatacgcgtatatgggtgtcggtgtgtgcgaaatatagtcaaagttgacgttggagtttgggagaaggaacatggagctccactggtttctatgttgatgatagttatgccacacatcagtttttgataaatgtagttgttgttaaactttggaagtcaaagaggataaaccataaaccagtttcttaataaatatgattttatatatatcgatgctagttatagggttacaccaaacaaacacatcattttcattatgtaataaatatcgttatggattgttgttttcgtttattaaatgctattgctttgcatagatatactatagtgattataaatataatatacgaaaaagaaagtcttagtatttgataaataatgttatttataatagataacgttattttaataaaatgcccataataattaataaaaaataaatttgactattaacgaaaaataagtgaaaatgaaaacgttgacaagtgggtcagcgataattccctttgtgatggaacgtcccaaagttcgagacgcatcatgtgattgtgctgtgtggtctctcatatgcgcatgtatgatactaacgtgtaattgtagtgtgtggcttatatgggattgtaaatttctttctatataatcgtaagtttctgaagtcgatgatccaaattgactatattttataatcacatataacgtttagagtagtcgacaattatgaacttcagttttctttttccaaataaaacgttgaaatcaataatgagttatcataaattagtttaagcggatatgtaactacgtataaatactaaaatatgtatatgtgtgttaatttggaatacggacatatatagtagtatctagtctaactcatgtaccacgtccatgcaatgcatgagacatataaccaggtaaacctaaaattgaagatgatcttataatggatcataccaaattatatattaacctgatcagcatcaaatcaaaaattataacaaatcacatatcctcaatcacaagaccaaaataattaaactaaaatccaacttacaagatattttttatggttctaaatttggatatctatctatttgtaaactttagtgtcttattttgaatggagacaaaaatacagaaaaacctatcactctatcattcatacaaatgctgacctcataaagacacatcaacagtgtttgtgggtctgccaccaatcatatatgtgtagtatatcagatcttatattatttacatatgtatatatatatatgggggagatatagttattacttacattataggcatctaaattttgaaaaattgtattataggattgagaaagacatatttaaaagacatatatctaataaaagacatatgtaagtgattcttcatttaaaaaaaattctgataagcagaagtttaaagatttcttttaattacgcaaattttaatgattaaaggttttgatgataagcatatgatgctttctttctagttttgttatctatttgaaaaggtttttaatgaatgagatgtttggtcgaatgttcaagtagctttataacaaatagaaacccaaatatgatccaaacagcacgtagtaaaaatcattaagagcatatatagaatgagccacgtagtcataagctttggtcaacgacatcggatagagtactcaatccacctttattttttttgagttatataatgaaattattttaatgggcgattagtggcatattgaatgatgtcatcgtaattaaacgtttacttggtggaatatactgatgattccaaggaccaccgttgctttgagtgtatgacaatctcgtacttataatcttatcattcaccaaaatcaagatcagttcgctttatatatacttctttattcaaagtcaaaaaagaaaaaagaaaaaaaaaaactagcaatgaagagtgaccgtgtagattttgttataagaactataaatttgaaagttcaaaataactcgtttcacccatcaccctcaagataattaacatcacaattcacaatttactttcgagtaacattacgtttctactaaactctaactattgatctaacctaactaagtgattgacaaaataatccgatttagagttataggattggatttgagttgttagaattagtaaactccgtaaaagaaacaaactttggctcactatagctagctaaaattttacattaaattcgtgattattttagggttatccatacatcaattcaaatatattaactaaaaaatatataaaatatctcttaagcttttcatcataaaaaagtattatataaaacattacgattaattgtctttatgaaaaaaaatggtctttatgaaaatataaataggattttctccgaatggattgagcaatttaacccgaattgaccgctcatgctagtgcattcagtgagctacacaatattgtaaagtactagggtttgaattaagacaaagtttattgcatcaaacccattgtatacgatatatggaagttaagtaaaatggtaagacatcaatcaaaatctaagaaacgggggcaagaagtggatagaagttaggtttaaattcaacatgttaagagacatgactcaaaatccaagacaactggacatacacactctatacagttgttaaaattaaggaaattaaatggagaaagaaaatccagctagggtttggtccatgcattagcagtgaaaagagtacgtggaagggccacgggatgttatggactttgcaatggtaggtttttaattagaacatacctcgacttaagaactcaagacatatctatttcgtactttggtctttggaatttgcgccttcccttatttgtgattcttcttgaaccaaccaacctgcctactttaagatttattcaaattaatttgcatgaacataacaattattctgttttgagctttttacgtaagaaacaaagaaaatacaatttatagttttattcactcgtgatccatcaaaccaacacggccattcaatatattgaatattatcctaactttagagatgatacacaacacaagactcgtctccaatgacaaatagccatcaaatgattaattctacctgtaaagcgacaaaaacattactctaaaatatgcctttaaaatttaattaaaagaatagataatttggtcgacagatagataagaagaacataagaagatttcatccgaagagggatttgacaattatggtgaaagaaacattctgtacgagatcttaaaaccatataatctcttatttgtgacggaaaaaaaaaaatcgttgtaaatgtaaacaaaacattctgtatgatcatgtttttttttttttttcaaataattttctcaaatgatatgacaaaaaagagaagtggtcacatctcttatgggctggaacattggtccttataattaaaacccatttggggtatttgtgaattaatgagaaaaagagtaaattgcagcctgcggagaggaccactactgtcaccgtgtgggcacgatttagctggccattcattctcaacatcatctcactatgtattatcgcaacaactgtcttttctttgatcatctttgggtccaatatttatacatatgtgggacaacatcaaatttttaccgtacgaaatatcagaaaaagcaatgaaaaaatgaaaaaaaaaaaaagtcaatgtttgtactttggttggttaatttagtgtctgtgggtttgtggggataacattttagaatcttttcgattttcttaaacgttccaatataaaaatgaaaaaacaatcaaattcttttgtttatagagttactgatttagtatcaggctcatatttgatattcccaaatggcttaggaagttaaatacggcccaattgataaattacatccaaagcctatattttggatgtcaggcccaactaaaacccaaaagaaacgatataattctataatcccaaaactaacaaaagaacggtttcattgtttggcgttttacgccttgcaaacacacacacacattcatgaccatgaacactttattaatgcctaaatatacattttcgtttttgaggaaaaaaaagtaacgaagataagaaaatagaaaatcaaatgatagagaaaagtttgttacagagaagaagaagaaggaagaaatgattctctgtatttctcattaattcacaagtatacaataacacttgttatatagtaagatacattagaccaaaaaaaaaaaaaaaaaaaaaaaaaaaaagatacaataccggtttgcattacagagatgaatcatatggtttagtaaaccatatactctgttatcaaaatcagatgaccttttgtttaggtctcaaacccaacaacacataattttgctttcttcacagtactttgatttttttcttacaattatttaagtagatttgtaaatgaacaaaactttatcctttagggccaacaatactcacgactactcagggctttgaattcggaaataaaatcatagcttgattgatttcaattttaatgccataagacaaaataaagctgttgacaacactcaagctcaatctagtatctaaacaactctttcaaaacatatttgactgattggttttgaccaaaaaaattgactgattggtttgtagtagattttacaattattttgaagtctttttttttttaaaaccaaaactttagccaaagaaagttttgattagttcaactttagaactctagagaaagcatatttttcgctggtttgttttttaacgatatttttttacttagttttgttttaaatcttgtctagataataggagatatttaaggtatatctgttagcaacataatccagatgagatttgtggagagattcaataacaagaatctttactgaatctaaatctttttcacccttaaccctataaaagattcaccacacctcccacaaaactctttatcacacacacaaaaaaatacctctcggatcttttcaatggacgagattgtagaagactcgagcagagtcatggagatagaaggacagaatgatgatctggaccggtgcgtggtggaggaggttgagctaaccgttccaaaaaccgatgatccaacgttaccggttctcacatttcgaatgtggactttaggtcttggtgcgtgtatcatactctcgttcataaaccagtttttctggtacagacagatgccgttaaccattagcggaatctcggctcagattgcggtcgtgccacttggtcacctgatggctaaggttcttcctacaaggatgttcttggaaggatcaaagtgggagttttctatgaatccaggtccttttaatgtcaaggaacatgtattgatcacgatttttgctaattcgggagctggaacggtttatgcgactcatatacttagtgcaattaagctctattataagagatctcttccatttctaccggcttttctccttatgatcacaacgcaggtgattaattttcatctgccctaatataagcataaaacgatttacatttttattttatttttattttctatttcgctttagcatgtattttaatttatatttttagtagatttatagatagaaactagacgatagaatggtcgacaactagatagttacagaattacttcgaccataccaaaactaagagatatatttcttcattaacttttaagtaactaaactgaacttttgtctcattgcaaaggatacttgttggctttggtttgaagtttgtggtgattggttagactaaaactttttgttttgagaccatttttgggcatttgttacaaaaaaaatgtttacttttggggaactttttcttatttttgtgaccatggaatctccttgcagtttctcggatttgggtgggctggtctattccgtaaacatcttgttgagcctggtgaaatgtggtggccaagcaatctagttcaagtgtctctcttcaggttatactctttattttacatttataaaacaatcatcttcatgattagtcttcaactaaattagttcactaatcattgcagtgccttgcacgagaaggaaaagaagaaaaagggaggcatgacccgaatccaattcttcctcattgtccttgttaccagttttgcatactacattctccctggttatttattcacaatgataacttccatctcatggatctgttggcttggtcccaaatcggttttggttcaccaactcggttcaggtgaacaaggtcttggtattggcgcaattggtattgactgggctacaattagctcttacctcggtagcccactcgcgagtcccttattcgctacaatcaatgtaaccatcggttttgtggtgatcatgtatgtcgccactccaatttgctattggctaaatatttacaaagccaaaacatatcccatcttctcaagtgggcttttcatgggcaatggctcgtcctatgatgttttaagcatcattgataagaagtttcatctcgaccgagatatatatgcaaagactggtcctatcaatatgagcactttctttgcagtcacatatggtcttgggtttgctactttgtccgcaactattgtccatgttttactcttcaacggaaggtatttaactctatcaactcctcagaactacctaaattttactttttaatttttttagctgaactagatatccgagagtagtctttggtgaaagtttctaattaatttccttgcaactctcttttattttccagggatttatggaaacaaacaagaggtgcttttcagaggaacaagaaaatggatttccacacgagaatcatgaagaaaaactatagggaagttcctatgtggtggttttatgtgatcctcgtactcaacattgcgctcatcatgttcatatcattctactacaatgcaaccgtgcagctaccttggtggggagtgttgctagcttgtgccattgctgtcttcttcactccgcttatcggtgttatcgccgccaccactaatcaggtatctacttaaaaccaaatatgaaagtaaagaaactgaataaatttctaacaaattatttttgtgaatcttgttttgctaactttataacaaaatcatgaaaacaatgcacaaattactctagaaaaacccttgaaaaaataatatttcattaaaagaagtttaaaagaagttttgattaaaatatcgatattcttttacaaataatatttcattcatctatgtctcattcattgtccttttactatttagagctagagctcttttaccttatttttttgtaagtgacaacttttaatctaacaaggctcctattgctttaggaaccgggtttgaacgtcattacggaatatgtaatcgggtatctctatccagaacgtccggttgctaacatgtgctttaaagtatatggatacatcagcatgactcaggctctaacattcatccaagacttcaaactcggactctacatgaagattcctcctagaagcatgttcatggcacaggttattgcatcttaaaccatcattagttattggtttaaacgcgatataattatatactaacacaacattttcaggtggttgggacgcttgtgtctgtggtagtgtacacaggaactgcttggtggttaatggtagacattcctcatctatgtgacaaatctttgcttcctccagatagcgaatggacatgtcccatggaccgtgtcttctttgatgcttcagttatttggggacttgtaggaccacgtagaatgttcggtaacttaggagaatacgcagccataaactggttcttcctcgtaggtgcaatcgctcctttctttgtctggctagcgaccaaagcattcccagctcataaatggatctcgaagattcattttccggtcattttaggagcaacctcgatgatgccacccgcgatggcggttaacttcacgagttggtgcatcgttgcatttgtgtttggacactttttgtataagtacaagagacagtggtggaaaaagtataactacgttttgtcgggtggtttagacgcgggcactgcgtttatgacaatacttatattcctatcggttggacgcaaaggaattggattgttgtggtggggaaacgctgatgatagcacaaactgtagcctcgcgtcttgtcctaccgctaaaggcgttattatgcatggatgtccagttttatgatcttgtcactattaagtaaaaatcctttagtttttcttttggagttagttggtttattttttatttggttttgtacagagctctacaacagcttgaatattatttatttttagaatcgtttttatgtatatataaaaataaatatgatggattttcatttctatgtacttaacaaaacaaatttcgtcctttctcaacataactatgatggattttcatttctatgtactatattattaagtacaaattaaaaagcctttagttttcatttggagttagttggtttattttttatttgttacatacagagcttacagtagcttgaatatatatatgttggaaggtgatcaataactaagtaatatgaaataagacttatttaaataagattgaagattaaataattacaatttttgtttgaatttagttaataagatatttaaaatatgaaataagacttatttaaataagatttaagattatatttcttaagaattgattatacatgttatacatataaatatatatttattaaacattaaagtttaataatttttggtttatttgattcagtttgtttcggttacagtaaagttggtttatgcgtctttatgtttggtatagtttgagaacaaatttcaatctggttatgctttgatcgagttagattgtttcgattcaattacggtttactcggtcctcccctttatgagtccttgaatcaaattttaaaggctctcttaccaagaatcaaaatttttgaaaacagaaaaacattaaaacaatatgtaaatgaaaattaggattagcacaaattctcgaagttttatttgcatcttacttcaacatttgttaaaatataaaggacgttcatcatttgcaaataaagcagatattttcttaaccaaaaccaaaagaaacatttctatccataaatttagaatatatgtttccttaagattatttttacagtcaatgctaatctgcaacaaacaaaaaagtcttattttgttgtgtatccgtagtatacttccttctataaaaactatcaataaagatttgataccaaaattaacaaaagaagattcattgaaatactctactatatttcttcacccaaatgtctcaaattataattcaatctggtttcattcaggatctcaacacacacaactagaggaagcaaaaacttttctctgtgagtatatattttgttatttcctctgttttgtttcatatttttaattgcaaatcttaagaacggttacataaacacacgatcacacaaacacataacaatccgttttttatttcatgcatatcatagagacaaaaacagaacaccaatcctctgtttctgaagaccgatgaaagactttacagatacaatatcggagtcggagtgcgacgatgagataagtatagttccacaagtggaactaacggtgcccaaaaccgacgatccaacttcaccgacggttacgtttaggatgtgggttcttggcataaccgcttgtgttctcttgtcatttcttaaccagtttttctggtacagaaccaatcctttgaccatctcctctgtttcggctcagattgctgttgttcccattggtcatctcatggctaaagttcttcccacaaggagattcttcgaagggacgaggtggtctttcacgatgaatcctggtccctttagcaccaaggaacatgttcttataactgtgtttgcaaactcaggctctggggctgtttacgctactcatattcttagtgctgttaagctttattacaagagaaggcttgatttcttacccgctttgctcgttatgatcaccactcaggtaaaaattgatagctttgcaattcgtaatttgtaggtttagggctatgtgaactgagagttttattttccctgtttcttgtgctgcaaggtattgggatttggttgggctggtttgtataggaaacatttagttgagccaggtgaaatgtggtggccaagcaatctcgttcaagtgtctctcttcaggtaacggttctttctaatgattctcttatatgttttgattaagcatttctaaaagtatctgattttgattatacacagagcattgcatgagaaagagaacaaatcgaaatggggaattagtcgaaatcagttctttgtcatcactctcatcactagcttctcctattatctcctacctggttatctcttcacggtcttaaccaccgtctcttggttatgttggattagccctaaatcgattctagtaaaccagcttggttcagggtcagcaggtcttggtatcggttcctttggtctggactggtcaaccatcgcgtcataccttggaagtccactcgctagcccattctttgcctctgcaaatattgcggccgggttctttcttgtgatgtacgtaatcacacctctctgttactatcttgatttgtacaacgccaaaaccttcccaatctactccggtaaactctttgtagccagtgggaaagaatacaaagtaacgagcatcatcgatgccaatttccgcctggatcgtcaggcttacgcagagaccggaccagtccacatgagcactttctttgccgtgacctatggactaggtttcgcgaccttgtctgctagtattttccatgtcctgattttcaacggcaaagatctctggactcaaaccagaggagcgtttggaaaaaacaagaaaatggatatacatacaaagatcatgaagaggaattataaagaagttcctctctggtggttcctttcgattttcgcggtgaatcttgcagttattgtcttcatatgtatttactataagacacagattcagcttccatggtggggagctttcttggcttgtttgatagctatcttcttcactcctctcgttggtgtgatcatggccactactaaccaggttagaagagagattcacatgcttataacttggcttcaaaaaccggctatgattaacaaaaccatgattctgttctttgttttgttaggctccgggtctgaacattatcacggagtacataattggatatgcatatccagagagaccagttgctaacatatgcttcaagacttacggatacatcagcatgtctcaatctttgactttcctctctgatttaaagcttggaacttacatgaagatcccaccaagaaccatgttcatggcacaggcaagtctaaatagtttatgtgtgtcacataaatatctctaaaacatttgtcaaaattgttgttgttttcacaggttgtgggcactttagttgcagttatcgcttacgcaggcacggcttggtggctaatggctgaaatcccaaatctctgcgacactaatctgcttccaccgggaagtcaatggacttgtccatcggatcgagtcttcttcgacgcatcagtgatttggggactagtaggaccaagaagaatgtttggtgatcttggagaatactcgaacataaactggttcttcgtaggaggtgcaatagctccagcattggtatacttagcctcaagactcttcccaaacaagaaatggatctcagacattcacatccctgttctgattggagccacagctataatgccaccagcttctgcggtgaacttcacgagctggctcgttatggcgtttgtgtttggacatttcgtgtttaagtacagaagagaatggtggcagcgatataactatgttctgtctggaggaatggatgcaggaactggattcatgtcagtgcttttgtttcttgcgttgcaacgtagtgagattgcgattgattggtggggaaattctggagaaggttgtcctgttgctaaatgtccaactgctaaaggtgttgttgttcatggttgtcctgttttctaaaaccaagattctcctgtattccttgtagcacattatccattacaacgtttgtaatctgtttctataaataaagctgcttattcagtaacataagacaacaaaaagtacatttatagaaggagaagaagacaatggaagtcacaagaatccaaacaaagccaaacaacatttgggtcgttgaacaaactacgaatatcactacaagtcccaaccaatttgcatacagaaagtcttgaaaaggctttacaaagttctgaaaaataatttttctcttctcttttgttttgtacacatcaagatgtctcttccttgagcctgtacaacgtgatttcttgctgcttgaagtaacggcgatcctcttcatccaccagcacaagatttagataatactttacgctgaatttgttgtttatgttcttatgcgttggtgtcagatcgtatggtgtcaagaacactcttacaggtatcgattcgcctgcaacaatggtctcaatacttggttacagaaactagtaataggtccgaatgagttttgtaacatatgatgaatatacatacctctaactggagcaccatccattaactcaaatttggctagtgtttctgtttcgacgtgagtattagctcctgctccagttgattctcgccgtcttatctcaagatccatattctttatcttgattctcaccagaagaaagtatattttcccaaggataacatcttttaggtgatacctgcatcgagagcatacagaattagctactgttttatattttccacatcgctcgaaacccaaagttacgaaaatcagtttatcttacttgcttttattgtactcaaactcgatatgcagacagtcctcgattccaacttccatctgtacaatgggtaagggtccaatggaattaagcgtatctaatgctaataaggaaatggaatatcaaaaggccattcactatcaaaagcaagagcggtaagaaatcagtaaacttgaatcatatcagaactcaccttaatgctattattgattggaggaagcggaacatagttacggacctgtttcaaaccaattaaaaaagagctaagtttatcttaaggactattgtgtcacgaagatatatatacacacaagtgaagaaaaataccacaaagtcctggtattccacgatgcttccagcataaccacgtgtgactgttactttgaggacatacctgaaggaaacagaaacaaaaacaatgtacacaataagcaacaattagggacttaatatattgtttcaatctgatgtcaaagaataacaagatcataccttaggcgcacgttcacgccattgtatgtctcatatggcatctcaacgctcgaaaattcaaaagggtatgtctttctttcatatatttctccaggtacatcaatctcacgcactacatattagatatacaaaccagaacgatagttgggtcaatcaacgactactgatgaaaacaacacagccatgtcataatggaatttttgactcacccaaggaagtgaagtcataaaagtttcctctgtcaaagtacatttctgttaaaaaagaaacaacagagtcgtcgataaacatataaagacatgagttagaaaccagataacagaaccgacataattcacagtatttgcagacctatttgaccaagaagctcaacttttacaccattatgctccacttttttcccttgatatggttcaatgttaatctgagagagacaaattacgaaaaaaaacactcctataaaagcaattccataaagctcctgataactagagatgacaacaaaaccaagtaccttcccagcaatagtttcttgactctggaaaagtggattcataactatttgtccattatctttcttagtgggtacctaacgcaacagagaccaagtagatacgataagaaaacctataccctaaagtccgggaacaattaatccgtaagataaacgtaaagagcgatgtgtacctgtttacggtttttcccatcagtaaatgtgattgaaatattacatgctggcttgaaagctccaagaagataattctgtgatattaatccccaaaaaaggtataaactttagtaacaattacagaaacaacgacactaagcaaataagagaaattttgttgaaaccaacacttaccatgataagaagattcaattcccgatcacaaaaaaaaaactgttcagagcataagaatccaacaaatgagacaaaattagtggcattttcaacttgaaacaccagaaaggtttggtttctaagctagagctgattcaaattaggaaacagagataaaccctaatctcaattcatgaaaaagtaatcaaacaaacaccagagaagaccaaatcaaatggtaatgattcaacgatgagaaaccagacttgatagagaccaaactgagatccacaaagtttagattcgaatgaacaactaagaaattgtgtacctttctgtagtgaaatcaagggtttatttcaatcggagagagacgaagaagaatcgatcaaatcgacgaagattctgacagttgggttcgagacgatcaacagagtcacgaaaaaaaaaagtcttttcttttgtatcaacttgatacacaagcccatttatattataagtaccgatcaaagcccagataataccattgacataaacaggaaaacggctaaaatcaacctgaactatttgcatgcggtgtttttatacccagattcaaatgtatggtcgtttcctatccgaagtgattaaatattcaaattcacaacctgaacttatcaatattaggccaaaatcaacattgacttttatagtgttagtaaaccattgatttcttatgactaagcatatattgctacgatgatgtggtgttatacgggctgatttgcatctgattattcccaaatttgaagctttaaaaactcattttcgtaaaaccaaatttgaatttcatcagagtaacataagaacttgctggatccgagtggtcaaaagtgaaatattctcgtcttgaggttgcaggtttgaatatgcttgttacaattttacatttttttggagatttttgccacgttttcctgtataacatcacatcatcgcaataataacggttgactaacattgttaaagtcaatgttgatttgacctaatattgataagttcatgttgcgaatttgaatatttaatcacttcggataggaaacgaccatacattagagtctgggtataaaaacaccgcatacaaatagtttaagttgattttgaccgttttccctgacataaacatccataaatcttataaacattctaaagatgtcatttttacaaagaagaaaaagaaaagctaacatttttattcaaaatttgaagaaaaccaaattggtaaatgtatagatcattgcttgaacgagacatgaattaaattttctaaaaacatcttacggcaacaatgctccaacttattcagagaaatatgaggtttacaaaaagtgtatattcttgggttgtactctttttggactatacgaagctctagtgaagagtttgcttctattccgaatctccttctgaaggatgttgttgatatgaatcctgagaatctggctgaatgtttctaagctgcgagacaaaaagcttggagatgccgtttatagctgcttggacctcatcggcattgcttggacttccccagacagaagattgagagcttaaaccagtgtactcgcttgcagcaacttgtgtcttctttgaggtagcaagaaccttctccaagtccagttgtgtcaatggtctaggaacctgtgaaatgtaggtaactcaaagatgtcattacttaaaaatcaggtggatgaagggaacattgacattccctaaaaaacggtttatcacttacagaaactcgtttgccctctttctctgcctctaggatttctcggattgggaagtaagctgcttttttgcagagttcaaaaatatctgatccggtatagtcctcacataaacgagctatacgatcatagttaatatctgattcaacactctctcctttcaaaacaactttcaatatttgcgctctctcctggcaatcaggcatcccgatctcaaatgactgaggaaaacgcctcaatatcgcttcatcgagctctgatggtctgttagttgcagcaagaaccatcaccctcgcattctctataaaaccaaaacatcaaacctcagactgtacatagttcacatggctaaacagaacaatgaggacaagaatttcaactcacggtctgtagtaaatccatcccataaagccataaactcggtcttcatattcgacattgcttcattatcagtcgaccgtcgctggccaagaaagctatccacctcatcgataaaaataatagcaggttggagtttatacgccaagctaaacacagcagacactgaagaaaacataaatcagtaacacaaccaatagacaggtaatgtaatctccaaatctacacctaccaagcttctgtgcatcaccaaaccacttgctcatcaaattagaaacctttacattaataaaaacagcttcagactctctcgcaatcgctttagcaagcatagtcttcccagttccaggaggaccatacaacaaaacacccttttgaggacccagtaacttcccataagcaaaaagctcaggtcttttcaatggtagaatcacaagctcatacaaagcttgcttaattgactccaatcctccaatagaaccaaattcaacatctatgtgtaatgggtttattacatcacacgcaatcacatcctgttttcacaataaacaattgaaaagattggattttgaatacgaattcaatcaattagagaactgtatagaatcaaaattacctcgtattgattggtttgaataagaggacgacccaaacgtttggcgatttctcttttgtgctcgagagactttttagcggcgtcacggttcgggtcaagttgacggagaccaacgtagagaaccaagctactcaatgcagcactagcgacgtaaagtatcaattgttctatgaaatttgaatcctttctccctgaagatctcttcatatctttggatttgggaatcagagaagattcaaaacgaaaccctaattcttgaagagcgttcgtttggggttgaggatagggaaaggaagaagaaagctctaaactggaaattacaggaaaagaacagttggtggcattatcgtaatatcgttgagaattgtgtgcatattggtaattgttttggaactggcttaataggccttgtgtggtgtttcgccaatggatctgaaatttaaagcccttcgaaagcccaatttctaatattataagattttgtgaattctgtttttgttacaaaagtagcatttggaaaaagtcgactcctgaaaaatagtctctgtagtatttccttaattcctttatatatctattattcaatactcactacacaattatttatttctagataagatgcaagacatactatagctactacaagtgcaagagtgtttatcgagttatccttacacgtttcgttgtttcatctcccgtgcactctttttcgtactataatggaagtgaaagagtcattgaatgatatatgtaagagatttgaccttagcatgcatctaacacgtcaacttcaaactaaattaatatatcacaaatcaaatccaaaacgtaaaataatgttctcctcgtcatgactatatctctatggattattcaacttcttttactttgatcgtgaggaatttcatatggagataaacttttttttcgtcaatcttgtacagttaaacattttccgctagttaaagaaattctcgtaacggagtatgaaattttttgtgaccacatatcatcgtagaaatttagacaaacaaaattaagaggatgagagactcgatgacttttattgtatttcaataacaatagaaccatgaaaaaaatacgtgcacttacacaagaagcagccaagcaggtggcctagaataaaaaaaggcgtttggtgttcaatatttttcatccatttgatatttttatttcttctctttctacatacatcgaatgtttatcttttaaacttaccaaatggattaaaatatcgaatacaaaagcgccatcaatgatgatcagaaagtggttttggcatgggaatcaaaatgcacgtggctttccgagaaagagcgcgttagacaaacgcagatctaaaagaccacgtgagaatcagcaaacaagcaaggttgtgaacaatacactgacttcaaaattgcgtttcttctcaaccgcatccaccatgttttatcatttattcaccagaaaagaaaaagaaacagagatgttgatcatgcatgttgttaccattcgaaacgctaaatttgtttgaaacaaataaaaaagagcaccaagttcttagccttccacttgtcatttgtcactttatgtttgggttctgatattccatttttatgctttatatatctcaaaccaaacacatatatagttggggatgcattattatccactagaatattaagaatgttgactatagacaactgtatgacatttgagtctttgagaactgcgaaatggattgatcgatgaattttttaaaaatgtagacctaactatataatatcttacaacttttttagtttggccttccattatcaaatagtctaatatttttttaataaataaataataagactaaataatttgggagactgaccaaaataacgaatattataagatcgatggaaaatggtttaggaaaaaaaaaattagactcctttttagtttttagtttacaaaaatacattgatggctgctaaaatacatatatccagacggaactgggacatgtagggatattgaatgacaaaagtactttgtgataagatatgaataaataaaccgagcaagttgataatatattttgtcaaattcgttgaagctaaataaatattacactgtgaaaaataagtagaatagtggtccatacattcttacagaatttactatatgttgaattcaaatctctcacaatgctaatatcaatataaatacgatagaaaatgaaaatgacatgttttattcttcaataactggtgtgtaaaaaagtatcgtatgaaaataactgaaagtgccattttataccaaatcatagttgcttggtgcgtatcgtttggcataaagtgaactataatttagatgtgaaggtccaatattcccaagaggcgaagacaaaaattgggtagacttaaaagagtcaattgatcaaacatgaactgaacttgggtaagatcatactttcaatcattagaaaggatccaccgagaggtctagctatgaagataggcatggtcaagctgagaaggttaggacgtaattagtaaatcttggttatagatagatagtcatatggttgatcttgctttctcacacttaacaccatcagttgaatccaatgttaaaaataggtaattctcagatgcagtacctcataaatgttgtaaaaaagtcataaataattattcaaaggaatgcatggaagaagtgaattacatatttttaaaaaaaatataggaaaagaaaagtaaagttcgtacaaaagagagtagtattattctctttttcttctccatagggcctcgtaatatctacttagcatacgaggacacattaatattcgatcatgtatatatatgcctacgactacgagacattcgaaagttattgtctagtggtttgtattcacacaatttccgtgttaacagttttagttccatttccttcatatagagatctaaatgatactactacatatcatttagtttaaggaaggacgatgtaagaaaataaaaatctaatatacgagagaattgtaacacgttcacttcataactagctagctagtggtacttaccagttactaccccaactctagtcaacactacattaaatactataatgtgaacaaaattattttgaaccaacggctgttacagtagtttattcaactttatcaaccaatgcattaaattgaacatatttctggccgattgaaataggttgggaacgatcttataaaattcagtcttaaacaagtcttggttttcaaaaatgcaaattcattcgtatgttcttggcaaaaaatggtttaattggtttgatctgatcttatcctatcacgcaggattggtgtaatataacgcaccaaattcggccaggaaacgtccgaatataatagtccaattctacttatgaatttgacgtgttgacgtaaagaatcaaaagtcgaacttattgaataatttattcgactttaattttcttttggggttttggtatgtttgtgaccacatggtatggagttgacatttaccattttcttgattgactacctaagaaaattttaattattattcacattatggagagttatgtttccatattttggctttaatattaatcatgtggtcaataaaataaagaggatagttatggcataagattgtccataatgtcatcatcttgtttagtaaaagacagtcacatgaaccggaatctcggtttaccaaacttttcactttttcagtttcacatgaatgtcaccagattcattgagttaaacatgtattttaatactataaaaggttaattagttatgatatcatatttatgacttttaaaagacttttgatattgtaatctgtaactagttataagttaaccatctcttataattagaacaaaaaaaaacttaattatggatgaactgattttaatggaaaaaatatttagaaatagaaatacattcataatttatatctaagtctaaccaaaacacaaatctaaagttacgaataaatcatttcaagtgtaattttactaactatttgactcctaatcttatttcatcacctaaactcctaattgttatatatttatgagagataatgacatttgttcctctacatactaatctaatggttgaatagtcatgtgtttgacaaacttataaagtttgatttttcgtatgtgacatttagttatacatccataaattatataactttcttagtgagatatatgaaggttatatatgtggagtatattcttaataattaattgttaccctactttttttcttttcggtgacgtaacttttataaagtttaaccccttaatgattattgtactacataaaccccaaaactcttttctcttttcttttttctttgtgtagtactgatatcaagtcaacgtgcggtacataagaacccaagatcccataaataaattcttcttggttttaagctttcttcttcatctctacttctctatataactttgagtagtctcaccaaagtccatttttaaaaaatcaactataccatttttagctattctttggtcttcgtttcgtgtaagcattcaatgttttttttcttttatctctttgggaaacgggagtgtggtcttcgtgtgtgtgtccctgtttcattaaccagttacgtttcattctcttcttttcttacgtttactacagatttcagaaagaaaaaaaagtgtttgaagcaaaagagattaatggcagattcttgagtcattaacttttttctaattcttttaattagatctctgaacataagagataacttgcgtcattattctatggttataaagattatgcacttgattaaaataatctctagttttcctttttctcatttgctaagcaactgtttctttttcttcttcttcttcttcttcagataattatgcttgggagtggaaagcaagaaaaattctaaactttatataaaattcccagaatcaattgatccaaaaagaggtaccatttttttcctctcgtcattttccataaaagtaagcttttgattgatatttaattattaaaagaatctgtcttttgggtttttgttttgacaaatttttgttttttcagtattgtcaaaaaagataatcaagaagaagaaactctgtttttttgttctgttcttggaaaaaaatgaggagtatgatgatggagagagagggaaggaatgagatagaaagagaagtaatagatgacttggaagagacgcaaaacgaaggagatgatttcaagtcaatacctccatggaaggaacaaatcactttcagaggaattgttgcaagtttaatcattggtataatctacagtgtgatcgtgatgaaactaaacctaacaacaggtttggtcccaaacctaaatgtctctgcagcacttttagcctttgtcttccttagaagctggaccaagctgttgaccaaagccgggattgtgactaaaccgttcactaaacaagagaacactgttgtccaaacatgtgctgttgcttgttacagcattgcagttggaggttcagtgaattttgaccagttgttttgactgtttgatcagtttttgtttggggttggatcattgttttgagctatgtgtttgtgtgatttgcaggtgggtttggttcataccttcttggtttgaacagaattacttatgaacagtcaggaggaactcacactgatgggaattatccggaaggcacgaaagagcctggaatcggttggatgaccgctttcttgttctttacttgctttgttggtcttttagcattggttcctctaagaaaggtagagattatttaagattctgtctcattgaatttgtagttagagatgttgcggtaggccaaagtttgcgggtcagtccggcccatataagtgtgatatgggcctggccaaacccgctatagccaacataggacggagattaatattggccaagtttggactattaatcccctgttggctggtttgggtctacattgctaagtgttcattatgcttctttttttggttaaccagatcatgatcatagactacaagctgacatatccaagtggaacagctaccgcggttttgatcaacggtttccacactcctaaaggcaataaaatggccaagtattaactcgattttttggcagtctcttagctctctttcaccactaattctagagtttttgatttaaataaaatctgtttatatgcaggaaacaagtgtttgggtttgtgaagtacttctcatttagcttcatttgggctttcttccaatggttcttctctggtggtacagagtgcggtttcattcagtttccaactttcgggttagaagctttgaagaacacgtgagtattattcttagttctattgactgtttatatatcaacagatagaaacagaatcttgatgatcttgaaaaaacttgacagattctacttcgactttagcatgacatacgttggagcaggaatgatctgtccccatattgtcaatatatctttgctttttggcgcggttctgtcttggggaatcatgtggccactcattaaaggtcttaaaggagattggttcccatcaactcttcctgaaaacagcatgaagagtctcaatggttacaaggttccatacaaaaaacactagtactctacaataaactccgccctttctttcgcgtactttcgttcttaatttgttcataactctttaggtgtttatatcaatctcattgatcctcggagacgggctttaccaattcatcaagatactttttaagacaggaataaacatgtacgtcaagttaaacaatcgcaactctgggaaatctagtaagtatacaccaaaaaaactatagaaaaatcgtcatttcaataatgtattatctgatgttcaaacgtaaatcgcagattcggagaaagataagcaatctattgcagatcttaaaagagatgagatctttgtaagagacagcattccattatgggttgcagcagtaggatacgcagcgttctctgttgtctcgatcatcgcgatccctataatgttccccgagctgaaatggtacttcatagtcgtagcttacatgttagctccatcgttaggtttcagtaacgcttatggagcagggctaacagatatgaacatggcttataactatggtaaagtcgctctgtttatcttagccgctatggcagggaaacaaaatggtgtagtcgcgggacttgtcggatgcgggttgataaaatcgattgtatcgatttcttctgacctaatgcacgatttcaagacaggacatttgactctgacttcacctaggtcgatgcttgtgagtcaagcgatcggtacagcgatcggatgcgttgtggcgcctctaactttcttcttgttttataaagctttcgatgtcgggaaccaggagggagagtacaaagctccttacgctttggtatacagaaacatggcaattcttggagttgaaggtttctctgctttgcctcaacattgtttacagctttgttacgggtttttcgcattcgcggtggcggcaaatctcgttagggataggttaccggataagatagggaattgggttccattaccgatggcaatggcggttccgtttcttgttggagggtactttgctattgatatgtgtgtgggaagtttgattgtgtttgcttggaatatgagagatcgagttaaagccggtttaatggtaccggcggttgcttccggtttgatatgtggagatggtctatggattttgccgtcgtcggttcttgctttggccggcgttagacctcctatatgtatgggcttcatgccgagtaaatattcgagttaaagatagctttttacgagtttttacttttttgtgtagcgacaaaaaaattagctaaagaattgtggaaacaaaaaaaacagtttatataggaattgtactttgtaagtttgtatacacaataaagtaataaactagtctctcaattctatttaaaaatccatgtcccaagtaacttctccccaaaaagaaactcaatattttagaataaggtcaaatggaattaaattccagaagatatttgccaaaatagtgataaaaatacggttaaattggtatatgtttttactgacaaaaggcaagattcttctattttaagatttatttctttctttgaaatctgctaaacgttgttagatcacactttatgtgtctgtttttttttttgtcaattcagcacacgtcatatttgtatttttcaaagtaccaaacgtggaccaaaataaaatctcgtcaaaaatggaaaccaaattttaatttgatttgcacaaagcccaatttgatttgtttaaagtcaaagcccaacttgaccaaaactacccctgctcatccaaaccctaagcaaaatatcgagggtagtttcgtattttgtttatattgaacacaattaagtaggtgaggaacctctatttcttccgtcttctgctgatttctgagcttcggagctatcgaaaattctgaatctgaaagggtaaagatcccatctttttccaaaaatcgataagggaattagtatattcgttcattcatcatcgttctgatgatttcgatttgaatctgtatctagtactctgtattatcagaaattttgattagtagctttgatgtgttcttgttttgcagtttgagtgaagatgtcttcagatcggaaggttctaagttttgaagaagtttcaaagcacaacaaaactaaggattgttggcttattatttccggcaaggttagatcttgtctctttgtttgagaacatctctgttttttgacgaacttagttctcttccgccattgatttgtgtcaaagcttcgattttaaagttgtagagttggattgttactgttagaagctttaatcgagcccctcgtagatttagttgattctatgttaattcacactagagaaacagagtttgtgtctactacttggttatgatctgtgattgttgcgttctttaggtgtatgatgtgactccattcatggatgatcatcctggaggcgatgaagtcttgttgtcctcaacaggtataaaacttgtgtttctctctgattcaaggcggatttgaagcggctcggtgactgtttctgttctgatgtggtgttttgtttgcagggaaagatgctacaaatgattttgaagacgttggtcacagcgacactgcaagggacatgatggacaaatatttcattggtgagattgattcgtctagtgttccagcaactaggacatacgttgcaccacagcaaccagcctacaaccaagacaagacaccagaattcattatcaagattcttcagttccttgttccgatcttgatcttgggattggctcttgtcgtccgtcactataccaagaaagactagaagaagccaaaggcttgctttgatgcttgtcattgaatatctctaccgatctctgtctatctctcttgcgaaaaaaagtactgttactgttgtttggtcttagactgattcttgttgaaattacgaaccaaaaatcattgtgttgctactagttttactgtgttgagtttatgatgacagtgttttcgactttgatgatataataaaagactgcttgatttgcccaaacttaagctgcttgataaagaagtgagaaactggatttctacaattgaacaaatatgtttcatacaattgtggaaatgacagtttcagactcatccgttacattttaacaagaatattgccttgtctttttcattagtactacaataaaagcgataaggatagtagtattgtgttttctctgtgtgatgagtaaacaaaaagaaagaagaaagaaagagaggagtgaaaacggtaagaaccaaaccgcaacaaactttaaaccttgagaaaacgcagccagacgagtgcaagggcttttgtgtagtggaaacacttcatttctggctttgatcgacttcttcatcaaatactctgtgattgagaaagagtttcaatcttgtcgtgaagcgtcacgacaagatgatgggcatcatcaagaagcttccagacattaagctgaccagccatgctattacactcttccacaatctcatccatactactgtatttctgtatgatcagtttcctacgtagtactaacgccgcgattgcatagagcaacaaatcatccgttggcggtgcttgttgccggattctgctccatggcgacttcccaactccagctctaatggcagcttgatcagcccacatcacttcccagagacacagcgtctgttcaaaactcaactccctcctaaacataacaagcaccatcctgtaaacgaaactacaatcttctgcttgaagattctccaagtgtttataaagctgagagtctttattttttatgatctttgatacaatgcttagctgtctttgaatccctgcttcgtcaagcctgaaattgtgccgagctttcttcatgaaaccaacaaagcaccagaaagcctcgtgatcctctgagatcacagcgaggattggagataacagatcactcattccttgacagtagcctatctcaggatcatacatagcataagcttcaagaattgcaactaaccgtgctgcgtggtatagcctgcagctttctaagtgatcatagtcttttaacccgacagattcggctaacctgcgagctttgctttctgtgattgctgttgaatatggagaataatttgcccattcagaatccgctcgtaaagcatcaagccggatgatacgttgccacgtagagaaatcttcgtgtaccgcaacttctacttggacctcagaagcagcagctacaagaagagaactattctcttcagaattgttattactattatcctcctccggctttttttcatcgctgtgtgcaaaagatgagagtagtaaaacatcttcattatcttcacaagagtctgtatcagaagaatcagtgttcaaagcagaaacaacatcttgacttgtcattggtcctgtaatcttataatcatccacgaaccgaacacattgactgtttgcctcatcagatggaagctcctcaagattatcggtacttccattaccgcacttgagaagcatctgacatcgtctctgtagtttctcatactccttcctacaattcaaagatcccaacaatgaaattatctatcagcatctaaatacaaacattgactatatatagatcaaactaaatactaaccttttttgagttttcactgcttctctttcttcactagtactattcaaatcataactgccataagagaaaacaagttgagaatctcaacagagtgaataaaaataaccaagaccataaagtcaaaacaagaacaaacactcacactccgagtaagaacagccacacttctgcacgaatacttggatcaacaccctacagaaccataagaacataaatcagaaccagtaaagagacaagtaagaaacaagacatacatatggtccttgttcaaaagactcactctgcttctaactttcttcaggaatccaactccaccatcacggagttttccctccggtgtaaataaactcctccattgatgtggcgtcaatgcccattttcttttccggcgagaccacggtgatttccgccggctataaacaagtcaagagtcaacattagaagcttttacaatatcaaaatcaacaacattgattgccaaaatcaatctaacagcaaaacaaataaacaatccgaacaaacatagaaacttgttaatctttatcatactttccaagttgtgaacattcaatccgaactctattattggatcaaaaaagagaatcttttagatgccatctaaaatattccaaatctaaaagctttaggctactcaccgatcggaagaagtaactgaagacggagacgaaagattagccacaaagagaaccgaccgtagatggatccacgacgacgaagacgaagaagaattagaattcgaataagaattagaattagaagaaggaggtgaagaagaagaagaagatggtaacgaagaagaagacgaagaaggtaacgaagacgaagaagatgaattcccagaagacgttgaagtatagcttctccgtaacgccttcatctgattctctaaaaacttaaacctaaaccccaaatcaaaatcaaaatcgaaatcaaaaagtctcctgctttcatcaaagatctacacttttaataaaacccattatcatcgacggtgaatcaccgccggaaatttcccggtgataagcaaaagtaaacctcttcctcctcctcctccgccgtagcagaaatcaagcatgagttgtttaagaaaagaaaaggacagatttaccctcaaatctctctcactgtgattgattactctatcgtcttcttcagcacgccgaaactgaaaaaaagaagagagacgaagaaagaagacgaagaagaaggaaaaaaagcaaaagcatccaacaactgaagcctctctaaccactttgctctttctttttcagctcttgtctttttttttttactttaagacattaagcgcgtggactcgcgcgtttactttaatgctacacgcgctttaactctccacgcgatttggtaggtgaattttaattatgaaactgcgtcgtttcgttttagtcttcgttggtggatttttacgcgatatcgggtatgaccaaagaggaaatgacacgtgtttactatggttaaaagctttaaatgtcaaaagctaaaagattttcattacgttcccactttaccgcggcttttaaggagcataatcatgattagttttgtagattttctagtaaaatttttatgtctactagagaacaaatctaatcataagaatgttgacctaatggacctacgtttactcaatggtaaggttaagaattggattaacgatggttattgaatatatataggtgtttctaaaatactctattttggaatagtttttgtttggtaggataatgatatatattaaatttccatagcaaatactaacaatatagtcaaagggtttatcttaattaggattgatttttatgatttgatgttatagataacagaataacaaaaattaattcatttgacaacttttcatctatattaatgagttttcaattcgaaattattgatcatatggagaaaagtgggcaactaaataattcaatatttatctaaataaaaagttaagagaaatttataagatggaaacacaagttaatatgatttacatgtagatgttttcaataaacaaaaaaaaaaggaaaagggttagtaaacacattcaaatggatcaagttaaaaccgattagtaataataaatgtctatgaaccgagtcaaaattaaactttgaactaagccaaacctaaacttgtttatagcataattataaacaaagactgaaaaggatttgattaatatgatgtttattgtttattttgttgtgacttgtgagtcttactaaagtgtaacggaataaagagaaaaaataactataccttttttttttttgactgacataaagccgaagatatgctattaaatctagccgcgtatgtcattaaccaaatctggaatatagttggtattaaattacaaaagcatatggaaaagaatttattctaataataaagcactactagtagtagtattttatttatatatttatgaaaatatacttgcatgttcttggaactataattgtttttaaataatattctgattaagaaagttaatgagagtttaaatgaggaaattaaagttcgttggatggagaagacatcaagcaagactagtggccaagttgtaggtataaaataacattattacgttctagggataaacatttggttgcttgaaagataagttatgtctatgtaaatgcagaaattgcaatgataagtttagtcactatggatagagagagagagctttcaagagcagaaaacacgacaatcgataactttgtttatgtgtctctcacaactagcaatgtctaccggcatgaaatgtgggtattatgtccaaatctaagcgtttaaatggttgcactggaagaaggactaattgcttaggaatttgatcactatatgcataacaatggtataagaaaactatctgtgttcttcacaatatgtgcatatataaagaagtagattaaaacttctacttatacacattgttctcatttgtggtctagatgtgtataagcatcttctcttatcctatcatcttgtctgaaaaatattctgaatcattgactttggtgattctttagctgcatattctaactgaagctgttcatcatttgtaagtttccatcccagagcacccaaattatcttcaacatgtcttaccgacttgattcccggtatcggtactgtccctttgcatatgcaccagtttattgcaacctgtaacaaatgataactcgttcttacaagtttcaacacttcttcttcccaagaatcttatgaaattgaaataatacctgaggcatagtctttcctcgtttctttgcaatctcgctcagtgctaaaagaagaggttctaatccaggaagaatttgtcggaacagcaatgatctgttaatcagtgttcaagcatagttaagaacaagaaacaacggctagttttgtcgatctttgagcaatctattagtactttaccgtggaccagtgggaagttttgaagaggagtatttcccagttagcattcctagcccaagaggactataagagattaaacgaatcccgagctcgtcgcatatactcttgatctctagttgctcttttcccatgcttagcaatgagaattgcacttgggcagaacataaaggaacccctcgagttttaaggtaatcatgaatcttcacaagctgttgaggtccatagttactaactccaacggctctaactaaaccctgagaaagaggaacgcttatcatcaactttccaagtgcttaaatggtcattaaagagatttcatattttcagtagttttctaagcaaccttttcgtacatttgcactagaccatcccaaagaacaagctcttgtagaggcgcgtagcttgcagttgaccagtgaagctgtccaatcccgagctggtctatctgaagccggtctaaagaagctctaacacaacaacagaacatcatccaatttatcatcaatctccaataaaccagaagtgaaaaagagagacaaagatcaaaacttagagagacctgcaggcattcacaaactgtcctgaagttaacctccatggataagctgcaaactttgtagctaccactacttcattttgtttccctttaagtcctgacatttgcaaccattaatcacaacacacaaacccaccacagtaacttatcaagacagctccaggataatactttagaaccaactaaaggcaattttttccccaaatttctgaaactatctattgaatcagaatctttagaccagtaacaaaattgggaaaggttaaagagaaacacaccttgagattctttaatgaatttccccaaaagtctctcactttggccattaagcctaccagtgccataagaatcagcagtatcaaacaaattgattccattttccaaagccaattcaaaagcttgttgaagctgatcatccatggaagtctgataaccccaaagaagctgattaccccaagcccatgtcccaaaacccataggagaaacacttaaaggacccattttgacctaaaaccatcgattgttcattcaattgcattaaaaaggagaacactttgttacgtttgctttatatgcgtattgatgtgttaccttttgccatggccagaaaagaggaagcttgagaggcttaaaggtggttatgttggaagtattgtttgagcagtttatgttagtgaaggtctttgtggttgacaatgttaaagccattgaaaatagtggagaagaaggctctcaagcctttcttctgctgtttctcagtgtgtggatgtttttgaagataaaactgtcaacgctttttctgggaaaatttaatttaatattcaattactttatttcacataatacactctaaaatcaatttaatgttaatgaaataaattgattttagagtgtattatgtgagatgggcaaagaaaacaaaagtaaggtttgcctctgtttatgggtccagtccagtctcataatagaattttgtggaagcccacccaagaaactacaatttttccccaaaaataaaataaatagtatttttggaattttaatcaattataaaaataaaatgatgttgatttcgtttgtttttttttcaaataacattttacggtgttttaccaccatgcaaaaaagtatggacattaataatattttaaatctatttgtgttaattcaaaattttctaataatataaaagtggtcgacaaaaaaaatattcccaaattttctgttgtttgatcaaaatatgggcaaaattaacataatttttaacaattttatcatggtgtcattttgtaaacaagcttttaaaaatgctatttattggatatgtcgaaaggaaaatagaaagaaaaaactatgttcttcgaaaagaaaaaaagatgaatgtcgtccaaaggaggtcttacaagaatctgattacatagcaagtaataaaacatgcgcaagatgaaaatccactattatacaattttgttacggtgtcattttttcaaccaagttctaaagagatgctacatagtatattagataatatcgtgcacatatatgcggggaaaaaaaagtcgaataggagaaaagaagacgaatgtccaaaggagacttattacaagaatctgattacattgcgagtaaatatatagaagtttgcatgtacgtatgagactatgagtactattgagtttgtgggaattttatatatgcccgaaagagaatgcaattacagaatgaacaaaaaacgaaacaattttgggccactaagacttatctccagcaattggcacaattcgaatatccaaatacacacaatatgaatagataaaattagtatgacatccaatatgatactctattaagaaccaaaacgaatacgaatagataaatatttatttcgacgtgactacatttttgtttgacatcaatttcaccgacgacgtgtcatttgcttttactatatatagtttagtatttttcggcagactttaacgtgtagtcaaaacgacaaaaacacatttagtttagaagttttacatgacgagctaatgcgtgtcttgataaagtagctctaatcacatccacgtaaaaaacgacacctatattcaattaaagtaaggtttcattttcacttgataaaaagagagattttaaattcttttgtagtgacatgttatcattggcgactcgacgatgatgtaattaacgaaatagaaaacgtttgttcgttttttctcggagtagttaaaatctgaaagcctagattgtgtgggtggagaacctcaatacatataataaaatgattcattgacatatatagtttattaagtcaaataactttaagcaatatattcaaatgtttggttgagagtttaagccactcgaaacacaaatctttttttaacatgtgggatgtggcccataaacaccaaggatgcttggtcattttctacgaatatgattcgaccttttgtatcttttccaattcatctaaatttgttatgataacaacaagcactagggttcgatatttgcttattacgtttgggttataaatagttttgatagaattagtactgaaattcatcttgtctgatttcatatggtttggttattttgatgtttctggttaaaatcaaaacaatgtactaataaatatagaaatccatatcctcataatactagtaatattcaaataaggattatagaaagaaaaaaattagtagggaagcagatcaatgttcatcaggttagattttacgaattttaatttgatgtaagtttcgtttgtttctgttagtattcaagaactgtttggttcataacttcatattgaatatcggattacgtttagtgatttgggtttagattctattcaaacgtcaactcatgattaagagtaaactaatcattatacaatcttaaacctaacgacacttggtttttataatgcctttaattctctgccttctctggcgtgtatggacactttgacaaaaagtcgtcgttcgcttttatatcaagaaaactcaagagcaaagttataacaaagagcacatgattccaactttcttggtaatccaacggctattactcatccatatggtcgtcattggtcatatcgtgccgacatgatggtccgcaaactttggaaccttcttattcttttcgtaattaattttaaccgaacaaaaccgagctgatgttaacaaaaccaatcctggtctcattttgtttctattgctaacacataatactggaataacgttttcttatttgattatgaaagaatttaaccaactaaaaaaaaatctgcataatatttatcaagacgcaaaaatgtagaatttgtatttttgtctaaaaatatatatattaaaaaatattatgcaaataagtgaatatacaactgtgtattttagtatatatttttcatttttcaaatttttttttgcaatttatgtcattatactgtgttactaatcgaagtatgagattgaggttatgcttgtgttttcaaaccagttcctaattgaaccaaactttatccgaaattttcaaaaccaaaccattataataagatgaaccggatgagaaccaaaaccaaagtgagggcaaataacccacgtgtcatctagttattggacacgtgttgatcggcgtcgtcgtatgcacctgaggagccgcgacatccgcttactcggcaaaggatttgtttgtcattttgcgcttaggttacgttacctgacgtgttatacttatactataagacaacagttcatgggtccacgtttaatgacgtgtcagagtctttgaccattcgcttcgaagaaaaaattcatggagatggaatttgaatttttacacgagcatgttcctatgaataatgccttccaccttgcctctaacctcaagccacatcttttcttttttaagtttggttaaaagcaaactacaaaattttcagaatgttggattgaatataaatatgtattcataaatcaaattggtttaattaatagctaagaaggcaatttaaagtcttctaatctttattttgcttggtgggattatagtacaattatgaatgaagttggttaaaagaaaaaaaaaaaacatcaactttttgtgtttaacttatttaaaatttataaacaagaacctaccccaagtgatagaaacattataatggagtataacttaaacccaaattcttgttttcaaatatttaatagcctgttgaatgatttcggactaatgtgattatgtgaataggcaaattctcgaatggatgctatatatctaacacgttatatatagtatatatacatatacatttgattttgtttttaatacggttttataccttaaagtatgacttcttaaattgatataaagtcaaatatattatagaaaaactaaacaaaatgattacgttctaaataatagaatttaaaaatatgtgtttatgggggatgtaatttcactatctctaagattaggtataggtttgacctttaaatctttaatcgtgtttatccatttacctttagtcacggtggccaaacatcaagaatgaagtaatgaaacacacattacttcaatctctattcagattcttttggaaaattttgacaatttattggccacgcttccgatttttttattataatgttaaagagagtcatacacataatatgtatacttttttatatatgattaattatccattcaatttaccgagtcgttggctttttgaaatgccaaaggggccttgtgccagacttgccagctgatcaaagtaaaacagcaaccaaatctgatttcatatgttttaagcttagcttagaaggtaataatgtaaaagtaaaacagcaaccaaatcacaaagatcagtattctttgaggttggacaattgcttgttatcttaagaaaaacgtatgaaagtttttttggattttttttcaatcctaacattcttttgatagttaattagataattatttatattacacatacgagatcaatatatttctaattgacctctacattttttgtaagctatggcattaaatattaaacaacaccaaaatattttaatgcagaaaacacaagatttttttttgtcaagaacatgtttttcatatataataaaagatacagaaaaagtacaatagtattttcatatatcaatagttctaatatataagtttttaatacaagctaaacaattaaattagtttccaatatacttaaccagttaaagatagatacttaaaatcatatatatactctcttgtttttacatcatcataaatataggtgataaatgtaattatgtatcaactaatggatatacacaaaaaaataagacataaaaataatcaggtggtgtaaacaaatctcctaaagtcggtaaaaccctaccctaaatactcctccaaacacgctcccaatttttaccacgtcaattccacctcattcatcaattaacaaaatagaagacaaagcctttggctctctttggaaatgtgcgcgttaagcaaaaaaaaacctacaccaagtagaagtagtatataaaagagacgtatatttcctaattccgaaaccacctcctctaaaaaaccaaaataaaaaccttttttctctcttcatgcttagcctatcatgagcaacatccctagatctctcaccgactcagatctttctctatttactctcataatctcttctgctgttgatccttggcctttttctatcaccgttttttagcatcaacaaaactcaccggaaaatctctaacaaccaccaccgtttaacacttctcttcctcctcgtcgatcgtttttaaaccaatctttgtgtttcttgtttggtttttcggtgaaaaagattccttcttcttaatgggttttgaagaaaaccaaaaacagagtccaaaacagagtccgaatcatatcaagcatatggtgttcaagttccacttccatgttcctcatctccacatactccctcatcatcaccaccaccaccaccatgatgttcctaaaggctgtgtagcgattatggtgggacacgaagacgatgaagaaggtctacatagatttgttgttccgttggtgttcttgagccatcctttgttcttggatctcttgaaagaagctgaaaaagagtatggattcaagcatgatggtccgattacgattccttgcggtgttgatgagtttaagcatgttcaagaagttatcgacgaggagactcatcgccgtcatagtcacggtggtcacggccacaacaaccataaccatcacaacaaccatttgcgatgtttctaaagatctataattcgatttgttggtttggtttggtttgagatgtcattggtttgatttgacagatttctcttttgagattgattagtttgcttaactttttgcttttagttagtttgatgatgatgataaattgataatgatgaaaaaatcaaaagagcaattgaatgtgattttttttttttttttttaaatgtaatcgtgaggaataagggaagaatcatattatttgatttttattttatggaaaggaatgtgaatatttttttcctttctttattttatttgattataacgcgttaaatttgggcatggaccatgttatttgttgttcttttccttaagaggattgcttttctcgttaggatttgcattcacgccaagtgtttcgaatatattaatctcttcacaaaaataaaaactcaagcacatctaagaattaccaaacaagcaaatatattttgactttgattgagatccgtcaccaattatatctacctcaattacggcagctttttagttttgtcaacttaattactgcaattaacacggccaattcaaatatactatatttaatttttgaccaataacttcaacatagaatcggtttagatactaaacatgataccgtatcgaaactgaattttgacaaaatatcaatcagataaattgacgttatgatatattacctgaaaatttccgaaattttcgcacatctaatttatcatattagaaactaaaagtatgttcacattagggagttattaattggtttatttttgttactagagtttaaagattactgtaagcggtgagttcttctttttctccgtgaccctatcctgattagtctaaaggtttaattatctctcactttctgattattcttctgcctctatcacgatgaaactatgaatgttttgagtctttcggcgaaagatgatgttactttatgtatggattgaatctgttttagaccctaacaaactagatattgatttagcctttaatggtaagagattatccactaatagcatgagttttgatatcctcaccgatatttcgagtgtcagggatctagttattggtagtattatttggaaggtaaacatctcaacgtttgtgcatatatagattattattccacgagagtttctcaccataacatttttttttgtttacttctgctacaaggaaatctggctatacaaacaggaaccatcgcttctctttcgtaacctatcccatttgaatgctacattttatatatctgatcttgaactgttgccaactcttcttgattggtaaccaagtgctttatactctttgatatatgcttatcattatgtattctctagtcatcgtctaatgttttttttttctttttctttttcgattttgtttttgcaggaagtggctaagaactatttcttgaatttagcaaaaaaaaaaaagaactatttcttgattgataagctgaacaaagaacaaaaagtgcctcagtgtttggcatcatcgctcaagtttgtggaattcaaacgatcagtcctaaagtatgaaggagaaacgaagctagttgaaagccactttagattccacacgtactcttaagaagagaaatcaggtgtcctgtctcctgtgtcccataagcaaaatattggtggttgctgctcatgtatatatatatatatatatatatatattctcactgattgttcaagcattatttagatatttatatatgtataacccgttgactaaaagaaaaataatgtttaaaataatcaataaactatatctttgtgtttgacttaccagtcagattaaccgtggaatagcggaatttcgaaagggttggcaacatttcttgagagctgcccgaatctgaaaaccctagtcgtggtagtaaatctgctaaaccctatgataattttctcatctctatgcagcttctgccatatcatttgattgtatgttctcctctcctttttcctcagctattggatagttataattattactaccaggagctacatctcgaggatatgaatcaactcaagtgtttgcaatcctctgtcgagtttgtggatttcaaacgattcaatggacatgttgcacaaatgaagctattaaggtacttcttagagaattgtgctgccctcaagaaactcactctacatttggattataattcaacagaagatgaaaccattaagaaactcttgaaaatcccaagagccgcctctacgaaatgtgaggttgtcattgtcaaaatgtagagaggaactgttagatgtctgtatttgactggtaaaatcggttgatctaaccgtactcttcaatatgttacttctcatttgggtcttatgaataaaaatgaatgaaactatttacgtactttgctttgctggaaacgtcagttattattcttcgaatcaactggttttttttttttttttggtgattttgtgtgaagaaagaataaagctgtgtgggattaggcgtagtagtttcattattacctggtttggtgatatgttgatagcgtaattcttttgcttcattcgtttccatgttcgtttctatcagttgaaaaacgttaaaaatctcttagctagtttaagttgagcctactaacataaaacttaaggtttcaacaaaagcagattatattaaaactatttaatccgactaaaccgtatctgaccaaaaacataatttaaaactagctaagttgaaaaataaaatagatggaagtaaaacttttgattgaaaatgtttgattaatttgtctacttagggagagtctattcatttttggaagtctttgcgtatctatcttattgaaaaaaaaaacaaaaaaaataaataaatgacttgtaaattataaggaaaatgtagaaatataaaggcaataaggcaaatattaaaaaatataactatttatataacagagcatattttatatgtgtgtagagtttccatgtataacaagttagaatgatatagccaaagatcttaccaaaagttcaaagctactagataagatcatattagctaaaataaaataagaaatatagcataatttatttaatggaatgatttataaagagtgatgtgtaagcgtttgattgatttattacacatcttataattccatctccttagatctcttcccaaataaacaaaagcatttagagttgtgagaatctgtgtactcagccttgtttgtataagtccttttaaatattcttactagattttaacccgcggtataccgcggaacaatttattttttaaagataatatattaaaatttgtaaattttatttttataaaatatttatattttataatttataattgttattaagtaacgctatacgacgaatacatgagacaattgttaaaaaactgaagttttaatccttattaaaacaacatattaataatattttaaaattttataaatattgattcaaatacatctaccatataacccaattccaaaataaaatccgttctgtaatttctttacccgtctcgtgattttttttaaagtagtaatttttaaaatttaagaattatttattatatataaaatttttgcaaattgtatcattctctatatagatttatattttatagtttaattttatatatagtaacattatatataccacataacatttttggttttatataatcttttctaaattaggatgatttgatatgttaataaattaaagatttaacccgtattgaaacaatggattaattatattttactgtccctccaaatttgtcttgccaaaaagccatttattttattagtattaattttatttatgatatgactttgatttataatctaaacattttagctaataacataggagtgcactatatttatttaataggggaatgtaccatatgatccgaatgcacttttacccaaatccaccaaaaaagtcttgcaaaaatactatagagataagaaacgatagtcggttttgataggtataagattaacaaatatattagttagcttaaattagttaaaaaatacaaattgaaaaggtatattacactttatttgaatatagtataaaaacttatataacacagagatttgatcatttttttaatgttgaatgcttttttttgtgctaatttttatgtgattaagatttaattgatttcgtatataaaatattaaattgttttacgaacttatttgtttataatttgataacaaatagatatttgaatattcggtatattttgcttcagtttaagaaatctttgatgatccgtttttagatccaataagctctatatttaagaaatgaatattgtagtttaatgattttggtaatcttaatgacgtcattaaaggagtttttttttgattaaatttttctaatggcattgtcatgtaattaattacaaaaaataaggttacatttaaaatgtactttccaaataatatagtaggatatatacttgtctactttcacaagaaactacaccaaaaaaaggtattgttgattgctatctagatttcatttataatgtctttaaaacttttgacgttcctctttctcctatctgctgctgtgatctaccacattcccgtcgtgacttgcagaagaacatggtgcacggcgatgcctacttccacaactgagcagttacaatccaacattaactttgcttgcaatcatgtggattgtgcaccgatccaacccggtggattttgctattaccctaatactttactagaccatgctgcgtttgccatgaccagatactacaggagtcaaggtcacacatatgctgcttgtagcttcggcaatactggttacattatatcttccgacccaagtgttggcacatgtatcttttaactttagctttaaaaagaactcttcatagaacttataaaatgttattttgctttaataacgggtttctgttttcgaactcttgtatccccaaactaaaattattgaaatggacgttattatataaattatgcggaagttataatgttgacgacttttattttcttttactattgttgatttgttgtagttcaagactcaagttgtcttttgactcgttatagaatctaaaattggagacttcaatatatatttgttacaaatagtgccgtatgtaagtcttgtcaccaatcctaattacttacccaaagcctttgtagttaatcgttactaaggtgtatagagtatagtgcttgtgttaatattattttcacctgacttgttaataatttcaaaataaacttccaattgattcacgaaactatggagaagagttttctatatgtctacacaaatcatcatttatgtagtaaattcaactcatcacgttaactcttttagatgtaacgtaggagatgttgtctaatggtttgtacttagtggattcgggctccaaacaaaatttctgacaaaggaaggtacgcatgcatgagaagtaggtaaagaggaaattatcaaaagatagaagtggtggctgaagaaaaaaaatagtagaacgaaatgaaacaactgccaagattaccgcattcggattttttttggccacatacacaaacacttgtctttttttttttatcaagagaaaatcctttctttaaaagagaaaataatcaccgttcttgattattcattaaattctattagattttgtgtcaatggtgatactattatttgaggaattgttatggaaaagttattgaattgtttgtttttatcatatcatttatcaaacgaaaacttgaggaaaacttaggaatgtttgtcacatcatttagttattaatattttttaaaaaattcaatgttgttatcattgttatgtttttagtaaattatgaatactttagtctattgtaaatataattaaattttcattagtttaattttaaactagttatgttgaaaatcaaaaagattaagtagaacctctgagcgtgtttattcatttttggaagtctttagagatctactgtatgtatcttattgaacaaatatcaaaataaatgactagtaaattataaggaaatgtagaaaaatatagttaatagattttaaaatataactaattctattacagatagcatattatagatatgtgtagtgtttccatatatagcaagttagcatgatataggaaaagatcttaccaaaatttcaaagctactagataagatcatattagctaaaataaaataagaaatatagcataatttatttaatggaatgatttataaagagtgatgtgtaagtgttttattgatttattacatatcttataattccatctccttagatctcttcccaaagaaacaaaagcatatagagttatgacacttggtctactcagccttgtttttggagaaatctttttgcatattatattatatatacttaagaagtttcataagaaactacaccaaaaaacaaaagtattcttgatagctatctagatctcatatacaatgtctttacaatttttgacgctcatctttctcctttctgctgctgtgatctatcacatccccgtcgtgacttgcgaaccatggtgctcggcgatgccttcttccacacctgagcagttacaagccaacattcagcttgcttgcagtcgtgtggattgtacaccgatccaacccggtggattttgctattaccctaatactttactagaccatgcttcgtttgtcatgaactcttactacaagagtcaaggtcgcacttatgctgcttgtagcttcggcaatactggttaccttatttattccgacccaagtactggcacatgtgaattttaaatttaatcgaaaaaaacatagaaatcttcagcatacttatacatttttattttgttttaataatgggtttctgtttcggactcttgtatttccaaactaaaataaatgaaatagacgttatttaataatttattctgaagtttcaatgttcttagtgatgacgtcttttactttctagtactattgttgtggttcaagatcaggttgttttttgactcgttatagtattcaaaattggagacttcaaaaacttagatttgttacaaatagtgccttatatatgtaagtcttgtcaccaattataattacttacaaaaagcctttggagttaatcgttactaaggtgtagagtgcttgtgttaatattatcttacacctgacttgttaataatttcaaaataaacttccaactgattcacgaagctatatatggagatgagtttttttttttttcttatgtatctacacaaatcatcatttatctagtaaattcaactcatcatgtaaactcttttagatgtaacgtaggagatgttgtttaatggtttgtacgtactttagtggattcgggttacaaacaaattttctgacaaaggaaagtacacgcatgagatgtattcaaagaggggatgatcaaaagatatataagtgatggttgaagaaaaagatagtataacgaaatgaaccaactgcctagatttgtaaccgcatgcaaaaaaaaaaagagtcattgatttgtatgtttacatacacaaacatagaaaatgatcagagttcttaattattcattaaattctattagatttcgtgtctaaatggggatacttaacttgaggaattgctcccacaaaaaaaacaaaaaaacttgaggaattgttgaggaaatcttaagatattattttttgtcatatcatttaccaaatgaaaacttcagaaatattagccacatcatttagttattaatatttttaatttttttaaatggtattattattgttatgtttttagtaaattacgaatacttgaatattgtaaatcaaaattttcattaaattttttattagtttgggagatatatacttataaaacctttggccttatcaacataaacttttgaccaaataaaagtttaaaatattccagttcaattaactttgcccaaaaataagtttaaatgatctaagagttggaaaaaaattggaagtaaaaaacttattaatggtttgctaaaatagtttttaccaaagcgagattaaaaggttaaactcgatctcctacgtttgctaaaactcagcccaataggcccgtacactaattcggtttgggtccaatgataaaatcaatatttcttaaaccataaattgatctaatttggtttaatttagacttaaacaaatctttaacaaatcaaaccgaaactaaacccaaaccgaaactaaacccaaaccgaaactaaacccaaaccggattaaatgggtcaaagaaaactcagcccaataggcccaacagaacctgaaacgtcatcttcactctcacgagtaaagaaatttgctaaactgattgattctgtaatttcagcgagtcgtctcgtctagctctcacttttgttcgtctcttctgcgtcaaacatttccaccattttcgtttcttaaacctttcttcagctcttctcttcgtcaatcgtgggttctttcatcatctctgtaaattttctgggttacaatactttagggttttttcttgactcacatttccgataaaccctagttttttttttcagtgcgatagtggaattgaagtctcttcggtgagtttctttactaatggagaccgccgcttcgagcgtagctacaactcgtggcggttcccttcagaatccgtcgccgacggctccgtcaagaaaagagtggcgcgccgtttcggattcacaagacaccacagattatgtggtaacgtttattcttctgggttatgtttatgttcagaggaatgtgtagactgaatctgaaagttttgatttttcttgctactgttgcatcttttagtttgcatttcgtagtgttctcgttatagctcttttgtttttgtagatttcactgtaattgtttggtgtagagagtaaagtgatttgcttttggttgtttcctagttcatgtgttgactggcttagtcaaatttgttgcaggatttggaacagttaaagctgaacaggacagatgagagaacgatttatgaggttaatttcttctttcttgcaatgttgttacttagtttttgtacttattggagagtggggacgacttcttaatggggtttgttgttgtgcagaatggaagagaacaggatggttattcaaatagtgagatgttgcagcaacagattcttaatgtttctagaaagaaaggagaattacagcagttggagattgagcttcgagctcagatgattgcgagacatgagatcatggagatccagagcaactatgaatctcaattcacagagtatgctaatgctgctgctagaatgcaggttaggtttcatcctcctggtatattagcaggttttttatttatttatttcatcgagcattgtgttgcgtggaagttaaaggactgttgctgactttttaggagcaacttcatgagaatgagagatctattcgggaggcagagaggaagttagaagagaaagacagagagctacatgcgattaaactagataatgaagcggtctgtttgtttattcattactactagatttttttgtgatataaatttgaatgatttgttactctccttgttctgctactaggcttgggccaaagagggtatcctaagagaacaaaataaagaacttgccacattcaggtgctgttaattccttatctcttttctctttgtttagtctgtacgagtttacctattatactgcattaatctattattcttctatcttatattgggttctgctactttcgtttttgacaaatattatatcaggcctttgatttctacttgtataagacgtttcaggcatgaggttttagaaaatataacaggatacattttctctttctttaatatgcagaagagagcgtgatcactctgaagctgagaggtcccagaatatacataaaatatctgaacttcaggagcatattcaagagaaagagagtcagctcagtgaattgcaggaacaagttagttttcccttgtttttgtgacacgatcaaatttttttaaacatctcatgcttatggatctttcagttatatatcattgtcatttttgaaattctaatacactaaaacaagagtcgttaattttaatggcttgtagaataggattgctcaagaaactatcctgtacaaggatgagcaactaagagaagcacaaggttggattgctcgtgcccaagagattgatgctttacaatcatctacaaatcattcgttgcaggctgaattgcgagaacgtactgagcagtataaccagctctggcatggttgtcagaggcaggtcagttgccctgagtatcttccgattcctaattgattttccatgagacgcttctactctagtcttatgttgttccttgttattgagttcagtttgcagagatggagagattgcatgtgcacacagtgcaacagcttcagcaagagcttgctaatgtaagggaagctggtggttccaaaacaaactccggtggagcctcccagactattcagaacagcgggaaccaatttgatgctcatggaaacagcgcagaaagtgcaaacattagtgtccattcaaatggaaaaagcgcagataacatctcatcttttacttcaactgatgataaggctacccaggtacatgtttgtttctgtggattctcttgaatgatttccctctaattggcgttttgtgttggatttacaagatgatagcttatcacaatacaatgttagcttgtggtgagatgaatctgtacatttgctaatgcagttggcttatcagccgatttaattgttaaacattagatattgaaactgtcaagcaaaagtgaaataattggatattcccagcactccaaaaagtactgtgttgaaaattaagaaggccagtataaaagttctttgattttgtatttggaagtagttgtttcatcacttgtctattcaatctagtgctgattgttcgaaattctagatttgtcatgctccacttcatatcctaactgtaactacctttttcccgtaactatttgtagaacaaccgtgttgatgggatatcagcttccaatcttgcgacacatgggttccttcaagctggtcagatgacccctctgcattcatttgtcatgcatcaacaagagatttctcagcttgttcagcctcaggtcccttcacaacatattgaacaatcagtgttgctacagcaaaaggtgtgagcttaagaatgcagcttgtgtttcattttttatagttaatgaccattgtctttcattctctttttgtaggctcaggctgtaccagatagttcacagatgcctatgcagaatcatgtgcatccatctcaaggtgttcatggcttggtacaatcctttggtcaagggtacggagatattcaaactagccaagtagcacaatacggaactacgacaacaccatcctctgtgaatgaacaggtaggaggtgttcttattacttaatggggatatacgtggtctatacgataccttcttagaaaatacttcttaacaggcagtggaatctggcaatggagattataatggatctaatcagtcagagaataactttcaagacatttcttcacagttccgtgatgccctaaggcttgattctcattcccagaatcagaaacctgaggtatgcagtgcacatattacctagcaatttttcttggcttgtagagccttagttaagttggatatagagaaactgttctgaatgtgtgtgttttcaatttctatacccaggaactcaatggtcaggtttcacctgatgaacacagtggtgctaaatccattgtccctgaaactctagtctcatccggaaaacctgagaggaactcagagtgcgctctgctcgatgaaaggtcgcttttgacatgcatcctccgtactataccagctggtgggagaatcagaatcagttcaacggtgagcaaactaatagaaaaccacaatgagacttaaccattgaatttggaaaaagggctttcgtataatgtctgtttcatattgtgcaatacagcttccaaaccgtttgggcaaaatgctagcccctctacactggcatgattacaggaaaaagtacgggaagctggatgattttgttgctagccatcttgaggtctgtctcatcccaatttccaaactatttcatgtgtttctcaaaatattgaaatgctaaactggttttggcttgcagttattttcgatagaggatgactacattcaagttagagacggtgcacagaaaatggtagcagcatcagcagcagcagccaaagtggcagcagcagctgcagcttcgtcatccccaaactccatctatgtggctatgactcctatggctcagtctcaagggttaaagaagaatgacaacagagttaggcagagctctgattttatggtgaagcagcaaagaaagctctgattttacaagtcaagcttttcaaagtaaaagcgtattagagtgaggctaaacaatctcctatcttgtttttcattttttggtgtatccccgaagctaagatatacattcataattacttttgccctttcaatagtatcaatgcttaaagtcgacaatgtttattttaacatgcttagagctggccataaaaattcagtaaagaaccagcaaaactcaagcgcctgtcatcatttacacttacatttcttgcctcctacgtcacctaattttaactaatctaaaccctaatcaaatttaagaacaagtcaattaaaaatcgaagggtgcagatgaattgcgagaaaccctagtcaaatttctcatatgaacagatatcgactagtagtgtttacagaaacaaactacaagatacggagacatataaattgcgacaaactctacacaaaacacatgggagggcttgttaggtttagggttttcaatgtttctggaagtgactggaagaaatcaaggaatagtatacaaattgaagaagaagaatggaatataattacctaggaagatcaaacctattcgtcttgccttgagaccaactgtgattaaatatgattagggtttagattttatagttaaacggagtaaatattggtttaggtttataaacagatttatattttacaattaaacgaagttaaatatcggtttgggtttagaaaatacgattagggtttagccaaacttatttaattcacatatttagcacacaaaaaaaatgcaatggtataccaaaactgatacatctctctaggataaaacaatagtttttatctcaagggaaaaattgaattatttattttctaattaattagacaaatactgaattgtagtactagaattgacatataagacaaccttcacacgttttctcttttaccaatcaaatgaagacgacttgacacttggtagagcgtcttggtattgtgaagagtttcttgaagatgtcatgatctagagagagtttcttgaggatagccgaattctctagaaagtaccttactagcttcattacttcaagatgtccccggaacggtattcgaatatcaacaaactcgagagacgatagcaaacactcaggtaccaatgaagaaccgaattgaatcatctcctccgaaagcatttcatcattatcaccaacacatacctgaagattaaaacacaatgaagaacttcatatacagatggaaaatcttattgagtttagtagatcattaccaagatgagagatttcaagtttggacagctctcaagaaatgttggtaaccatttcaaatcatatatacaaagagtaacatgcaggcgtgacatgtaaccaaaccgaggcagcgattctagttctgagtatttacatatgagctgtggaaccaaaaatacatatatgatgtgggtcagaaacagaaactttcatgatagcaatgtcaaatactagctagaattgaaatatacataccttgaaagtgtccacccaaattgtcatatcgctgactttcaaaataccgcggagaaaactgtggatgctatctgtcctcgatgaaacacttgcttcatcaaaatctagcaaaccaaaggggagagaaatatctaatttggcattggactccaaattgtttactatatagcgttctgatacgttatcattgattttcaaataacttagtagaggagcatcaatcacaacttctgaatgaaaatcacacatagatttaagaatgtttatactcagcttcttcagtgatctagagagcaaccgtaaggttattgcattctcattcccacatccataaatctttaactcttccaagacaggacagcaagatacaaatctctcaagatttgcctcattgggaaaccaaacatattctaaatggatagtcttcagacaaggtaaggaaacaaactcggcatcatccaacatcaccctacagagttttaagtagactagtgtctcacatatgtaaaggcttaggggcatctcataaatatatttagctggaagacactgaacatgtagatgttggatcttacacttaactgcagcatcaatccatgacgtgagataagaggggtcatctacaccaacgtcataaccataaatatataacttgaacttgtttatgcatgaaaccctattggaatcgaaaaacttgtcaccaaaactcacaaaggcattgaaatctgggaagtataaggaattcagttccaaacaaggaagccaaagccagagactcctccatctggtggataacacgcgtgtcgtaacaaggtcctttatgggaagatgagaaagtatgtgacagatcaaaggatcaggtaattggcttatcatatctgccttcgatccctgattcaactctctaccaaccagttgttttctttccaagaatctattcggcaaaagaaaaaaaaacaaactgaaaacgcaagtcttaaagaaacaatttcgaggcgtagatattacgaacacatagcttgcgacctacgtaatcagcattatcgactaaaaccccaagaataacgagacgaacctaagtgcgagcgaaagccaattcgttaggttaaagattaaagattgaattggtaaccttgttgcaatcgagtcgtgtgtgtgaagacgtgtgtctcaccgtaagatttgaaacttcagactgatttcgtaacccacaagtactcgtgactcgtgagggtggagaaaggagatttctgtagataaaatttaggataaatctatctgactttaaatttagtttgggattaggtttcgtttttcacttaagcgttaacaacgtcggatcgagtttaatctcggtaaaaatttattttatcaaaactaaatttcctattaaaattcttcttcgaaagtaagttttaacttttatgtaactcgatttgaccttcctaagagacatcaaacgcaccataaagatcatcaattgagaatttgtaggagaccaagtccaatccaggaaccgattgccaaagatatctccatcttgtggacaaaaggcttgttcttacagcatcgtcagtagaaagatgagaaagtatttcagatacaaaatatttcattcgtttatagtccaagaggacccaaaatgatataacttaagaaatggtttacactacacctacttgcttcatatattgatgactgatcaactgctaagtaaagaaagcgtcacagggtgtttctagctagtcaaagacgatcccgacttgacatgttttagagattcttgggaattttcggagtttcttgacgatttcatcttttgctgaacaatactgcaaacgtagagctagacgtagagtgagtttcttcagggttgtggaattctctaggaagtactttactaacttcatccttgcaacatatactaagatgctgcttttgatatcgacaaactctagtgacgatagcaaacacttcggtacagatgaaaaattgatatgatagttcccattcaaaagcatcctcttagagttactattagattcctgaggataacaaagagagagacatataataaactcagtaaaaaatgataagcaaaactatatagctcgatagggttaaccaaaagcattaccatgatgagtgatttcaagttcgggcagctctcgagaaaggttggtaaaaattgcaaatcagatactccaagagtaacactcaagcgggacatgtaagaaaatttaggcaggtgagggagcggtattaacgccaagtatcggtacatgagctggaaacaaacagaaaagaatgtgattagtgatagaaacatgtccaagatctctgcattgacatataagataggtgtataccatgaaagctggtgaatgtattgtcatttccataacacttaaaatccctggaagaaatctgtcgatgctacttctcattgatgtaacgcttgtttcatcaaaatgccataaaccaaagaggatagaaagatctaacttgtcattagaacccaaattgtttactatgaagcttttcgatacattatcgttaatcctcaaagagcatagtagaggagcatcaatcacaactcccgaaagagcaacctcatggaggaaagaagagactcgttttaaactgaacctctttagtgactgagagtgcacccgaaagacttttctatccatcccataaatgataaccgttaagtcttccaagacagggcagcaagagataagtttcttgaaagtggattcattgggatacatattatcttctaaatgcatagtcttcatacaagggaaagagacaaacttggcatcgtatcttccttcaatctccgactaaaccctttggaacaatcctgtttcgatttctttctaccaatcatggtgttgatcattctctacgtagcgaaattgaaaaaataaatttcagagaaacaatcaaataaactatcaaacgaagacttgaagaagaagagatctcaccgtgattttggttcatagaggtcaatgaaggttactctttttttttaggggactatctccacaaccacgtagttttttctatgatagttaaggaattaacggcgtcgtttttgtgtagcttccctggtctcaactattgatagaaaacgatgtcgttttaatttgcaatcaatttgaaatttgtttttcttatcgtattcatttatttcgatagtctcttgggaatatgttattttactgtaaactttctagagtaaagatgagattgagagatctaaataaactttttaaaggggttttagatcttctgctcttataccatgacaagatatgaatatcgaatgaattggttgattattgatggacccttaggtctgtatttatacaagttaagaatcggtaaacctaaaccaaaaggaaatctaataaaagacaataatacatagtggaaagaagaaacccttactaaagtgagtctctttagtgattgagagtgcacctgaaagacttttctatccatcccataaatgataaccgttaaatcttccaagacagggcagcaagagataagttccttaaaagtggcttcattgggatacacgttatcttctaaatgcatagtcttcatacaagggaaagagaagatcctgcctttatccaaggacacctcaaagagtcttaaggaaaccagtgcctcacatttataaagattaaaatgaatcttatgaaactgaggcagaaactgaacatctagatgttggatcttacgcttagctgcagcatcaatccatgacttgagataaaagccatcttcttcattttcactaatagttaacttgagcttgtttatgcatagaaccctattggaatcgaaatacctatcacaaaaactcacaaaggtattgaaatcagagaaatctcgggaatccaattccaaactaggaaccaaaagccagagacttctccatcttgtggataaaacgcttgtcttaacaacatcctttgtaggaagataattaagtatttgacataacaaagattcatagaattggcttattctgtcttccttcaacctctgattcaacccttttgaacaagcctgttttgatttctttctcctcaccatgtctaattttttctctagataactttatctgcataactaaaattggaaaacacaagtttcagagagacagtttggttttgaattagatattcattcaagttcgacttaacctaacgtcccaatcaaaattctcagtctagtaatgtaaaagatttcaaatcaactaaggcttaaaacatacatggtgaccaaaagctataaaaagattcaggcttttggacctgtttctgatgggtaagaacaaaacgatatgtagaagaagaagaagaagaagaacttacggtgacttaggtaatacgaaagaggtcaatgaaggtttcttacatttttttttagaggaccagtacaatcataatgacgccgtttctagtaaataaacgccgtggtttcactgctctacgtaattggagtattgaaaaccacgtcgttttgatcagcggactagtctctcaagctattctaagaaacgaggtcgttttgattcgcggttggtctttctctctctctaaagcagaaaattcgtagaatcggagagatttgagaagagaacgaaggaagaagaagaagaggaacgatggggtacgtgtttagagtacgattggcttctttcttcgccggagctgcgactgcgtcttttatcggactctccgttctctacaaggattacaaagtcgctcacgaatcgatttctcagcaggtaatccatcgatttctaattttgtttctcttatcggatccatttctttcgattatctattgcgaacaagctctgtcaccgtagattttgttttcgagtagctgaatcgatacatttcgttagcagatgttgttaagaatggaattttgttgatctgtagaccatttctagggttctcgttgtcatctctgtgattctccgattgagattcatatgcaatcatggtggaagaaagtttcacacaattttgatgtttataataggaattagggtttctggtttgtgtttgccattttagctactggtgagattttgttctggagttagagtttcataagttccaccaatacgttaatgcttcattaacattactatgaattagttttattttgtgattcttgagatgccaaaattgctaatacgagaacaccttcaaacgtttggtattgatgaatgaatactgatagagttgatgcacatagatgtcatcattgtgaatatccatggttgccatttctctgtagctttgatggtaatgattatactacaattgcatgattaaaaatatgctttagaattagtttttttgagaaccttgagatgccaaagttttaacatgagaaaactgccaaacattttgttggttgaattgagtgttagctttgtgaagaaccgtagcagcattttctatgtagctttaaacgtataggatactgacattggcattgactgttagatttgatctctctttttctacaggcgaagtcttttcatgactctctggatagaaggatctctactcttgaaagcttgagacaaagtgaagctcctcagcttgctgagacaactgaatagtaatctgtctcgacattgaacactctctgcttggcaatgatgttttgagttgagatgctcttttttcggttttatgaataacttggaagttcttgtatgactctactgttataaaacaatgaagtttaaggtagtcgacaatggattgaaacttgctgtaacacttgccatgaacttgtgttcgatcaattattttggatctaacattagtagaatcttgttcttcagaaagatgaacttttgtctagaccatcttcaaagctagggatctagatacatctttctgaacagaagatgcaacagttatggtgaagataagcaaatgccattgactgtaccaagaacaatttgatatctcatgattaggtctaggccggcccaaggagcccagtgtcctaatatgggcttcttggtgggttggaagttcaatatctctaagactctcacgggtctggaattttatggttttgcatgtaaaattacaacttcaaaaataattgcaaaagatcaagatatatagtcatgctagtatcttactattgcaccatttagattcaatgtatgttattgacaagagaaattggcaaacaaacgaaaaaaacctagctattggcaaatgtaacaacaataacatgtttttcttgcaatgtcatttctcaattgaaaagatcttagagttaatatatctaccattcccgttatcactttaagaagaaaaataatctagtttcacataattaaagaaacacaataaatggggaaaagaaagaaggaatcataatggaaagacatgtcgagagcacatggtgtttgtatggggacagattccaatgtaagaaagaaaattaaataaagtggaaacaataatatgaagaaaaaaagagagtgatgcatttgtctccttggcggtggtatggtggcttcactatcacccgacacctcctcaaatttggaatacacctaatcaatcatgattatattacacacacatttcgttatgtagatacgacactcaatcacggatcattttgttgttccatcattttcctctttattagtataaacatcaaaaaacattttcgaaaacgtaaatgttggatgagactttgtgatcgcatccaaaccacttaattatttaaaattgtaacgatttttgttattttctacatatgagatttttttactatagatagataggttagtgtcacaaaggtagcaattggtttgatggatatttttacttctatagtttttgtcagactccaatgaacttactcatatgtcacttttaattggatgtgaaagaagatagagcatcaatattgaaatggcaatagactgagaagtcagaataattttttgaaaataaaggacaataagagagtgtccacatcaacttttaccatcttattttgtctggtggcttctgcttctttggatttaaaccttgagacaaatagaaagacgttcttcacttggctacctaacaacttcactttctgtgctcttgtcacaatcttaacccatttttccttacatctaacgtatatcattgattccttttgagaatttccatgttcaagacaatgagagaatatatttacgcaatttgatccaaacggtttaatttgtttattagtttgttacactttgtgtaaactatgatattaaggtaaggatgttggccttggatcagttcatgatgttttttagattaccaaaaacgttttagacttttgaccataactcttttgtaagacagaccatccctagtacactaatcaaccttgatttggccatgggatctacgagtcggtttgcggttaatatgtcaacaacgacaaaaacaactgatggatatgagatatgacggtttggtcatagctaggccggtccttggaaggctctttagggactgagccatgtcctgatttttactattacatagtaacattgccatattaaactctacatcaatccacaaactagattcatagaaaacatcccccaccgttagatcgttacatcccctaagtgatatgatattgatctacaagatgggtctgtcttttaaggattgatccaaatgtcggaagcatggaagcatagtataggacaatcttggcggcaacccatcactactccatatcctttgtatccacccaaatctctctccctctctctctatatatgttacattagtatgatatgaaagtaaaggcaagcaacgttttactcattatcttctcaccaaatttatagcccacaacggatcttttactttctttcttttgaaataagtcacatgttcttcagtctcttctcatgataatataaagggcaaaagaaaaatctcacaatctttacaagagtttttaaaatctctaaccttcatggactttctcaaagtttcagacaagacaacaattccatatagaagtgattctttgtttagtttgaatcagcaacaatacaaagagtcttcttttggattcagagacatggagattcatccgcatcctactccatgtaacaatctctctctctgttcttctcttcttttgatttgtttctcaataacgaaatgttattctcattgatttgtaacagatgcaggaaatggacttttgggttgttattactattaccctttcacaaacgcacaattgaaggagcttgagagacaagcaatgatctacaagtacatgatcgcatctattcctgttcctttcgatctacttgtttcttcaccatcctctgcctctccttgtaacaataaaaacatcgccggagatttagagccgggaagatgccggagaacagacggaaagaaatggagatgcgcgaaagaagtcgtctctaatcacaaatactgtgagaaacacttacacagaggtcgtcctcgttcaagaaagcatgtggaacctccttattctcgccctaacaacaatggtggttctgtgaaaaacagagatctcaaaaagcttcctcaaaagttatctagtagttccatcaaagacaaaacacttgagccaatggaggtttcatcatcaatctcaaactatagagactccaggtactgttctttgattagtctcaaaaccaaactctgtttttcttttctcataacaatactctgtttttggtctctgttttaatcgtgtttagtttttgtttcaacttgaaaacagaggaagtgagaaatttactgtattggcaacaacagagcaagagaacaagtatctgaatttcatagatgtatggtccgatggagtaagatcatctgaaaaacagagtacaacttcaacacctgtttcttcttccaatggcaatctctctctttactcgcttgatctctcaatgggaggaaacaacttaatgggccaagacgaaatgggcctgatacaaatgggcttaggtgtaatcgggtcgggtagtgaggatcatcacgggtatggtccttatggtgtgacttcttcactagaggagatgtcaagctggcttgctccgatgtctaccacacctggtggaccattagcggagatactgaggccgagtacgaatttggcgatctctggtgatatcgaatcgtatagcttgatggagactcccactccaagctcgtccccgtctagagtgatgaagaagatgactagttcagtgtccgacgaaagcagccaggtttaggagttatggagtttggtaataacgactttttgtttgagttttggcctttcttcaatcttgtgcctgtaaactagtactgtaaacagtcactttgattaattatggagttatattatcaatgcttgtttagtttttatttaataagtgcatctccttttatgagaaacccacaaagtttttcaaacaaaaaaaaattaatattttattataatttgattatatgattaaaattttattttaattaaaatattaaaccaatagtgaaaagggacatgtaatcatgagttgtaaagagtatctcaaagtttctcactacactctctctctttcattttcattattttgttttttttattgcgagaaactcttatgaaaaactcttaatggagatggtctaatttatcaagttatttgaaggaaaaaaaaaaatgattaatcgaattagatagatagttgtattcccagtaaacaattatagttttttttcaaaaagggtgaaaatcttaaattccgtttagttttttctaattttgaaaatatgtctatcttaaatatttgttctttcttttacgaagcgtcacttgttttagtttatatatatgataatggagtgatgagggaaatgtatccaatttagactttcagtaaaaaataaaacgctgtggtacacttctcaaccatgaatccaggttaagtagctacgttctcgatcttgctattattagagtttgatgatttcgtgatgcttcatcttcttctctattttcagaaatatgtagaattgtagatc

SEQ ID NO: 892 - DNA, 61380 bp, Arabidopsis thaliana
aatattattattttttctcggcatcgtgcctctacgatatggtcttctttagatttgtgatgaatatgaaaatgcttgtaatggaatacttcggttctgtaatgtaaaccctaaatccttatcgtgtgctctaagattatagtatatatatagttattttgatagattctagttttggtaagttcgaatttggatttacgagttatggtcgactgctcaaaattgttatggtacagtatttccttgtctcaatatttaaaacgtttgatgacctttgatgctcaatgtaagcgttggatacaaagtttacttaactacatatctgacgctatccttttctttattttcagtattgggatacacatctagtctttcgaatgtcgattctatcccgatgctaagcggatcaaacttctcggaatggaaagaacatttgttacttgtcctcgcccttatggatcttgatctttccctcatgacagagcgtccaagctctcctaaggaactcaagcattgggaccgctctaatcgcgtgagtataatgataatgaaaatccggattccacaaggatttaggggcgttgttcctgatgatgttacaactgcaaaagacttccttgccagtttggagaatttctttgcgaaaaatgaagaggcagagagaagtagggtgcaagcagaaagttcctcgatgagttacatagaaaatgagaatgtaagggagcttattatgaggatgaaaaccctcggtgcgaagcgaaagagacttgggattaataatattttctccaatgacatgatgttagcgcattgtgcagtcaaaatgctgccattgcagtatattagccttaaaaacgtttacagttgtctcgaagggaaatttgttaatgaaaacggtagatggcacactggggagatatggtctactaaagagctcattagtcgttgtgacatggaagaagagactttaaggacggaaattgcagatgaagcaagaaaaagggaacaatgagagtgtttggttcaggagtagcaacaaaagcaatatatgcttaggaattggtattgaaatggtttgaagataagaaacaaagaggcctttcggagatttctatgaaataaatctgtgtgtgttgcattttgaagcatttcctttttttgtcattgtgtgtgttttcagatgagttttatttcaatttctacttaggatatgtaatattccattatgatcacttttcttattttcccctgttttgctctgttttaaaagaattgcctataattttttagaacttgtagacaatttgtttcttagtgatatttttccttagtttatttaaactctttaggagtccttgtttgactctgtgtcgccccttttataattagctacaaaatttctagtatcttctcgcaattcctatttgagatcagaatgcaaatattgtcctactacaaaatttctagtatcttttagaaatcctaattgagatcggaatgcaaatatttctctattctttatctaccctatgattgtgttggtttcttcttctatatataacacttttttcacacaccaattctctacataacacttttttcttctagggctcagattgttcgactttcttctttaacctttcttttactttccaaagagacatgtctcaccaccaccaaaacttcgatacaacattcacaaagatatacgtggggggtttgccttggacaacaagaaaggaaggcttgataaacttcttcaaacgttttggtgaaatcatccatgtgaacgtcgtttgtgatagagaaacagatcgatcacaaggatatggcttcgtaagtaaccaagaaacaatatatacgtttaggttatcgattattcttgaatcttgtatatatctttcttcaggtcacgtttaaagacgctgaatctgcaacaagagcttgcaaggatccgaatccgactattgaaggacgaataactaattgcaaactcgctttcgttggtgctaaagttaaacctaaccaatcccaaccttcaaatttgcctcaattattacctaggtaccctggacctcactggaatctttctttatcttactccaatgcaattttttgccgttaggatacttttcttggaatataattagggtaaagtttctagccatggttttgtttagttaatgtaatttttttcttggtttattaggtatgatccgcaatataatccgcggtatgatccgatgtcttaccaacaaaaccgtatggctaacaacaccaacaatggtattggcagcatccaactacaaacgttgttaacggagaatcgagcagctcacaggctacgggaacgcagccagagtttctttcgacaccgggatcttcgctaacttgtagtgattcttgtgtctgatgaaaacagtcagagttagacttgcggagttgaaaacgatgattcttatgtcatatttttatttatcaatgttatgtctaacttcttgaaataatttcagagtcattgtagaatttaattcatcagttaactaagggaagacgcaatctctttggtgtttttaagtcgtttttcttaaaaactttgaattttcttttgggtattaaaaattaagctcaataatcatacatacatatatatagcatgatatctttgactggatgttaaaaaggcaaagcttaataatcattatccgttttcattttatatatgagctgtatacatgagattccattgattaggtagacataagcattctcattaaagttcaagaaaatcttttggactcgaggttaaacattttttttttttttttttggtctaacgaggttaaacattaacaatcaaagatataatatacctaatacctgcaactacaagaatcatcaaaacgtaacagagtgacaaaaaatcaatggaccttttggttggggaagttgcagcttaatttttatttctctatttactatatagctcctcaaatagtcaataaattgtaaacttattatatctaacgaatttttcacttcttcatccactattataaacgtccattatattgcccaaccagatgttcagattattataaaggaaaagttcagatgtggttgcaacattgccaacaggaaagaatcagttcacattcgaaagtcgaaaaaggtcttttccactaatggtccctccaaagtttatgaacagcgaggaaagttgagatgtagtcacttgcacaaaaatttggtcttcaaaccccctgagaaagtgtaatagtgcttgatgagcagagaagacaagtacaaacttagatggattcaaaattttattcatacaaaccttcagattcatcaaaagaaacttccttcactaatgaggcagaagcattgtactcaaatctgggacgaagcattatcagcataaaacacaaactgcacatataaccaatagctgaattttacgatatgggggatgtacagcaagttatacagcgataaaggaggggggcagaggtcagaacggtgctagccgagtttagctcaacgaaaaaagagaatgagagcgttagagagttaattatgatgaagatgagcgttgcagccaagttgaacaaactcgggatgcatattcctgattaaatcgtggcagctttgattctcgatagtctaatatttctgtgttcactatatctttttcatataaaaatctataggaaacctatgagaagagagtcatcgatagatcattggatgaaaccgaaaacatgtttttgccagtactcgatagtctgccctcggactatgatcttcttaggaagacttatagccgtatgaaactggaatggtctactcatgatctcatctctcactgtgtgcaagaagaggagaggttgacgaatgaaaagaaggaacatgatcttgttgcaggtaaagtcatatgtgataagaaaagaaagcaatatgacgagtgtttagaggcagttcttggaaactagaagtagtaattaaagcgttttggagttttctttgttgttattgtgtgtttcaaacagattttgagttacaatttttgttttgttttgagcatatcataatatatttctttgatattctatcatattaaatcttaaataaacacatggaaaaaagtgttggggaggaatcatattaaatctttaaaaaacaaacaagattaccagttgattcacaaagttcataattaagaattaaatttccatgaactctgattgagaaagaaatataggattaggacaatatgggcttagtcaggcctgaactaaattcaaggcccaatcacttgtttttaatttatgtagtacaaagacggttatgtccccaataaacctgataaataattatgaaaaattataaataccttctccttcgtcgtaaattgttcaattctaaatccctagatctaaaaattactttcgaggctggtcggaaaacctagcagtcgcttattgtcaaattaaccatggaagaatccgccgtcagagtaatcttcttctccttaaattatggatttcttcttacgctctctttgcttaacctctgtttctctattaatggtttcttgcatcacaagaaagaaggaaaatatttgaagtcgtagaatttttgatatgatcttttgtaccgtagggtctggaatcgaaggatacgaacaatcgtaaatggtactcctttttttctttttggttttgggggtacttagaatttgtcattttgataatatattatctcctgtagctttagtaagatttccgtcgagggatacgacacttcggttcatgagtttcctctcaagctcgcgttggcaaagcatttcgcttcatgcggaaagattgtagatattgatgttcccagagactttaaaaagcgtatcctcaagaggttttggggatttcaatttggtctctctcatttttgttaaaattcaacactctaaaacaagtttttctctcttttttcacagtcctctcttcattatttttcatgcgaaagaaggagaaagtcccgtagacaaggcattggaacttagtgggactgacgtgggaggatggaatgtagtcgtgaagtctctacccgggcagcaaatgtacagagatcctgggggagtcgaccgcttcaaaggagaacgcacgtaagttgtttaatcctgcaaatcaattttcttagtacctgttcttgtgatcattgccatataatattctctcatacaattaattgatatgttaggctcatagttaaggtatatgatacaccttctacgttgtctaagattgatctccagatcgggctgtgtaaacatttctcttcatgtggagaggtcaccggtataagtgttttggtccacggaaacttgtgctgtcacgaaaggtttgtggcttcgtccagttgtgacttttgacccagatattatctcaagttaataaatttctaacaaaaaaaaacttgtttctgttgaattttacagtaaagctcgagttgatattatgggaaaaggatgtgtagacaaggcgctggaactaagtggacgtaccgcagatggatggaagattgtagtttattttgttgtgccgccagcaggcagaaaattaaagcctactggaagtggacatccaagtacgtaaatttgctcttgctttttgcctgcaaaattataacctctcattaatttccttgtttatactttatattagctattggagttgagaggatgaagaaggctgaacttaagaagaaggctaagatggagatgatggacaagggtaagaagaagaggaaaactacggagtagaaggccaagtatgatgtctttgactggatgttaaaaagggaagcttaataatcaatatccgttttcattattacccaagagtatatttaccgtatgcatgcgattccattgattaggtagacataagcatgtttttgccagttctttacgttagttatcagcataaaacacaaactgcacatataaccaatagctgaattttacgatatgggagatatacagcaagttatattttacaagaggtggtgtttaatataatcaggaaatgagatgaatgtaaacaagtctcatggataaaaatacgccttttcatcttccccgagccagtgaacttcaaaactttatcagcaaaaagtatcgacatgtataactaataatcacgttctcaacatcaaatacaaaactcaaggtgaaaccaaccactagcaatccaaacaatcacataagaatcaaaatacaatcgatgccgcaattttactgctgatttaactattcctccaagttcaactgacaatgccactcaaacttttgacaagatcaatcaaattcaagctcaaattgcattacttcgtctagagaacaaatatagatgtatgcaatgtcccacattgctttaaaaaatagaaaatggtttaaaatcactatcaaaagaattgaaatagtttcgaatacgaatgagaaaaagtttgaattaatagtcgtctaaaattaaaagcattacccggtttactccgattttttattttaaagaattgaaagttttagaataatcatagcagacgggaataactcgtacaaaaaagtgaaatattttttggtaaggtcaagagtcaaagaggcgtaatttattaatgacataaacgtgacaggaagtacaatctacttactcatgttattacacatatttttatcaatctaaatattgctaagagaaataatcaagtcaataacccgagaaaactatgataagagatctcaaagtgtctccaatttctgctcgggttctcctaacatatagttactacactattgaccatgtatgatacaatttatttacttccttcttatgtgtatgctttctaagttaatactttctaatttaacttcttgttcttgttgcagggagtctacaacccatttactaataagcttgttgttataatcatggtcatctcgtcttattgaccgactgtgggtggatctagttacaagtctccctgtctttgaagcatatgtttgcatcggttagggtcatggtcgagatggctacatactcatagctatgattgatgtatatcgtttagatttagagccgatgccggtttgagttgaattccttggttaaacttgctgagatgaattttgtttcttaacattcgatttagtatatgttttcttagtatatgtaaaaaggttactagtatatgtgataactttagtctatgtgatataattatgaggtgatttgacattttggacagagtaagacttgtagagtttaattcatcagttatatacatatattaatgctatttcaacttcttgaaccctcgatagaatttataattgaaataatatgatttggtttgaatatttataatcaatttcgatgatacgataatcaatattcagaaataatacgataaatctctaaattttaaaagattttagattactttttacaaatcttaaatgaataataccaaatttttaaaaaatcttaattgaataacaacttgtacatgacatttaagtctctaaaactacttttgaaataataaaccaaaacccctctctaaatcttaatcttgttcctatttttttcaagtgttttttttatcaaataaattatgagtaaaatccgattaaaatatctcacactatatctcaaatcacagaaaacaaaaatctttttttaatatacaatttaaatcttttactccgatttaaatataacatttttgggacaactagccaaacgttacaagacgtcaataaattccattgacggttacaatttgatgataggtttgctttcgttaccctgagtccctgagtattagtgtggatatcccaaacttcgcaatcgcagtaattagggttatacgatttttgcagtcataaatcaaggtaatcggctatgttttcgatacttttgtaattagtgttttacgagttttgactgattacgatatctctgttatggaggttgatgtatttctcggctacgtgcctctatgatcagtctattaaccatgttcctcttctacatatgtggtgatttggggaaagacatatcagttttatgtaaaaacctttcgtttttgtaaattgtagtggatcttcaaaccctaagcttgaacatgaagttaagtaggttactttgtgatttttatgctttaacgttttgtctggtcattaagctcttgattttgaatcacttccgggagatttgtctctagttagattccacttttggttaagtgttgtcttgattatgatgaagagaaaaaagagaatgagagcgttagagagtaaattatgatgaagatgagcgttgcagccaagttgaacaaactcgggaaacatatgagaagagagtcatcgatagatcattggattaaaccgaaaacatgtttttgccacttcttgttctgttttccctgttttagctctgtttcccctgtttttgctctgtttcccatattctctgtaactttttcagttaaataacactgaagttacaaaaagagtttatgatacttacattatgttttaaaagctagtaccaatatacgtttaaagacgatataacaacaccataagctgcaaaatctgaagaaacatctaaaacccaaaatcttacaattcaggtgattcatggatagattcaagccttgggatccatttactctcgtcaaaacaactgagagaggttctctgattcacaaaagccagctgctccaatgaaacttgcttcgctaacaagcgatccagctgtttcctagttatcaccactttgattctccttcttccttccataaccttctcttcagacaccaattcatcctcgggacatacagatccgttcttgatctctgtgttagaaacttgaattttgttactatcaagatgttttacgcacaaacatacaccaagtttggagagagtcaccaagatttgcttcaagcttagtctcttcttcattactgttttcgttattggaagccttagaacaagtaagctgtgagattcattcaccttcttattacgtgtatatatatagacaaacacaaagaggcttgttttgaaatatttttaaaagcttccaattattaaaatcatcggttgtgtttaatttggagtggatagtaaaaattaaaaaagtaggtgggaatgtaacagattcggatcaatgggtatcttaatgaccaaaagaaaaatagagatgaaagtcttgaagatgttaacacgtgtgtacaatgggtcggttcttgcacataaaacattaattttggaccgactttttgatccaaaaccatatggcttgtcaaatactttgtggtatatcatgatgaaacctacttgatgtatatatgtatgataatggtgatcactaagactatttgcaattggaagtcaatccaaaataataaaaaaaacagaattgtgattgacctaatttttgttgttacactttttagaagttgataaagtttaccagctccatatttaatggaaaaaaaattagatatagtcaacttaaatgttactttaaacggttgaacgcgggattatgaaatgtattattttatcaataatctcttcaaaccttatcgtaaatatataaacggttagttaactgatttaaagagaaatttctagaatttatccaacttaattttcggtgtttaatgcaaatcctaataaaaatttgaataacccatttttttcaaaagaaaaatgattttctccatatcctattacataaaggattgttgtgtatttcttcttatatatagagaccattgtaaaaaaaacatcattgcataccctttaacgtaacttcttagccatgtctcacccaaacgatagagaaacaaagatatatgtggcaggtttgccttggattacaagaaccgaaggtctcataagttacttcgaacgatttggagaaatcgtttatgctaaagtagtttgtgatggagcaacacaaagatcaaagggatttggttttgtaagcatttaaacaacatataatatgtagagtaattatttgatataaattattatttttaatcatgactttgagtcaatattattaggtcacgtttagagaagttgaatctgcaacgagagcatgcgagaatccaaatcacaccatagacggacgaacagtcaattgcaaacttgcttatcttggtgctagggttcacaattaccaaccaaaccaatacggttattaatctcaattctctttttggtttctttccaattcaattttttttgcagtgataattattcattataatctttaatcttgtatatatattcaggtcaaccgctatatacatatagatactggtattttctctttcctttcatctctcaacttttttttagtaattgtatgatattaacaaggaactaataaaattgatttattttctttcatattcaggaacccgtttgatcagcagtattacctatgttacactatctatccgtattaaaagcaatctcaatctgagacatgggatcatcttgttctgttggattctcatagtcaactaggttttagtttgtctgaattttatatcattgtttctgttgaggttttcgtttgtctgacttttatatcattgtttctgttatagcagagtatctatgctctactttacgtaggttctatctaattcggaaaattaaagatttaaataaattgtttattggttactattaaggtttccgcaaaaaaagggaaataattaacgtaatctacgtttgcaagaacatcaactgtaatattctttattcgagtcttaatgaatccatgaaccgaaccttcttaattctctctgcatcctcgtatttgttgaaaaaacatagaaactaggaaaaagggctttacttaattcttcccaaaagtagagtgaagatacaaaaaaaaaaaaaaagttaatggatttcaagaaatacacacaaaacatggaccacccaacagactcaaatctttatgtgtagagctctaaaaagatacaagcaccatgaattatttaagagaagagggaaagtaatcaggtgaaacattgctcctgtctattttcctgttcttcgcctttttatcctctgcttttaactagggatatgctttgttattttacaactatatcattcaatataaactgttcaatgtaactttacaagaagtactaattaccagcccacaaacgtcgacagaaagaacaattgcgcataagtgaaaaaaactatagtgtatatgtggttgattattctatatagtctcatatagttgtagagcaacgagtcccttgtaatgaagctaagggaggagtggtcatgttcattccaaaagccacaattgcaagacaattcacattaaaccggtatgcacccgagacccatgtcccgatcttccaccgtagtttcccgtccatcttcataccgatgattattttaccagttgaccgttcacgactgatttgataaccaaaggactgggcaacgggtagctcagtcccttgaagaaacgctgtcaagagattgatttcttcatgggattgataaaaaggcggtagagaggcctctgatgtgatttgttgtcccctatacgctgcatatacgagtagcttgtcgtagtagatcccgacttttttgttagggtttttggagaagagagttagttggactgaagagttgaggagatgagtggaggaggtggtgaggttgaggctgtatatatcggcttctgtgagggagaactcgggtctctcggggtggaggatgagccaaacgaggaagatgatgaggagaaggccagagaagaaagttgagaatgtgaaaaatagtttcttgtggcgattgttgatgttaatccctcctttcttggcgcaatgttttggagaagttatggagatttgagacatttggagagagagatgatgatgatgaagaagaccaagaagagggacagagaagaatgagagaaggtgaatgggttaataaagagtggaagaagaaagctataagcacttaagcggcaattatctttgtgtctttagtaatgctttttttacttagtttgttacttggtgaaggtgtgaaaatattggccgttggattagtgataaatggacttctgttttcttgcggtcgttcttttgctttatgtatatatttgcgtgaacgttttagttacttatattattatacatgcttgattagttaaggaaaacaccaaataatcaataaagttaacacatcgtgagactttgaaatgtcttgaaaagcttctttttcttgcacactttgcgtttttctttaacttcaaatgattaatgttttgtgagatcgtgcatggtaagttttgatatcacccaaagttaaaagataacatgtcatgagaagaaaccgatatagatccatatataattaaagacctaagatgtgtatagaataaagcataagtccattatatagtatcgatcattttgttagttgaagacttagatgattagaccggtatgaaaatgataaagaaggaaagttgttgaacaaaatatatattttggtcaagaagctatgtgtgtatatttgatgtttcaagtgcttgaaatttttagtttatttcaagtactttaaagtaggattggttttgaatgccagcaattttttccatctgatgtccattgtcttttatttagattcttcatctataatatttaatatataagtaaattggtcttcttctttttttccaaagtaattaaactggtctcttaaaatatactatgataattaaataaatggttttaggtcgtcaaccggtaaaagcacttttaatttctttaagaaaattaatgtcttgtattaagcaataaaagattactatataagaactttgttatcaaatattcttatgcatatgaatataagaaagagcacgagtcttagggtccgaagatccttttgtcggaacctatactgttatacggtctcttgctcggtttgtagtagtttcatgggacaagccatatacgtattactattatttttgaaatataaaactatatgctataaaattactacaagtatacaagaatcaacgcctccaaatttcttttaaaagtttcatatatcctatgaaaagcttagattttttcctccacaaaagcagcttttcacattatttaatataattggataatacctattttatcatatgggatcaataagaacatcatatatgtttttttaaaaacgtctttttgttgataaatttgttttcttttcctaaatcaatataaataaaattatgtggttttatgaatacggggttttctaaattgcaaaaaaagaatataaaatcggataatcagactataaagttttctgaaatgtgttaatgtctcggaagacatgaggaatcaataattagctttttcataaggagaaaatattaaaaaatagagaggaaaaaaccgtggaagcatctcaatcatttcatgggggcctttttgtgtctttatgtagccgttccttttacgctaaggaaagatagagcaactcgtatatgcatccaaatttctttagaattcaaagtaacatttatactctgaaaaatatattactctctcagatattttattcatagattgtaataagttggaaaactaagtagaagagatgattcgtatattcaaaacgtagtggatctatccatactctattttagggttctcccttgtacaatggccctagaagttatgtatatatatatatacaagaaagcttacaaagatagaaaagtcatattaaacttaagcctcttcgacaatatgtatcgtcaattcccgacgcatattattgtgcaataaaatgggacctctaactccagaaactggaaaaaacaaaaagaagagaaacgataacaatgcaaatgtatggtttttctatattaatttttattatatatatgaagacttatttcattttttagaatgaatgatttatcattgataaactactccatggactttggtagtgtgcgatttataatcttcttcacttcttttaaaatactttctgaaaaattgttcatcatcataatgttcttgctttgaacctagcttttttgtgtattacggtttaattattcagacaatgaagtgggaaaaagagactttgcttttcgtttccttgcgtctttaaaagtcactttttgttgattttttctcacctagtttcaaaagttttgtgtgctaagtcactgctaacgaaaagtgagttattaccagaaccaaaatatatgagactaatgttgttggctctacggttgagtaggagaatttaactcttgcaacctacacatccgcagtttaaactttagacatgtatgttcgattggttaaggttgtagataacggttttttggtgttgtagaattaggttatagtttaagattttgttatattttttgcaaaattttcgaaatgatttgtaaatatattagtttttttttatattgtaaataatattatatagttcttctacctcgtaaattattttttttatggtgtaatttttcgtaacttctaaataaataaattaatatattaagtatagcatgtaaaatctatattaatacgtaccatattatatagatgtctaaaagtaaataaattttatgcatagataataccataaatataattataaatgtatatgttatttctttgtgtgtgccatactgctatatataaatttttggatttgtctttttggcgggccaaccgaatggggcagcatgatgtgaacgggatttgttgtggagttaagtgaactttatgcaacttggaatctccattattcgctctggtaaaaagattaactatagaaaagttataagataataagaagatatcaatacaaagtactgaggcaagacaaaaaaatgaacgatgtcgcaaaaaaaataggaacctgtcagaccgccgtgcgaccaccccggctagggtaaaccgagccgagtaacgatcctctacagcaccggatgcgtccgaggacaatcgtagccgtcaatcacgctctagccgcacggtcatggttcatcaaccagggtttagggcctgtctcttgagaaatcaaggaaacagaggtacgagcctatagaacagatcctgttcaagtaaggtcgtgaccattgctgctctctcaatgttatatatccggcaacattgtttttcaaaatagcgatgtgggacaaagttatataaagatcacattagaaaagcatgcatgggtcgtgatatatggactaaggcccacttaattatcatataaagcccctccctaaattagcgttgaaaattatcattaagtcaatatgatttgcgaagtataggcgtatagctattaagtgtgataaattcgttctcaattatgtgcgggtaacaaagctatcttcattatatcagacgatgttgaaacttttttttttgtttttctgccgatgtgaagatataacctattagaacaagcaaagcagtcattcatgtcccaatcatttttttatttcatgctatgatccgaaaattttgttcctttcttggattaccaatgatgaaacctagaagaactacagatttgacgtctctcagtgactgcatagccgctcgttgtgatagcttgcttctggggaagtctcacagtaaacagatattaattacataatctgtataaccttaaacgccaaactaaatgttgtgttataatactcctcctttctaatgacaaacactgagcttctatacaaccattactaaaccctagagaaaaatatttcatatcattttgaaactgaagaattgatggaggtttattatttagtaataaacctttccaaaaataggcgtatgccgtttaaaagcagagagaacacgatattctttagtaaaaggcgaaagaatagttcgctatgccctcactgcacggctccgtgagtcttaccgagttgctctcgctctctttatatactttgttttactctgttcctgagtatcctgcccgatgtgggatctagcaaatcaattagcaagcttttgatagattaataagggcttaaactgatccttatagcccatttcagttaagcccaactatgttgttaatgttctgccatgacggagctagattgaaaggaatgaatcctagaaatgctgaagaaagaaagtacagtatatatgttttgctgttattacataaaactgttacatattaaagtcgttgattaagcatgtttctaacaaaaatacaatgtaaacagtcaacgtagttttttttttctttcttttatattctcttgaatttattgtttagaacctatatacaacttgagtgagtcaatttgtaacagtgtaacacttccatgtttttattcaaagattgtcaaaacggatgactcaagggtaactctcggatttaacttgagctactctataaattgttcatttcttttgaataccaaaaccatcccagtcaagcaatttcactctatctcctctgactcaaaagaaaaataaggaaacaatatatacgtgcaatggaaggtaggatcgaagctcttctctccactattctagttgtgacgactctgtgtgccaactactctattgacaccaggacaagccgagggactcgtgacaccgcaatttctttctattcctggttctccaattgatctcacaaaatgttggtcatcactcctcaacattcaaggttgtaaaatcgagatctttaaatctgtttttaagtggtaagtttgaaaacgttggaccaacatgctgcaaggcgtttacggaggtggatgcaaagtgttggccaaaaatgtttccgttgaatccattattccctcctcttctcaaggatggttgctctcgcatcatctctggcgcaccaacacacacgaaacctcaattccttgtcatccctggttctccgatcgatctcacaaaatgtttgtcatcacttgttaacgttgaaggttgcgtaactgaaatctacaaatcagttttcacaggaaagtttggtaatgttggatatatgtgctgcaaggcgttttcagctgtggatgtaaaatgttggccacaaatgtttccgctaaatccgttcttccctcctcttctcaagaaggaatgttctcctatcaacgcagccactcctacacacaaatgaaagtaactacaaaacctgtcagaccgccgtgcgaccaccccagcaaggtagaaccgaaccgagtaacgatcctctacagcaccgaatgcgtccgaggacgatcgtagccgtcaatcacgctctagccgcacggtcatggttcatcaaccagggtaaagggcctgtctcttgagaaatcaaggaaacagaggtacgagcctatagaacagatcctgttcaagtaaggtcgtgacacatgttgctctctcaatcttatatatacagcaacatttgttttcaaattagcgatgtgggagaaattaaatatcaaattagaaaagtatgcatgggtagtggggaaggcccacttaattatataatctatataaaaaaagcccatcatataatttgcgaagtatagcaattgatgtgtgataaaataggttctcagtcttgtttctgagtataattatgtgcgggtaacaaagctatcttaacagccttatacgcagaaccagaacatgtgaaaacataacctgttagaacaagcaaagcagtatcattcatgtcccaataattgtttctttaagtgatttgaaacttttcttcctttcttggattacctttgatgaaacctagaacaattacagatgatagagatcattgtatataaataccatagtttgtgaatcaataaaatcaagtcagttcaataccttattctacatggtatcagagcagtcgatctttgtggatcataattaaagcttccgcattatagtttttgtaatcaagaaaagattatgaagatggtgatcactgaaggagaagacggtgcctccgacggtggaaatgaaaacgacgaagatgtcggcatgttaagggatggaggttacgtgattgtttcttaatcacatgggtattatttttccaaaactttaagtcgttggttttctatgtttttaataggattggttttggtttttctttttctttttatgttactggaattattcttgagttaagaaattttcagagtttttgtgttcttagtaagagagtttggtaatagttttaccgttacgggggagtttggttatggtttagccattagtagagtttgtggaacattcatgtttttaggtcatgtttagtcccgagttatagaccgtccaagataaagatgattgtttgtggagcagcataatttgtgtacacgggatgtattcccttttaccaagaccgaagacatgatgaagttccaccccaagaatgaagtttataccctaagatgtttatttacatgatttgtccgtcctcgacatattgtccacgacatacgtgttccgctttgtgattgcaaagtttgcgttttgcgtaccacgtttgtcgtgcgggggagtattggggatatatgttatccgattaggattagtacaatatctttgatgatagagtttctaacctatattttagggatttatgtttatcttttgatagaaatcattgtatataaataccatagtttgtgaatcaataaaatcaagtcagttcaataccttattctacatttacgtctctcagtgactacatggccactcgttagtaattaaatgcatatacgtacgatacacataaatttggctctatgtgcaatttgcaaattttaatgtcataaataaagcgttagaataatcatgcatgctctaaacatatagggatgatgttacttacctagaaaatgaaaataacttgcaagtagcaaacacaacacaaaaagaaatgttacaaaacttggccaacttgttccatgacgtacgacgttttaaggttttgaacaataaaacgtgtttttccacttcaaacgacatgaagagacaaaaggttggtaccagttacgaattctacaaagtacttattttggaattacttagccaaattagttaggctttttgtcttgacatcttttggcttaacataataagatctaattgagagttaagactaattatcaggttttacttacaatttggtagtttttttaggatctccagtaactaataaaatgtttcgtattggctcagaatatttggcaaaagagcatgagaaacgttaagaacataagacaattaattaagtccaacccggtgacagcttgttggagtaaaagtaaaattaaattcaaaagtggtgttaaaaatttgttttctatcattaaaagcgacaaaagtttatcattttagtagttttctaaccaaatagtatcataatcacataagtgtgttatgtatacatttcatgggtctcgattctcgaccaatagaaatctttcgttatcgtacctatcaaaaagtgaatatttttcattactttttataaaaacataactatcgagtatggacctttttatatgtatgttcttacaagttgttagatcacacctatccgcaaacaataggtcattatattttaactataaacattggggtcatatgtcctcgtattcatttagcttttgccccttatcggatatagttttagttgagaatcaaaatttgtttccctgattctctcaatatatatgagctagtttggtaaacttatgagagttttgtcttattatccatgtttaaatgttgatgtgaagattcgttaatagagtttttttttttttctgaaatttgacactgtaagtacaatgaaatttgttctaaggattaagatcaagagatattcctcagctataatatagaagaatgaatggaaatgtaatattcttctataatttatattcatctttatctctttatctttggaaaacaaaagaaatctctatctctttattcattcaattcatacttaccacttaccagtttagatatgagtcataagagaaggacatgatcaaaataaaagattagactgaagaaattgtatttaattttcgttttttttttttgtaaaaagagaaataaaagtatagtaaatcagtagtggagtaatctatgatttcattgatgaataagagattacattaatcttgaatatacaaaataaaaataaaaattaaatcattttactgaaaattatttgaatactcaattctaaaatataaagataattttttctagcctatcatagtttaacaaataaatcacaaaagttttcttagtcagcatattaattaaattcctaaacattatagtaaaaacaaaaaatctacctgtaataaacacaaaaaaacaaaaaggtaaaaaaaatctatctgtacacaaccctagaccaagtagttttgtgtttatgtactttaacaccgtacccatctctcttctcctttataaccacttcttcctctgtcttctctctccatcttctccttcacattctctgcaaaaaaaaaaaaaaaaattcttcttttatggcattaacccttttgtctcacgaattatctgacctctgtatcggtaagccacctttacggtgtctctccgtcgccacagccaccgtagctgacgccatcgccgctctcaaatcctctgacgaaccgttcctcaccgtatggagctgtaatcacgatgagaaaacagatgataatgataagtgtgagtgtttgggtaagatctgtatggctgatgtaatctgttacctatccaaattcgacaacaatgttttgtctctttcctctgctttcgacgcatctgtctctgttcttcttcccaaatctcgtgccctcgtcgtccatgttcaatcttcttgcaggtatgttacaaatccagacattggttctgtttcttaatgctctgtttttttgttctgtttcctaaagtcctgtttttgcagtttgattgaagctattgatctgataatcaaaggagcacagaatctgattgttccgattcatacgaaatcaatcacaaagagaagacaacaacaaaaacttctgaaacgaaacgtcgtcgtttcactcaccaacgcaacttcaacaacccacaaaaacagccgagaattctgctggatcacacaagaagacattattcgattccttctcgattccattagcgttttctctccattaccgtcgctttctatctccgatcttggagttatcaatagtacacacactatcctcgccgttgattactactcctcagctgcttccgccgtctctgccatctctcgtgccatcttggacaatgtctctgtcgcggtggttggtaaaggatgtgatcaagaagatccatgtatggttttgataggcgagatttcaccgatgacactcgcttgctgcgatgaaactgccgtagcagcggttgctacactctctgccggagatttaatgtcctatatcgacggtagtggtccgccggagagtctagttggagtagttaggaatcgtttggaagataaagggatggttggattaatctcactcattgattctttgtcgttgtcgtcggggtcttcctcggatgaagaatctccggcggggaagacgagaatgacttcttcgtatgggaggtcggtgagtagcgcggcgaggatggctaggaaatcggtggcgatagtgtgtaatcggaagagttctttaatggcggtgatgatacaagctattgctcatagagtgagttatgtgtgggtgattgatgaagatggttgtttgattggtatggttacttttgttgatatattgaaactttttagggaatttttggatgatgaaaactaaaatcatatgatatagttcagttttattttgatttttgttagaaattattgaaatctagcaacgaaaatttgttgtttaagttggttaaataggccataatacaaaagttcttgcaatacatttggtttatatattttctttggtgaccaggaagtttctggtttatcaacgtttatttacatgtgttcttaaattttgatctttggatctaatgatagtctaatgaagttcgttgttcatgggttgcatataacaaaaatgtagaattaaaacgttaagaatttggattaattcaacacctttgtgtgagattatgtgtattgtaggttgtacaatcggaatcagtaattatgtaaataggttagttagaccacgtattttggctgcaatatgggtttcacgtctaaacctaaagaaagcaacacttgatgagtctcacgtctaattgaattactcaaaatctattgttgttatttcgtgtctaaaagctttgtaacaatgacatattgatatctcaatgaacaattataaacacaaaaggcgaaacaagcaatcaataacacgtaaatggtgaagttgatggacgaaaatgaaagattgattctctttagttatacacacttggttagtacaaaattgaaatatggcctatagagatttggttatatttgggccagtcaatgataaattgtacagcttgctggtcaaatgccacgtgatattaaaatcgtccattgcgtttggtgcatgtttttaaatgtgcgtctcttgtgtctttgtctcgttgtgagtgtgaaagctgactgcttcacacaaaagagtgtaagttgtttgaataattaaaagtcttctgaagattcacatcttctgacagcaatatatacattgtgatatgcatgtatcttagggttaagacaaacctaacaagcatgatatatattggcatgggttctttattggcatgttcgataaaattccgttggtgttcaatatgagaacaatgcatatatagttaggctgattgacttttattagtgcaaaatttgatatttagatatgtaaatatcaaattttacacgtgatcattgtttttacaatttgcgttaaaaatgttttgtgtcaaatttaacagtgagaatatgctaccaatggatgttaaaggaaatcttgccctgaaactaaaatgattcatcaatgtaagacaaaaaaaatcaactaaaaaaatgttacatatgcgtttgtggtttgcatttctatatcgtaaaaggtgtttgaagtaaaaaggaaaagctgcacaaacaatgaaataaatgactcgcttgtaacaagaatggttagattcatactaacttcgtaaatgtgaggggcaagtcatgattttcgaaaaagactcataacagaaaaaagaaaagattcggtaacttagacgagcattggtataatgatgatgtataagtataacactatatggtatatacgaaatgattcggaaacttatgcttggaggacattgtttctcttgcatagcttacataacctatatgaagtcgtggaaacaaaaaatatcacaaaacatctactgatctagaaatgctgaattgtcatatatatgtagttgcttctattattccaatgaatctattaggacatgtgctggatttccctaaagttggaccaataaggacacgcttttgtattttagacctcatgataactataaattctgatgcgtagtaaaacaccaaattaaagtggataattgtgtacttaattatgccctttttagtaccgatatgtggtcattgtaccattgttgattgattcaaagaagacaaattatttgaagttccaaaaaacaaataccgtctttttttgtttgttgattttaaacaggaaaagagaaaaacatgttatttcgattcatgtttgttacatattgcgtatgtacttaattatgccctttttataattttatttggtggtcctaaatttttgcttggacgttagtgatgggtctctttcacgagtctcctcaatgattgatgagatttacctctttcacaaattgtccatggaccctattttttttagttattcagaaaaaaaaaactgagaaggctaatattgagattatatgtttagttgtagttgacgactcaaactttgatgattctaaactatatatttttcgatttcacacgaacacgaagaagggaatgaattttttgatacaattcgacgatctacgttttgatggtgatatatataaagctgtttcacaagaattcactattctctaaggagcatccacattgtataactaacatatgtgtcttcccacactaattcaattattaaaatgtgaaagttgtttttaaatagagactcccttcccaaaatgttttaattgagacacattaagacattttgagagtgatatcatttaaaaacatccaaacattttaataattatatttttaaaggaagacacaaacattcagatgtgcaatgtggatggtctaaagaccttatagtgtatttcgattttaatcagaatctcaaactagtatgtactttttttttttagtgtgtcaatacttgatttcattcattcaaagacaaatgaaaaacatagtacaaggattcaaatatccaaagttttgtaaatgaaagtggaaaaacattcataaatgcaatataaagattgtaaagataattccacttttgcttcacaagcacttgaaggcaatatagcttgatagcttcttggcgcaagcggactcatggtgagtcgcgggcacatccacgagtacttggagaagtgagagattattcacggtcgagatctcaaactagtgctagatctctagctagttttacacatgcgacactcgtgacttgtgagttcattaaccaaagcttccaagcaaccaaagtgaatttacgggagctcaatctcttcatcatttgaagccctctaactctcccagtgtgaccaaattgaccgtttgcaaaaaagcaaattcttaattgggttgttcacgatattaaaattgcatcctcacatgcaaaacaaataaaatcacgaaatttcgttaattgttttccacaaaatcactcttcaccgtcaacatctacacaactaacaagatctcttccattatccaaaggatctcttatatcaacgagatgattaggacaacatatatagaggaactccatacacaattaggtaaacttatacaacaacatttaaaaaataacttttttttttttttgtgggcatgcacacacacacgcacacgtatgacttaaatctcatgtaactgtaaagactaatgtggagccctcctcgaaatctcttgcggattttcgctttttttcatgagaattaggaaaattctgactcatatgaaagcaattacgtcattcttgtctttataaaattgattaacaaaacaaaatataaaaaataacgagagtttcaagacctcatattccaatgcatttagtgcatttaggtaggttccaggtagacagcttatttaatcgtcattattttgctaatcaacttttttatacgatactttcaagaaagaaaataatagaataacattagatacaaacaaattaacgaaagtgagagagtatcagatgatcatgtggagaagtttgttttcggtatctgtcgaatcttccttctttccattttttcttgtcaacatttattatttatttttgtttggtcggccatttgtgtccaaaaataaaaatacgaaaaaacaagtatttttcactttgctcaagaccatctctgcacatgaagttatgaactaagtgagaccagaagaacttctttcgatcgatttctacagtgattctgtttgctcaagactacaactttgtgtactttctctttcaacgagctgtgtatcgtgtacttcatggtgtgttcctctgcttctgattgagattgaatctcctgtggtttttcagttgctccggtgatcggctccggtggattgaaatttcaaagcttttcctaatttcttggagtctacagatttcaaagtttctgggttactaccaaagtagaatctcagtttttgtctaagctaatcagatttctgcgattctgattgttaactaatccaagaacgatcgatgggggtttaaaggttagttttttaaacttgtagaatcaaggaatgtgattttgttactgggtttaccaaattttaaaacttttttgcattgtggatattacagttgaatttgggtctagaggaggaacttgttttgtttttgtgaagaatcagactttaaaagaaatgggagaaggagaagaaaatggaaatgaagcagattcaaatgagagatctttggcattgtcacctacttggtctgttgctattgtcttgactgttttcgttgttgtttctttgatcgttgagcgctccatttatcgtctcagcactgtgagtagtctccattggatgctcctctgtgatttgatcttcttgagaatcatttcttacttctgtttttgtcacagtggttgagaaaaacaaagaggaaacctatgtttgctgcattagagaagatgaaagaaggttttgttcataaacaaaaaaactcatatatgatccttctttgtgtctgtgtgtgtgtggttacataaatctttgatgtgttttgaaatggtattttcttacagagttgatgctgcttggcttcatttcacttctattaacagctacctcaagtacaatagccaatatatgtgtcccttcaagtttctacaatgacagatttcttccgtgtacacgatctgagatccaagaggagctcgaaagcggttcaactgtcaagcggaatcttttaacaaaatccctctttttcaacatctttaggagaaggttggatgtcataaaacgaaccacctgcagcgaggttcaaacttaaatgactgagatctttagcattggctttagaatcttctgatcatttctaaggaactaactaaattcaattttgcaggggcatgagccgtttgtttcatatgaaggccttgaacagttgcatcgcttcatctttataatggcagttactcatgtaacttatagctgcttgaccatgctccttgcaatcgtcaaggtagtatctttcaacagctgaagttttcttttgaatttgaatgttaataacagtgtattttgtgtgtttatagtgtgcgtttttatctgttttgatatgggaagaacctctgttactaacaattttgtttgatctgcttctctatgcagattcatagttggaggatatgggaagatgtagctcgtctagatagacacgattgcttaactggtgagcactaaatggttatcttgttcttccaagtatggcacgaaagattccatctgctcctctatttaactaagagcacaagtgaagtgctgttacaagtagcattatagtttacttatttgatgggttgtatatctatcaagtggtaaacgatcgattatttgtgtggcagcggtggcacgtgaaaaaatattccgaaggcaaacaacgtttgtccagtatcatacatcagcacctctggccaagaatagaattcttatatgggtggtaagattcttagctctcttctctagaaaatatggaaaacaattacaaatattgaataatgggtggtatgtttttcacctccttgcagacatgtttcttccggcaattcggacgttctgttgatcgttctgactatcttactctccgcaaaggattcattgtggtgggtgatactatatgccgtatgatcattagctttttccactctcattttcaactatttatgaatgacaataatgatacaactacttatagttggtactgtttccttttcttctttaatgagcagaatcaccacctcacattaaagtacgattttcacagctacatgattcgttctatggaagaagagttccaaaggatcgttggtgtgaggtgagatacctcatcccatagaaacatagtgtgggatatccacttagcttatatctatcaggttctgagttcttaaaatcactaatcattttggataaatggatgcattagttattgactgaacaacttttgcttcaatgctcttctgcagtgggccgctttggggtttcgtagttgctttcatgctctttaacataaaaggtatgatcagttgatcactaaaccaaaagacagatgatcattctgttttcctttagttcaattgtgaaaaatattcatatttataagatttttagttttaaatctggcctcttgttactgcaggatcaaatctttacttctggatagcgattattcctgtaaccgtaagaactacattttcacagcattctcgctttcttgtattgtgtttgtaaacatcacaacttagtaaaactttcattctcattttatcagcttgttcttctggttggtgctaagttgcaacacgtaatagcaactttggcattggagaatgccgggttaaccgagtatccttccggagtaaagctgagacctcgagatgaacttttctggttcaataaaccagaactactcttgtcccttatccatttcattctgtttcaggtttgcaaaatcttaactaaccaccattgcaccgaaccaatatttctcggtcttggtaaaactaacagctacttgatttgcatttccaacagaattcttttgaactggcttcgttcttctggttctgggtatgacaaatgaaccatatattcttttaatctttcgcaaactttcgattcgggtttggaacttacaatgcatttgttattacttttcttcagtggcagtttgggtacagctcttgcttccttaagaaccattaccttgtttacttcagacttcttttagggtaactaaaccttcgtttttcgtctcgatttagactgttgtgcatctgcctcatagtgtaatgtaattcattcctctttgtaggtttgctggacagtttctatgcagctacagtacactgccactatatgcactagtcactcaggtaatttatcgagctttcgacttttggcagcttccgtaaactcctaggaggataacgaaatattgttttgattccagatgggaacgaactataaagcggctcttatacctcagagaataagagagacgattcgcggttggggtaaagcaacgagaaggaaaagaaggcacgggttatatggcgatgattcaacagttagaacagaaacaagcacaattgcatcacttgaagaatatgatcatcaagtgcttgacgttactgaaacttctttcgaacaacaacggaaacaacaagaacaaggtactactgagcttgagttgcaaccaatccaacctcgtaatgattgtgtacccaatgatacttcaagtagagtcggaacacctcttcttcgaccttggctctccatttcttcaccaacaacgaccatagagttgagatcagaacctatggaaacactctcgagatcgtcttccttgccaagtgagaagagagtctgaatataaataagttcgtaggagtaacagtagaaaacaagtatgtctcgatgaacatagattgaaaacttacatcaatcaagtgttagcaacactaatatttgtatgtgctctacaaaaaaattatattgcaatattgagaaacatttaaatttgttagaaccaaaaccaaatcttaccttttgtttaagctaagatttataaatcatcatggagataaaaagaggtataataagaaataaaacttttctacattggttaaaaatttggaaaaagaattactttaaattattttactcataattttgtttttccatttttctaaattaattaattaattattttgacctttgtttgggttctctgtttccgacataacttttaagttttgtagctcctcctcgacggcttcgaaaccctaaaccccaaagtttaagctgccgtcaatggaggactccgatgctaaaacggaagctcctgctttcgtatacgatactcttcctccactttcattctcagattcgaatcaatctccaccaccaactcatgaagaatcacaccaatactctgttttccgcaaagagatttcagattttcccgacgacacaacgccggtggaatcagctacggtggatttcttctcactcgatgtagaaggtgagacgactgagaacggcgtcgaacctgtaacgccggtggttgtggcgtcgaagaagaagagtaagaagaggaagaaagatgaagaacctagattggagagtaattggtttagtgagaatagtttctctaagattccaatgcttcaattgcataaaggtaattagctcaaaaatcattcaaagttttagtctttaagctagtttttgatacatgtggctattaagtttaggttcttcattcaaagtttgagtctttgctaattctggatgaatgtgggtattgaatttaggttctttgttagtttgattatatatgagaattccttttggtgttgcatcctcataagaaacttgttgaggagatttgatcttggttattgcagaaatagtagatttctgtgattttctgttaccaacacaagccgagaaagctgagcgtgatgcagcagtggagagtgtttcaagtgttattaagtatatctggccgagttgcaaggtacaaacgttggagacttcagtatctctctctgagtattgttcaattttgggaaactgcaatctctaattcttgcttattctctgttgaaaggttgaggtttttgggtcatacaagacagggctttatcttccaacaagtgatatagatgtaagaataccttagagcttaacacaaacgattatctccacatccatttgagagacatctaatttagtgtttggagagatttttcatgtcttaatctctttttttttttgtttatgaaggtggtcattctggaatcaggtctcactaatcctcagttaggtctacgcgcactctccagggcattatcacaaaggggaattgcgaagaatcttctggtatttgttactttcttttaccatatggcagtatcttaaagagatcgtcgctcataattatctctctgattgttcaggtgattgctaaggctcgtgtaccaattatcaagtttgttgagaagaaaagcaacattgcgtttgatctaaggttttttattttcccatttgacctagtagcttcccttttagatacagtctgcttttaccatagatggattgtaggcaacatactaattaattacatagcaattcttgaaggaactttgaactttggctattatgtatatcctcaacaaaagctttgtggtccaggctcgattagaaagctctgtaattgcagcagatatctatacgaattatatatgtagacgcacaaatgacttttattgtgaatgaattatatgaatttagctagtattaagcatgtcactggctttgcagttttgatatggagaatggaccaaaggcagctgagtttatacaggtttgtgatagtacattttgctgccccaagtagttctcatgaatttgtgatttttcagctgaataatactccttagcaacctatcatgttgatctatgttatcttaccacaattctcggattattttgcaggatgcagtatcaaagttgcctcctctacgaccattatgtctaattctgaaagtatttctacagcagagagaacttaatgaggtctggaaatactagtctgcttttctttaataatttccgtccttcttcacaatgccaaacgttcacaaaattgtctttaatgtttttgttcaggtgtacagtggtggaattggttcatatgcacttcttgcaatgctcattgcatttctcaaggtccaagtggtttcttaaatttcacaattccaattctttcactttcaaatttaaaactctaaattggactttttgtacctttgtttgttctatgaaacagtacctgaaggatggtcgaagcgcacctgagcataacttgggagttctattggtatgtttttttcattgctacgtaaagctttaaattgcatggcttcatttgttggctaaaatctatatttttctttattgtaggttaaattctttgatttttacgggcgaaaattaaacaccgcagatgtcggtatatcttgcaaaatgggaggttctttcttttctaagtacaacaaagggtaagtacttaaaccaacactggagagttttatttaattgtttctcatctaaactccatgaaacatcgacctttaccttttgtgtctctgtcttgattcatatctgtcttttttttcgtttttgtctctccagtttcctgaacagagcccggccaagtctcatctctatcgaggatccacaggtcagcttcgagctctggttttgtataaacaagaaacttagaatgcatctgacaaaagattgacttggttttatttggttttgttggatgatcagacaccagagaatgacattgggaagagctcattcaactactttcaggttccattcacttctttagtttatcaacaaagtatttacactttcaagatggatatataaactcattagagacggtttctttatatgcagattcgatcagcctttgcaatggccttgtctacactaacaaacacaaaagccatcctatcgttaggaccaaaccggagcatcctcggcactatcatcagaccagaccgggtcctatcagaacgcaaaggaggacaaaatggagatgtcacgttcaacagccttcttcccggagcaggagagccattaccattggagagtaacggcaaaaccaacggtgggcttttctgcaactgggagctcgaagaagaggaagaagaaggttcgttccctagagggaatgacattactccagtagttgatacccctggtaagaaatcaaaagagtcttctcgaaaaaagaagaagaagagcaagaagaataaggaggtagatgaagacgacgaggaagaaggaacgagtacgaagaagaagaagaagaaacgacggaggaacattgttggactcacatggacctactgagagatgtttattatagttcggttacacttagaaccagacgaagtttctgttatgagtgtaaattattataatttggtaaaaacagatatttatgctgttgttacaaattagaatacttcaccatcagttttgagttaggttcttaaattaagacaaatgttatggaacaatttagttatcaattttagattcatcaatcattatcgtggtcgtcactatcatcaacatcctcatttattgatcatcatcatcataagcatctacttaatcataaagtacattctctcttgctcttgattcaggactttgatgaatccattattggaaaccgtaattcgaatgaaattgattgtaaagatcatatttttggattgtgatttgacttgtttagaggctttttgatcaatggctctttggttctgataaaggtctaaaccatcaacaataagatattattcgatattttcgaagaagcaacatcatactcttactcacttgatttgttctaaattcgaaaccataacgtcttgcatcgtgtgtttatattttcacgctcacattcaagtgttagataatgttttagacgtatttaccaagaaaagaggggaacgacaaaggggtctacttctgaagtttgaatccggcgccagtttcttctataaaggttcatcttactggatcgtattatggatttctccgtgtcattttagtaattaaacctttctaattgtttttttttttgtaaaaaacagtatgaagttactactcttgttactaatctaataaaataagtttgatctaaacatcattatattgaattttcaattttggaataatgtgctttttattgattatataatcgattgctatgatttggattttcaaagtaaatatcaattttctattcgataaatttatattaatttacttttaacaaagctcgaaatgaaaaatactaatttgtgcgcttataaatattctcaaaatttaaaacctatgaaacagaataaataaagtatcatgtgcattgttaatatgaaaattaaatatagtttttgctttattactggcacaacgagttttagttgaagatacattggggtatatgtcttatatcattacttcattatgtaaaataaacttgtgttatctcttctaaaaatcatatatatttcataagcagcattatagtaaatacaatgaaagacaaactccataaggtcatgtgcaatggcaaatttattcaacatcctactttttcactttttaaccttccacatcatcttctctttctttcacatcatcattcaacacccacataattttgaaccactacaatggttttgtttaataaaattcaacactctactctacaattattattttataatttatatttacttatatatttattttcttatgattgtatattaataataattcttgatagattaaaatattaactaaaattatattaaattaaagaggataataaaaacaacctttaaaatcaaatttaaaataaaaacaagagtttattagaggataataagaaaattatgatagaaatgatgtttttttgtatttgtccgaatgaaatgaaccaagtttctttttttttttttttttcgtcaaaacaatttcataaattaaatagtgttgttacagtgatgtttttgaagccaactagggaaaagtctagaatctgaataaaaacaagatgaattacaaccaagtttcgccagatcgtgtgcaatcatgtttccctccctcttgacgaatttaaattgaatgcttctgaattttccagcccaaaactgaatatctgtgagtagattcgctaaagagcaatgtgaagcagaattggtaacaagttgtatcaaagtttggcaatctccttccatgatgacatgtgtatagcctcggatccaaatttgttgaagtgctgctaataaggcctttgtttctgcctctatcggtgtgcttgtatggtctagtaccatggatccccaatgttcaggtgtcccgttatggtttctaataatccaccctcctgtagcttttaaatcctgcacagtaaaactagcatcgaagttgcattttatgtaaggcatctgaggtttaacccatgtagtgttccccgctgctgtcgttcgcttcggaagccttctaggaccttgtgtttgggtagcattaagccattcgtttgtttccgccttagcccttacaactgttattgatggactttctcgaagattgtttaaaactacattgtttcgtgctttccaaattctccaaagtagccagaatgggataagtttctgagaatctgttatagtggtgttctggagaagtaataaaatatttgaaatgttatcttcaatgttatcagacagtatagagcttcgatataaaggtgtgtcaaatagccgccaagccattgttgcaaaaggacatgtgaaaagtgcgtgattgatagattcattctctcgtcgacatcgtggacatccaggatcgatgcgcattcccctcgtggtgaggcgttccgttgttggtaaggctttagacattattctccatagaaaatgttttagcttcggcatgattggcaaattccagattttggttttgaggtctactgaaccatggggtttagccattgtagggatgttgtttgacgggtcatgcgttaataaccaataacccgagcggactgtatagtcacctgtgaaattgtagctccaaataagacgatccgttttactccttgttgagagatagatgcgtttaatatagtcatggtcatattgatccacaaaagtttgcaatttggcattatcccaacatcgactatgacctctatgctgaaataaattgtcaagtgatagaccattatgttgttcatccgttagcaaagggcgtgagggtgagagtcgacgacattgtctatccctaaacggatagtcttaccatcgccaatcacatactgtgtaccttttctgaggagggcaataccagaaagcaaagaggaccacccgtaagattgttgagaccttgttttagcatcaattatcgagttatctttaaaatatcgagccttcataacccgcgcgaaaagagaattgggatattgaatgattcgccatgcttgttttgcaaggagggcgtcattaaattttgcaagatcccggaaacccagccctccttccttcttagaatattgaagtctcttccaagcaacccatggtattcctcttttatttgaagctttttcccaccagaaattcatcagaagagactctatctcagagacaatactttgaggaagtttgaaacaggacatcgcgtagacgggcattgccaaggcaactgattttaacaatatctcctttccggctggcgagaggaattttgcactccatgaggcagttctttttttaacacgatctatgatataattgaacatttctttttttttcctaccaaattgttcgggaagacccaaatatttacctcctcctccttgatttggaatgttcagaagtgtttttagtcgagtttgagtggaaccgtatacacgagacccaaaagtgattaatgatttctgaacatttattttctgcccggaataatattcgtcaacatcaaacacatctttaagagcttgacagttcctcacattagcttgacaaaagaataatgaatcgtctgcaaattgaagatgcgttatagccggtgctccatttccaattcggactccgcgaatatccccacttgatgctttgaccttaatgagatggctgagaatgtctccacaaagaatgaacaaatatggggataagggatcgccctgtctaatacctcgaatcggcgaaatatatccatgaggtgaaccattgatcaagactgagtaatgaacagatttcacaacagccattatccaacctatccatttatcgcaaaaaccgaaaagtcgcatcgtcgtttccagaaaatcccactctactcggttatatgctttgctaacatctgttttcactgccatatatgttttcgagactcgcttccggacttttaaggagtgcataatttcatgagcgatcataacattatcattgataattctccctggaataaacgcagcttgcgaatccgagacgattgagtttaggtgtgttttaagacggttcaccatgcattttgaaatgactttgtataagacattacacaaagctataggtctgtaatcggacagcgtttgaggattttgaatttttggaatcatacatatgttagtgtgattgatgctggtcttcatatgtgatgattcgaaaaaaagtttcacctctttaattacatcgttaccaacaatatcccaacattgtttgtaaaaacgtgctgttagaccatctggacccggagccttatcgtcaccaatctgacaaattgcttcaaaaatttcactgtcacgaaaatcttgcgtaagctccgagttaattatgtttgtgacagatgaagggaaatctgcaaagtcaattggggatacttgtattccgttagtggtgaatatgtccgtgaagaatttttgagcatgacaaccaatctctccatcacccatgtacatatgtccttgatcatctacgattgaatttattctgttttgggaaattctggtttttacgcaagcatgaaaaaaatcagtgttatgatcgccttccttcatccattggttacgacttttctgtttccaaaacttttcttcgtcactaaacgctttggccaacgattcttgtaattgaggtatgtgttgtctttgagctctattcacactctccattgctttgtttaatctcgcctgaaatgttttgatacgcacatccgaatttaaatttgaacgatgtttcagtttggacatagcctttctgcaactttggatacgttcagtgatggcaaaaacgtgagaagtgggtgagctgttccatccgtcgtgaacgacttgcttaaaggtagggatatcaagcaaacgattatcaaaccgaaactggttacgacgttggatgaaagaatcattagtgtggaccaaaaccggtttatggtctgaaccagaaaaatccaaaaactctgtttcagcgtttggaaaaattgcagaccaaactgaatttatgaagactctgtcaagacaacattttattgtatgtgtgtgtctttccccaacccaagtgaatctatcccctcgtgaacgcatatcttcgagatcacaatataaaaccatagctttgaaattccggaaagtccattcttctcttaaagggccaccaatcttttcatcattggatagaatctcattgaaatccccaattaacatccatgcttcacttctattatctgaaatttgtttaatggtttcccaaaggtgaagacgttcggatggaacagggtgaccatacacacaagacaagtagaagctcttattattataagttacataggagtcaatgagtctttcatcctgagaaagcaaggacaaagaaacattgtttttccacataagagctaagccaccactccttccaatggggggctgtgttattacattagggaaacctagatcatacgctagtttacgtaaaacatcacattggttaagagtttcaactagaaagaggatatcatacttataaatgcgaaataaacggaaaagccgggactgagtcagcggcacaccaatgccctgacaattccatgagagtgtcctcatattggatcccttgggggtatcgggccccccgcgcctccgtctatgacattgtggatcgaacatgatcccgccgattcggccttcctctccttcttacagagatggctcaggaccgccatctcatctgttgcctccacttgttgaaacatgtcttcaaaatggactcgcttacgctacatgaggataaccgggttctgtgcattgtcagatgattccaagagaagatcattggtaaccggtgtctgagttctcacccttgctagtttagcatgaagataacggagccttccaacagtaagatccgtgtcctcgaaaacgcttgggacagcgaaggccgtagtgtgggtagtggtctgaccctggtttgcatttgggagagggttgttaagacccggaatgagagtcgctgggtctattgtctgaagcgtatctgtgtcactcatgttgttgtctttgttatccatctgattgtcatcatcctcattgtcatcatcactcggttccgaagggtcttcatcatcaaaggcaagaacacactccttcacatcatgtttcagagatccacacttggaacagaagttcctcagacgctcgaaacggtacttaatcacagtgttttcatcaacagcaaactggaaattcctttgaaatctaagcggatcatctaaattccagtcaattttcactcttacaaagccaccatggttcgaattctcatcgaaatcaacttcagacacaaatcctagacgattaccagcacatcttgccattgcattcgtaagaaagagaagtggaatacccgtgatttgaacccagaacggtatgattttcatttcggcttcggtgatatttggataccatctgtgaaccgagagcatccaatcattaaacgaccaaggtccacgtcggagtaccaaattcattgcttcttcagtctggaatttgaattgaactttgcctttgtccagaattcgcccaacacacgagtctgggaagccccaaactcttggcatctgtccaattaaggcacgaagattctgcttgcgaggatttactgtcgttacaaccacagaaaagcgattaacatgcgcagcccgggaacagaactcaggggtaagagccaccggttcatcatctatccccaaggtgaggtcttgaacggattttcgaagtctgtcactcatgatttgtgacgatagtgtttgtgggaaagtgaaatgggattgagaagaaagagaagacggattgaaggttttatagagttgcgtccatggcggtttatgtgggtagttactctccgagattgaaggaaaacgaaaactgccatagaaacggttaggcagagagtaaccgtcgtcgaaattctgtaaagcaacacagattccgatcgccggaaaagcgctccgtcgtggagaaatgaaacggtatgaaaagggcctgaaatcgcccaaactgtcgccctctgagaaccaagtttctttttatacagcttcaaaagttatgaactttcatataaatattttaacaaaaaaaaaaaaatgctatataataattgattgtaaatagatagggtgagataaaaaaaaatataaaactctttacttgctctttgagcgtgtgaaacatactttctaataaaatggtgacgtgtgacatgtgcggacccaaacaaattttattcaacatgttgaatagattcaacaccctaaaatccacgtaggtttttttcattttttaacacccacattacattgattaaacagttgaataatttattcaacacctccattacaagtagtctaacaacgaatgattattactatatttatattttactatataccttaagaccttaacaatactcttttttctctaatatttttcttttcttacatagtaatttagattaataccctataatctaactatgcggagatggacatccacatgtcacttccttctttcttctgctcttattcttatttctcctccttcttctttttttctccgagactttattgcttatttttttcttcaaaatagatttaaaagtaaattatatattagtgacaacaataaaaatattaaaaataataatattgatgaatggacgtctagacctaccttttaactccttgatctcttcaaccgctccttgtattacaatggcttgcctacatctttccatacctctttgaccgtctccttctttggtagacgagacctaataaacttgtaagttgatttgatcatgatcttaattctttctttcttacctgattgtgtttttgaatgtgtaaacttagtgattttagcacctcgtttataacttaatttttggctccttacggcaaacttcaaatcaaagttctatgcattctatttttttgcattgtttaaccacgtcaacacgtttttcaattaaaaagaattacagcgtaagttctttattaaaattaaataaaaataattacagcttaagttctcactttaccaattccctacttactttactttattcagtttcattaacttaatatatataattttagacgtattttccaagaaatatatcagatattagcaaaagaaaaatcaacagaaaaaagtaaaaattttaccaattttgaggaaaacataagcaaaacatgaacaaacatttttgaaaactaaatccagcaactaacgaaaatgttgctgaaacaacaaaactgacgttcaaattttggatttatttactctgttattcagataactaggattaaaggccttgctgtcacgggtgaaatgatttcaaaaaatttctagagaaaatttgtattcatctctttttattctagcaaataaaaatatgtcacctattaaaaaaaatcatctaatcttctatcaaaacaaaattatatattagtttgtgtttaaaagagagagttaagattttgatatttatgaataattgaggttaaatatcggtttgagtttataaacggatatagatattacaattaaacaaggttcaatatcagtttggatttataaacgagtttagatttaacaattaaacgtggttaaatatcggtttgagtttaaaaagaacagttaggatttagattttaaaattgaacaagattaaatatcaatttgggtttacgaaatagaattaaggtttaaaatttttaattaaacgagatcatatatcagtttggatttataaaatagtggttagagtttatattttataattaattaaatgagttttatttattaattaggtggcatattttgattggctgaaacataccttagctggtaaaattaggatcagtagcaacatagaatctgcaaaaaacaatcgaatgatgtttacaaaacaatctcacaatctctctactttaatgataattttcatgattttattttgtgaaaaaatgtatagaatcatgaagcaataacataataatttaattcattaacaattatagaaattttattttaattgaataaaacaaaacttttatctacttaataaaagtgtgaattcaatttttttttttttattgaataacaatagattctatataatattttcagtcattaaaactatatttaagtcacaaatcaataacaccccataaataaacagataaaattataattaacgttcacaaaagtcttttataaaggataattggtgcaacggttcatcatatatacaaaaaattgtaagagttcatcaaataaactaagagattacaacagttaatcaaatatactaaatattaaaacggttcatcaaataatgtatatagctttgcttgattttgagccgtattagccattgtttatttgtttgtcttgtcgctattatatttgcctcaactattcttttttttttcaacgaggggctgatacgggctaataggcctaaaatcaccaattcgactgatcaaatgggttatttagtaaattttgtgtttgagaagagaatcgatgtaggcctaaagagcgactcgtgcttatacatagttgtgcatgtgtcaccaattgaacttatatgtatgctctagaaacaagtgatgatacatatgaacataagtattttccttaaattgggtatgaggaaatacatgtgctaaaggaaacaccaaagacgatctaagtatacatcaaaacatgtcaaaagacaaattaaacattgaggatattagataagaccgggtaggagataaagaggccaatttagaggcatagatgatgtaaagtggtgtactttttgggaactcatgtcgtaaaaaccaaggccatatccaatgtaatatatatagttaggcttcagtccaggattattgcttgcctcaagacataatgtctcattgttgccaaagaaaatgcagagatctccaatgtcttcagtgtaataagcggcaatctctccatccgttgcttttgtatttagcttaaacaccatgaatctcttggttttgttgaatataacctccttgtctccttggtcgtatgtctccacatacctgcaagagtgttgttggttattgttatatatagtttagttaatttagttgttctgtttatcaagactcactgcttaacaacaaaaattctgccaccgggggactcaaccaagtgctctatcttgatacacatagccaacaactcccactcggactgtggcatcattgggatatttctcaaatgcaacctcgtatactttttgttcatgttgagatcaaaagaacacaagaaacttgctcccattatcacgaggaacaacatctggtttcttggggaataaacgatatcagaggccgtcgtgtggatctcgttaccatcgcatccaacccattgcgagtggtgattaggcctacagagatatatatcggagcataagaacttgatgtacactacataatcgtcttcttggtctgggggataggataaggagacatttatgatgactctggaaggatcatacataggatcaggaagaggaggcagagtaatgactctaagggacccgagattgaacacgtcgcttagatgtacggttccatcatgtttgctcataaaagctatccagccacgcgagcttccaatgactcttgaatcttggtacaacaactttggaaatgacttgtggataacttcgatgatctcttccttactcagatcaaacaacttgaaactcatgatgatgttttcagcttctggagactctcctactttatcacctacaagtaccatatacggagtttgctttggagatgaggagaagaaacgagcagccttgtgatcactttcttcttcttcaacctgtgattgttcgtggaaggaactagaaaaatcatcataaagaaacacagcaaaacacttatatattttgttgataacgactagtaaaagcttacagagagatttgcgactagattgaaaagcagagacattgttatcctagaaaacaaccccaaactcacttgatttgttctaaattcgtaacaaccataaggttgtgatctcatgtgtttatgttttcacattcacgtgttatatactatttttgacgtactttccaagaaacatatcaaatactatcaaaaagaaatcaacagaaaagaaagtaattgacaaaatacatcatatgattcgttaaggaaacatataacaaaaaacagaagaaaaaaaaacagaaacaaatatgtaaactatatactcaccaaaaaaatatatacacttttctaaattaatagtatttatgggcattttgaaagtgtatattttataagttgaagaccctaacaacacgacatgtgtaaaagttataattcataaaattttgacacatgttaaataaaatttgttagtgttaatttcagacgtattgttcaagaacacatatccagtgatcaggataagaatctcaaaaattaagagaaaaggaaatctgaaaaagtctatataacatgtgtcgttgctgacttgaaaatgatagtgatcattcaaggttttgacattataatttagttttagatattagagcccatatataacatcttgcatttcttcgaggcccaactaggtgaaccatactttaaagtccgaattcatagcttatgttgcttatgtcacgtgggtcagccttcagccttgtttattagcaagattttacaagatattgttcgtttgaccacttaaccacttctttaatccggtcgcattagttaccatagtgacaaaaagcccaagtagtataaggtttcaagcccaattatattgttttagcaggccaggcttacttagatttaaaaccaaatttgtcttcattttttctctgaacgagaatcgaaagcattttttatacttgattcattacccattatttactaaattatttacaaaatttgccattaatattatatataaatatttcaacaacataaaaaataaaaagcaaattctaatttaaataattaaaaatgaaattccaatcaaaacaacttaataattaagcaagtaacatttcggaacttaatatttaactaccttcattttttttatataaacataaaattatatgttaacaactatattgatatcaattaatatatggattataataatttatatgccaaaaaatcctagttcaaataaaatagttatgtatattacattacataatacacaagtaaatttcagatttaatataataatccaataaattttgtaatacactcaatatatttacttaataattaatttgtcctgcatatagtaaatgtaaactatctaatgtattttagtgtatttttataaagtgtctacgcagcatttaaaatctcaccaacttatttattctcgattgtaaataattggtagtgtaatattttgtgtaagaaccagaaacttcgttttagtctatacataattcactctaaatcctaaaatcattaatgtacacaaaataattggggcaacgagcacataaaaatactaacaaggaaactatatgtaccgaaatctttaacatatttcacgttaaaactaacaaaatatgttttttatttttttttgtcgtcaactaacaaaatatgttagataattcgaaaatgatatcaaatataatccaaaataaagtaatgagaaaatacttcaaaaagtatagataaatataatcatctaaaaagtaaacatataacaaattaaagaatgagattaaaactatataactatgaattgtaaaaaaagaaacaaataaacattgagagtaatatatatactttttaaataaatattacttggttataagaaattaaaagtgtacttatataagtttaagaccctaacaacgcaacacgtgtagtaattataactcgtaaacttttgacatgtgtgttaagaaaatacttttttttaaaaagacatatgtgtcattttagagtttagactcacatatcattatcttttaaaaataatggtcacgacttatatttcagattattttcagaaagaaatcaacagaaaaaaaaaaaaaaaaaaggtgacaaatcccatttctgaaaatttgaagtataacattaaaaagtaactaattcgattttagaaagaaaagattgaaaaaaacaaatacattaaaataacatatttctttctaagtaaatatgaatagctatatgggaaatttgaatttatttttacatgtgtcacacaagttatttatacaaacacataattcaaaatcttaggattacaaaattacgtgtctgaagaaaatatatcagatttataaataatttatattatatataagacatagaggcatatagttgacgggtgtaaaaacaatagggtttaatacttgtagttaatttgaaaacaatgtctctgcttttcggattagttgcaaaacattctgtaagtattacttttccctaaaaaccaaaccgaaataatgtgttttgccaactttctctatgtatccttactttatttttctatttatgtggattccttcgcaatcaatcacaggtagaagaaagtgacgcggtccgtttctgctcatacccacggcaaaccccatacatgttgttcaactgcagtttgggtaatgtagacagatattcaaatataactataagttataatatatttaatccaaggaatgaaaaaatcatcaagatcactgataaagtttttgtaaaaagtttaccggatcccgaacaattcgtcttacttggaacctcacgaagctgggcagcttttacgcgtatacatgatacaattatatttctcactgacgtgtttaatccttggtcctccgaatcatccaccagaaccattactctgcctccattggtatctaatggcataaaggcctccgtttcattgtccactccttctccagacgacgacaatgattatatagttagtgtcagcttctttagatctaaactttattattgtatgcctaatcgagattcagagtggactagtactaacattccattttcttgcgatttcaactcacaagtcgtttactctcgaaaacgccaaatgttttacctcctcacaactggatgtgcctatatagctgccttggatctcaaaaacaataaggaccctaccttccttcaaatacagtttcagaacttccctttgataccacaacacgagtgggagatattggcttcatgtttacggagtgactatattgctgagtcgtcttctggcgaacgtttcattgttcaatggtaagcccacaaataatagagccacgtaactagctaggtttcttttagctagtaacaattgtgattagtatctcttatatgaaagttagataaagttagataagtccatgataatatgttttgttcgaaatgatcggaaaaactatattttactctataggtatttgacgtatgtggtggaaccatggggcaatgggaacataactaaagtatttagagaaaccaagagattcatggtcttcaaggaagaagaagagcataaattccaaagaaggaaaatgattgcaaactacacagaaaatattggagatctttgcattttcattgggaggaatgagacattttgtttggaagcaagcaagtatccgggactcaggcgtaactctatatattataccggtcatggctttggtgtttacgatatccgtaagaaaagcttccgtgaatatgactcaagtgattttcctatgttcaacgaattgttatttctgtcaccacctctatattagtaagttttcatgggtataaaacattcaacccgacccgagcctaaattgaatctgccacaaaaaaaaaaaactctcaagtccaagtggtgtaatctgaaaaaactgttggattccgaatcagctcgtgggtacccaaatttggctctttcaaatgactttgcactttttttaattttcatctaagttttttttttaaattaaaatatgtattcatctacattttattttgtattttatgaaattaactagaatcaaataccttaatttaaatgttcgtcaattgttcttcagacttaacaaaggaatccaaattatcatcgatttcttttatagcaaagtatcagccagtatctacaaatcgtgtactcgggtttgattagcctttgacacaaccggcactgatgtgaaactgttctaggagattacggaaaaataaagctaagtgtaaaataatatatataaaacagtaaccttttttacggttaacaagactcctatgtcacgcatttaactcttgaacacaatcatattggccaatcaatacacacattattctctatatattccactcacaacagctttatatctttgccatagtcccatcttgttcatatccatatcgaatccgtatcatgccacataaacaataccatgcataaccataaatatgcatttatcaatcaaattaacaacaacaaaatcgtgtaaataaccatatatatgcatgtgcaatcgtctggatacgggcaaggaacattcaaatgttaaaaatcaatgtgttttgagaagggacgagaaagtgttggttatcgcatatatatgcaatagcacacataaactaacattccgatccattttcgatgcgataaccaacactttctcgtcccttctcaaaacgaatatagacattacaaatgcgtaatcttactaggctagccagacataacacagatatatgaacattaattaataattaagtaacgctagttaatatttcttcatgttgaaataaaaagcatgattgtaacatattatagtacgtacatgttttttcatatcacaaaattgatatatgtatgtatgtattattatagtacatgtttattttcttttttcttagaagttagcacacattttctgtaggtataatagactttagtacacattttatgtagtaacagaggttggctagctgagtaatttgagtagaatattctagaacattggtgtaaaagagaaagagtggctgatttagtaatcacaaccattacactaattaatagaccaaagagagcatgaatgagcatgattagagtaaaccgccatagaaattatcttttaattgataggctgaaattgggatagttaagtctatttcttgtttgatttttgtcttccttcagttttattggaaattttatgtacaaaaaaaaaagaaaggaatttgcaaagaaacgaagcttcgagattctttcctaaagacacctctaagtagaaagcgcgtaacttctaaagttagattatttttttaattaaccatagatttgagaaaataaaaataaaacaaagaaaataaaaagaagaaaatatgaattatggcagaaatatgaactttacgcgtacgtctgtcctaataaagggtctgaatattcgtgtgatgaactagctactactatacttttatagatttctccatgtaattttagtaattaaaacctttataaagttgcggtttatttcataagcagcattatagtgagtacaatgataaatgtttttatatatatcacttacaaggtagctcccaagggtcgaattgataaatgtttaaatcccctatagcttctactaggcatgaatttcctagcaacttgtttcttaggtaaaatcctaggagttcctctttcttctctgggacgaaactcatagccgacgatcgacatcattttttttttcttcttcttcttctgaaaataatgaatattctcaaggaagacgaagttctttttttttttgtatgtatgttcggaacatgtggcccagttttttttttttctcaataagtagcattattgtagtctccgttctaaaaatccccgcctagtctgattgtgtttataaggtcgtgatctcatgtgtttatgttttcactttcacattcacgtgttatatatataattttagacgtattgtccaagaaatatatcagatattagcaaaacaaaaataaagaaaaaagtaaatttttttatcaattttgaggaaaacataagcaaaacatgaacaaacatttttgaaaaaatccagtaactaacgaaaatgttgctgaaaaaaaattgacgttcaagttttgaatttatttactctgttattcagataactatgactaaaggctctgctgtacaagtgaatgatttccaaaaacttatagagaaaatttttattcatccctttttattctagcaaataaaaatatgtcatctattaaaaaaattattaataaaaaaaatatgtcacaatccttcctctttttcatgtaactctcactattttcttgaatttgatttcatcggtcgtttaaaaagattcgattttgagtttgtggattttgttacagcggaggatcaaatcgaacgatagtgtatactatagaggaagggaatgatttttcttatactcctaaatgatgatgatcattcttcatccaatttataggtataaactttaagttgataaatatgtaggaaatataaaattgtaagaaaagattaattttaattgtttatgggaaactttggagcatgtcccaaattcctgtttattaatataaataaaatataatatgaatttcgccttatacatctttattcaataatatttttgagatagttctttaaaaaattatcaaatataaaccaaaataaaaattaaaaaaaaaacaaaaaaagaaagtaacgataaaagtaataacacttcaaaaaaagtatagataactataatcatctgacatgtaaacatatagcaaataaaagaattagattaagaactatctaactatgacttgtataaaaagaaacaaataaacatcaacagtaacatatatatttactgatgagttacccgatcttcacctgcaaatgaacaggcctactagtcataactaatgggctttctaaaccacaatattcttacggcccaattaaatttaaattaatattattattcgcagtttcgcgaggcttttgttttttttatcacggcctagtttagttaagctctcgccggtgatttagcggagatgggaagtgaccgcgacggtgctccgccggagaacacaaaacgagaggttgaagatagagatatcagaagaaaatcatcccgggagaaaccgagtggttctggaaaggattccggcgaagagaaagatgtgagtcgccgccgtgaatcgaagaggagaacaaaagacggcaacgattccggctctgaatctggtttggaaagtggaagcgaatcggagaaggaagagagacgtagaagtagaaaggatagagggaagaggaaatcagatcggaaatcatctaggagtaggagaagacgtcgtgattattcgagtagtagctcagattccgaatcagaatcggagtcggaatattctgattctgaggagagtgagagtgaagatgagagaagaaggaggaagaggaagagaaaggagagggaagaggaagagaaagagaggaagagaaggagaagagagaaagataagaagaagaggaacaagtctgataaagatggagataagaagaggaaggagaagaagaagaagaagtctgagaaagtgaagaaaggagctgttactgaatcatggggcaagtatggaatcatcagagaaactgatatgtggtaaagtttctgtcttttggaagttcttaagctcctacttgtgattttagtactgcaatggattgtgtatagattagatattgaagttgttgctttgcttatgtgtaggaataaacgtccagagttcacagcatggttgcttgaagtaaagaaggtaactttatctatacgctctaaagtcttatatgatgctaattgaattcagaacttaagctgattagagttatagaattgattttgggtatctgtttggctctaataggttaatttggaaagcttgccaccttgggaagagaagaaaatgtttaaagagtatgtactgtgatttatgttctgatgtatcttgtgttcatatgaagctcttttggtttctgatcaaaggttgtgtgcaattggtttttgttttcacagttttatggaggatcataatactggtacatttacctcgaaaaagtaagcttctttcttgtgtgaatttattagttttggtgaatgcttatggttgagattagttgtgaatcaaagataaaattttcttgcagatactatgacattgatggttactatagacttaagttggaaaaagagatgaaaaagggtttgaagaaagctgggattagtgaacgtactgtgttcaatgatgaggaacaacgccggtaaccaaagattcttactttatattagcagtcaatataatatagtcataccattggatgggttgcttagaaggcatgtcttttgtgcttgttttagactggagatgcaggaattacgtgaaaggcagaaggaagaagaagtgttagctctaaagcgatcaatggaaggtggaatggttagtgtctttcttgaattttcatgctccctttgccattaatctacttagttgcacaaatacttatgtgtttataaacccaatggcaggcgcaagctatgaaagagcaagctcggctaaaggaagaaatggtgtacttatacaagattggggacatggaggtatgatacaaaaaaaaaactattttttctgtgctttggatgaatcctctgttccgtattctaactccattgttaacgtaacgttttcggattactcttgatacacacagggtgcagctgctatacagagaaggttggatccggatgttcccatgtgatgtgtagctttttgttaagctacaatatcttctcgattgtgttccaagaatcgaacttttgtaacattaggataagagaaaccaaaattttatgtcctagagccctaagatactacttttttgcttgcttggatatcattattcgccaagaggtcaggtcaagttatgaaaattggtgaaacataaatgtcacaaattacaaccaagaccaatttcacactgataaaaaacattacaccatgtagacacatatatcattacaacggtaagaacatcacacgaaaatattacaaaagatcgaccacacacaaatgataatcacaaacattacatcccaaatagaagaagaaacgggttgtgtaaatatcgtaaaatggcatatgttgaatgaatctatttgtagatttcgatgacggaaaatggataaacagcgcatacgattgcacaacgagaaaaacccgatgcatatgctaaattttcaaactcatagagatctctctctttaccacctgaacattgtgttaacattgtcatgtccataccaaacacaatgttagaacatatatctccgctctttgcttccaccggtgtaaccatttccactattatcagttttccattttcttcgagacttttccaacagtttttaagaattgctacgcattgttcgtccgtccaatcatgtagtatccactgttatgatacgaggttatgatgatttaatatatagctttgatattccattttattttatttattggttgagataaatatagaacttaccttcatgaaaatggcatccccctttggaatcttgatgaacatatcaccagccacatggttcacacctgaaaccagtagtaaaattaaaaccgtcgtaagtttaatgaaacgtatggatgtcatgttttactattagcaccatcattatccataaagtatgaaaaagatcattacattcacaaaataaaaaataaaaaaaaatacttcaatcatataatgaaatgaaactattagttttgataaccgtctattggcttttataaaaaattgctgattttctatttttaaaatacatattgtattattgtgttaataatttaatataataatttaacattacattcaaaaaaaaaaaaaaattatcgcatggttcataccgggataagaatgagcattggctaacaccggagctaaatcgaaattgataccaataagatgaggatacttggaagtgatgagacctagtgtgttgccaagtcctccccctacatccaccaaagtcttcacatctttgaatccttcataaaatttaagaaccttctccgtaaccatggtggaagattccaacatagcccggttaaacactttaccaaatcgctcatcggcttggatgtattcgaatagtttcatcccatgggcagaactaaatgcatctcttccttctaatatcacatcttcgagatgtgtcctatgaaacaaaaaaaatcattaaatggtcacttcgtgtacaaacgtaaacattaaggtttaattagtgagatggttaatgataactaatagagtgtgtatatagatagtccggtttagccggttaacttactatgtaattggtttattcggtttagagtagagtatataaacttcatacatgtacattctgttatttgagaaagatagaaaacgattcacaaatctctttgattcatgttctctatcatggtatcagagcattttttgcgtttttccagttgatttcatcttcaatcttcaattcttgctcagtttcttcgattattcactcctcttggtgtcgattgttcttccgcgcattcgattttggtgaaaatggtgaagaaaggtgggaaaatgaagaatctcaatgttactcctgacgatggtggttctgttgctagatctactcgaaactcgatgatcgctgaagatcttgaagttgcgagagctcaacaacaactcaatcgaagattcgaagcttctgaggtccgtggatcgatgttgaagaacactgattcgttcgacaatccattggttctccattcatcggatcatccaggtttaacaattgtatctcatattcttgatggaactaattacaacagttggtcgattgcgatgaagattagcttagatgcaaagaacaagctaggtttagttgatggatcgttattgagaccttctgaggatgatttgagtttccgcatatggagtagatgcaatagtatggtgaaatcgtggattcttaaaccaacaaggattctttgattcatgttctctatcaataaccggtttaatgtatttgaagagttaactacagtattgtttttgtgttatatgcaaataagtaccatgtcttgataaatacgtcgctgaggtcaagcataaagagcgatgcaaaagaacccgagacgtcgtcacttttgttcaagagatatttgcagaccggttcagctgcatataccctctcaacttttccggtttgaccgttctcttctattacagtacggcattttaagaccgaatggctgacgagaaatcgaagcatacggtctagcaaagccggagcttccaggttgcatggtttggttgggagtcttagtgctatttcagaaggtgagagccacaaatcgccacctcctactgtggtgatggtgtcgatcacgccgagctccaaggcggctttgagaaccataggtgatgcggctgcattcgcgagccttctcgctagcaatcttgcctcttcttcaacctcttgttcttctttaactcgatccggtttggttaaggggacttggagatggtttgccattgttcttgtttgaaaaaataatattagaggagtgatgctaaatatgaggataggtttcaactttcatactttgtgccattttatagagtcatatctcaatatagtgttacatagatttgattagctgaccccaagatttgatatacatccaacattaggtctttcttttctcttcaacacactatgtctactgttttttttatttgttatggtggccatgcaagaacatgttcgttcaattagccagtttcattaaagttatatttaggtaaacatattagcaaaacatcaattgtagagactaggtgaacaaaatcgaccgcaccctaatcgttagaaaacatcaaaactaagtattcttacataatatagtagatgtcgattcaaagaaaatcattttcctaaaagcaaaaagaattacaagaagtgaagatgctaatattagcacatttggaactagtctacaacggaatttgcttgtctcgtggtcaaaacctccctattcaaccggagagtactaatctaacaacgtcacgtttcaaatactaaactgacacccaatcacaaaattccacgtgtacgtaactacaaggttccccacaagtatataaacatctacccataatgctctttcatcacacaactcataattacaaaagctaaacagttctctaaaatcaaagtaacttttttccgaagagaagattagaaaatgtctaacaacagtcagagcatgagcttcaacgctggccaagctaaaggccaaactcaggttttgttaaacgatcgttttttagaaactttaatatccattgttatttttgagttaatggagtattcattagaaggtaactaaaatttgttataggagaaggcaagcaacttgatagacaaggcctccaatgctgcccaatctgctaaggaatctatccaagaggtttattttcttttcttattctttaatagtatatttttgtgaaataatttgagaattcagaaaatttaataatttggaaaaacaaaatatagggtggacagcagctgaagcagaaggcacaaggtgcgagtgagaccattaaggaaaagaccggcatcagcaaatgagaagcacgttctaataataatttatgttttcagttttcgtttttattctaccagaaaaataattagatagatatgtctatctaaatccaagaatatggatttcgatcgaagccatttaggcaattacttttgcttttctatgttttttttctatatatctatatatctaagagtttttgactcttgtctattgataatttgtagccatgcagttatttctataatatttaaataaatgacatgattacatgaaactatagcttaaattttttattttatataagcaatgattgcggctaaatttattctctttgttaccatgactagacaagttggattatagtttcgattagtgacatgttaaatagtgaaaatggtggaacctatcatttcagaggaaaaaaagaacacacattgttgtgaagcaactgattgttttgttttattattccgtttttcatactcatgtatgtgtgtatatatatatgcatgtaaatgtcgagtacgatacgaatatcatctggtgcatgcacttttgatcattgtgatatgtatattactatttaccgataataggtcttataagtagttttatttcgtgaagaattagttgccattaagttttttttatataataagatcgacatataatatgctcgctttgcatgtttatgcaataagagggaatctttaaccacttgggttctagaagacactaatgatttgaagtttgaaagaatttgatccctcatggagggacgacatttttacaccaattggaattcgagtccccacaatttttacctttatcgtattctttttttctttttttggcttcttagtttttgttgtttttccattaatactaaaataatttaaagaacaaaaaaaacagaattggatactatctccattttaatcttgtttcctcatgtgctcacactgatttgtgtaaatgttgttgttagtagtaaactctcaataaaggagaacctattcgcactaagatatataagttcaatatttttatttttaattatgttagagaatatttgtactgcattttctattggtagcttgatattaataaaaacttttagtacaacatcttttcaaaatttgacctttatgctatacatattactctcatacaaattgaaatataaatcattgagtacaacgtcttgtcaaaaatttctttatgcttattcatacacgctataactaaccgatattgatattaatattcctttttaggtaagaaaacaagtgggtgcctataagttgaaatctttagaagtacaaaataattcaagaaggatagatacaagaaaatgcaaaataccccttaatatgatagatactacaaactaaccttggacataatacaaaaacttgaaatcttaatgcaacataatgtactactagaaaatgggattatgtaacttacatatttgtattagtgtcgcaaccgtatcatattctaaattcaaagaatagtgaatatgttttgagttaaagacaaaaaaaaaattacaccagtgttatgtcaccaccaccagtgttatgtcaccaccaccatcaccaccacaaccgttgctacattctcaccaatgtcaccataattggtatttagttgtggcagaagtgtgggttgttgtagataatatcaattttatataaagagagattaatagtcatttcttctcatccctaaaaaaacatatatttaaatttcttagtgaaaatgacttcatttcagtttccattactagtataaatgtgtttatatatatagaaattagaaaattacagtttccattattttatactctgaaattgatcgtacataaattggtaattggaaggtagtttttgctttttctttctagatacaatgttaagttcctaatgaatatttttaatattttatatgaaataggtccaaatattacaagttcatgtatttgagttatcatttgctaccatgaatatttgcaagacagaaaatatatcaaaatctcatgtggggacataaatcatagacatttaaatcttatccgttattgtagacaaacaaaaatcaatttattttttttattgtagagcgtaataattttataacgtgtgtcaacataaacggtaattacaaattgctttagattaaacaattaaacatgtgaggagaacagacgaatttgataaaaaggaacaaaagagcatgccaaaaatttaagaacatcagcattgttaacattgagtctatgagtatagattctacaggaaaattctcaataattgttcttcgacctatagaaattattctaatatcatggttcatggatatgggcgtcatcaaattccagataaacagtgtatatcactatagttttaattagaaacctgatttgatgttctttaatatacgattcttaatggatatccaaaaataggtatgtatgtaattttctacttcaatagcaagagtatcaaaaaaagtttaattagttcgataagtatcaagagtaaacttttatatgtatcaatatcaaactcttgatatcaaagtttaattagttcaccgtaatggtcttagttatgtaggttgattagaaaaaaataatgatggacatcgatatgtataaatactataatccatcatttaagagtcatttgtatattttatacgttgttgatggtaaacattgtaaattttggcttagacattcttgtgacgaaaaatcattatttcaagccaattttttttttcttacacggtattgtcttctgatataaaatgtcgtatggaataaataagccccttaacccaattatccagaagaagaaaaaaatcttggcagctattcaaacacttgttgattcgtataagagaaatgatgatgatgttagacgtagatgtatagtataatgtacatagtctacggaacacgaatctaacaaaattatgtttttaatttccaaagttttttaagagaaagaaagagaatgagagatgggtccatgacacctcactttttaaagtctttttaattgtcgtcgcacgacaaaactaaacaacattacacattattcacatcagcaacttccactcttcttcttctcttcaatcattctctctctctctttccctcttatacacatcaacacaacacgaagacatctctcattaatggaagtttcaacatcatccatgtcttcaaaaccagaacaaatgcaaaacccacctcctatgatctcatctcctaggtttcagcctcagataatatctcctcatcatcatgaccagcatcaacatctctcaaatccttatccaacaacatttgttcaagcagacacttctactttcaaacaagtcgttcagatgcttaccggctcatccaccgataccaccaccggaaaacaccacgaagctccttctccggtgaacaacaacaacaagggatcaagtttctcgattccacccatcaagaaaaccaacagcttcaagctttacgagagaagacaaaacaacaacaacatgttcgctaagaatgacctaatgatcaatacgttaaggcttcaaaactctcagagattgatgttcacaggaggaaacagcagtcatcatcaaagcccgagattctctccaagaaacagttcatcatcagaaaatattcttctgtctccaagcatgctggattttccgaagctagggctaaacagtcccgtgacgccactgagaagcaacgatgaccccttcaacaagtcatcacctttgtcattagggaactcatcggaagaagacaaagccattgctgataagggcttttatcttcatccatctccagtctcaactcctagagactctcagccactgcttcttcctctttttccggttgcttctccggcgaggaactcttaatcccgacgatatccatgagtgattttatacatgatattaaattatatctatctccggattttgtttagctataactaagatatctataagtttgatcatagttatggagtgactgtaaattttgtgcggtttttttcactttcaatctcaaaaattaattgcaatatatgtaattgggaggcataagtatatatattcatgatgatactcatatttataatactcattgtcctttttgtttttccaaaagttcgtttatagttttgctcttacgattgttacttcaacgtgtgccactcaatatcgagatc

SEQ ID NO: 893 - DNA, 73840 bp, Arabidopsis thaliana
aagcttagtggtatgacaccgaagccagaacaggtaaaaacactaatatcaatatgctgaatcctatgcctagtcacaagatctatccatgaggtgagataatagttaccagcaagatcataaatacatacacgtagtttctgtatatatgagtctttgtgtaaataaaaaaaactgccagcaaaactcacaaactcactgaacgaccgtaactctcgggagtcgaaatccaatacaggaaccaattgccaaagatttctccatcttgtggataagatgcttgttcttacagcatccttggtagaaagatgagacagaatgacacatatcaaatgatcaggtaattggcttagcctctcttcctctgatccttgactcgaccctttgccacaaatttctgtcttcaccatttgtttctactaacctaatcaggctaggattttgaagattatcacacgattattatctatatagttaagagcacctctattggtgtatcttaaatatatcttaggctagtatcttagaattaaattctgaaaaataaatcaaaacaaattaaaaactaagatttgcttcttagttaagaggtttttatgaatgaaaaaagcagccacatgtcatgtttcaaaattttagtttaaataattgttaagatacaagattaagcagttgggcttttctagagaagattttgacacttattggacagatactggatcaagggccttaagagactagatgggcttctttcagcacaaactttttcaaacttcactgatatcatcactagtaaacagctttttttctcatcaagtttgtttttttatttggtaaatgtgatcaaatcaattgcaactccataagaaaaagaagatacatagaggaaactctagatttgggagaatgatgtgacagtcttgaacccatgattttccggtaatggagcgtttccaggtcgaatcgatataatcgcctccagaccttacaaccagaattgagaaacaaactcagttttctcttatcagttatttgaagtaaatagagttttgtgtgtgttgtttacctgcggcttttgcagctacggcttcttgataaacatctgtcacaaacattatctctgcaggatcatccactcccaatgtttcttttatctccttgtaacttctactttctttcttgtttctgcagcaaagaatcgtgtgagatttgtagttggatcatactctattgaaaaagaaagagacagaaagatctttttatatacccgattgtagtgtcgaaaaagccagatatatactttctcagatctccatagtctgtgttcccaaagagaagcttttgcgctaatcgactaccgctagaatatatgtaaacctattcgcatgaaaaccattagacctgtgaaaaaaatgtcatttctttaaaagctacatgaacataccttaattcctgaagaatgccatttctctaaagcatctgctacatcctcaaaaacaatagctttcagttcatcacactcaaaacctgttcgccatatgtgaccctgcatacaaaagttcatatggcatttctcacacactattgaagtgaacaataaaaataaaggcggggtgtttttttttttgctcacctgcaattcctttaaagcagtgatctttctatcagctcttatcattgcctctacgtttgagaccatagcggcaatcaccttttcttttccttcatcagcatgagggataggaacagcgccggttacaccctctctcaagtcttcctcaacctgcaacaaattccagagatgatgaactttagtcacttgtttatgagaagagatgattagacagaggaaattaatttgttcttacttgagcccgcaacaacttaatatcctcttgggtttctgctgtgtgatatgtcaaattcaggtgctttccaacgttttcacgagcataaggaaagagaacatctgtgacgaaagtaatgggcgtagttgttccttcaatgtcgaggacaatccatcgctgcatgcaaccaaataggttataagtaaatttagacttctagagatatatgacaagagacaacagtcactttttacccgaggccattctctttcgtattgtgaatccttgatctgtgaatgtatggttctccggataggcccgtggtctggggtagcagcatccagacccagttgatgaagcttaatggcagcatcgaacagataatggtaacattcagcctggaagtgatagttaaagtttataaatagaaacaaacaaatatatgaacataacataagaaaatggcgtagaacttattgttggtttctcaactttcaaccaaatattgaagtaacttgcacaaacctgtgtcttagcatggatccaagaatcaccccaaatgtaaactccgtgattgcgtaccaacactgctgttgcttttggataggcttctatctgcaaatgagagtgaaatatgtcaaaactaattaaaaccattattttgttgcatatattcaattcaagcttcctcagaacaattagacttacagctttggtaagtgaatctgttagttcattctcatatgctgtgttctctatgattgggacaacaagttcatcatagtatccgtgaccttgaatcccttttatcatctccatgtgagttatctatgaaatgtcggacaggaagaaacattaaaatgcaaagtcctaactctactggggaacctggaattgtctaccaaataagcattacagcttacacggaattctttggcttgcggattcagcatcgtcacaagacaagattccatgccatgactgtgaataacagctccagcatttcgcatctcatatgcctgcaccacaacaaggttttgctatgaaacttattgataacgtcactatctcaatgttattagagattggacatctataaaatgagaagggaaatcatacaaacaaagcaagtcaatttggcattaaaacaacccacatacaacttgtcgaaacacaactcactgaaggaaaaagagattgtcttaacatacatgcaaatcatatataagtttacacattacaagcaatgatcatgcaacctcactgatcaactgaacccaggaaagatatatttgatagtctaaggtggttctttaataagtaaagagaagttacaaccaaaactccattttcaagagtgtttgtgtaaacatcaatacgctctaaatatcaattcatttttctgagcccattgtgtttagttctaacacttcactactgaatccatctcaaccagtgcaacctagtgggtattctatgggtcgaagaaacccacttgacacatccaacgaggggattattgctcaaattggacaagttttaccttgtaaccgagttttcgcaagcgtttccccaaagaaagtcgcctgttctgcacttttttttggattgtaatccaacagtcattagcaaacaacgtatttgccattccagtaaaagatcactagctaaatgggaggaaggacaaaataccactagaaaagagcgacgagctcttaacatatttcgttcataaccatgtgctctaagaaaaatccttcttaacagaaaacattataacttgaaatccgtaactgctgctcaacactttgacgaaatccaacattgctcaacaatttgagaaaacaaaaaatgcacaatcatcaaagaaaataccataagataaagaaggccaatagcaaagtgataatcaagctacgtatacagaaatccctaacgcagaatcaagtattactaccttgaaagcgacaaaaccataccttcatgaaaagtggagcacaatcggtacacttgggaggcttatttgggtatggctttggagagggtgtagatatgatggatccattagcagataagatgtacatatcctcaggttgcatcctctccttttgaacaccttcaaacacaacaagaatcagtaaaccgtgaagcaaataaaataacacatagaatcagcattgcaagattttcctttccattcaacatcttgcattgttaagtcgctaatgattcaaatacacaaagagaacgcttctaagcattgaaagaccaaaccaattctccacaaaaagagtgttaccagtgattttaaatacacaaagatgatctctagaaacagaaactttaactgataaacgcattacgcatagctcatatagcaaattaaaggtccacgagaacaaacacatcaactcaacagagcaacgacacatacatcagttcaaagatgcatcaaaatgagaatcaaggagaaagaaagtgactttaagatgtagagaacctgaaggagacatgacgataagttgctccggtttaggaatcgaagcatcatgaactttcatcgttatgctaccgccagtgccagacacccaaccttgagtataaaagtgacggcagagttcagtaaccaacgaactcgtctccttcacctccttcccttccagatacgcctgtggcaacccgatcatcgccgctgcagccaccgccatagattctcagagatagagaaagaggtatagagattgaaagattagagctttgtaggggaatgaaacgcaggtttatctggcgagctttcctttggctgctttcagaatatgattcctttttacaatttcccttaatttttatttaatctaaaggtccaaagtttcgtaaagtttgcatttttaagtacagcatgtttcttgctttagagttagaacaaacataaaaaaaaaaaaaaactttcatagcaaatttcaatattttttttctataccacggcgcttcctccgccgtatcttcgccgtcatcgccgcaaatatagaaaagacgctcgatttggggatttctcaaattaaactccttgtcgtttttcttacaaagaaacgacacgtagtctaattagaaggtacatgtttggtaacaaagaataagtctaatccaaaaccgagataagaatagtgtaaaaaccactcttgaaacctcctcttcaaaaataccagagagcgagaaaagctcttatcttcttcatcttctccaatgtcgagaggaccaggtcgtttaatacagaacgtgacacagttcgctgatgctcaattcaaacaattctctactcgttatggacaacaagttatagacattctcgattttccaatcaagctcgtcttgtctcctttcactctcgcctttgatatcgctggctctgcacctcgtggttttggcatccctgagttcatctccaaaatttcgtatctctctgtttttgtgagttggtttctcctgaaacttatatggttctgggtttagaacttgacatgtagttgtcttaaaggttgaaacttttgttggtttttgctgagtttctagcttgaaactatcattttctttctgggtttttggtagctgatgtttccggggaaattacgcttcgaatgtttgctaaagttttgagctttaatttgagtgtgcctatattgtgctgaatttctgtctgagtttgtcaacttgatttctaagtcgaagttttgtaagatcaaaatcagtttaggaaactggaaaatgcatgttttacttgttctatatggaatctttttatcattggagttccattgattgcaggcggttgctacgcttggaacttatgacattgcattggatttgggaaagaaagtcatatgccaaaggtcagcttcaagatttgatgctttattctgggtcagagaatttttgagaaacctcagttctcacacttcctcgctatgtttttggttctactgtttgagttcatccgatgagatgaaaacattttttgttggtcagggattgcaaaacttgtaatgggtggcaggcattacggtgcactatgtgcaaaggaacagggagtgttcattaccaaatcaaagattacaacttgagaaggtgggattatctcttgtttaacccaagttatatcgcttaaactactaggcttcatgaatagatccactttattctgacggtctctttgtgttctctgtatattaatgtcgacagttccatttggcaatgcttaagctatcctagtgatattctaacagataaaaggatttaaagatttatcctttctgtctttacttgtagtggagagaaaccaacagcagattgtgtcgcagatgctatagttgagaatcgagctgagttagttcatcttccctcctccttcaaccatagtgctccattgccatcaaaagactgcccaacttgtgatggaacggtaagctttttaatctcgctcttaatgctctaggcttctgtaaatgtatttgcactgctatatttgatactgatttggtttatatctccaaattgtcaactatgctaatttcatatccacgtaaaaaggtgcttgtttgtgttaagagtgatcgcgataggctgtttttcatcagtgtatgcttagaaatttgatggaacatctattgatattgaagggtgcgatgagctgtactgagtgcaagaacaagctgcaagtcagaatctcagctgatgatgtatgttttgagtctgctattacgtcttctcagcttaacatctacataaatcccctgtgggatgtatatatactagttattagaaatgaaatgcacatggagaggtagtttggttttgaacaaaactatcacttgctaaatacctttactgacgattcattttgcagatcatggaacctccatggaaagcctataatgtgctgaagaagatggattatccgtacgaggtgagcaccacaaagtctatttatcaacccaacagcttgctatgtttactacatctttaccgtcttatgagtcatattttctatttcagcacattgttcacagcatgaaagatcccagcattgcaaatttctggttgatcactttgcctcagattgtgggtgggtttgattatgatgaagatgtcaagaagaaaatatggtggcaatatgaggttagtatctctttctacatatgtagatctccttcagcatgagttatttgccaggcttcacttttgaggttatggtcttctagaggcttaaagcatgcataccgtaaaaggtttagtctacaattacctgatagttgaatcttcttaatcctcatttgggatggttttgctacaccaacatagtttcgattccatatctggataggtttgtgctatggaattggagacatttgtgggatactgatgtactcagggatctgtattgcatagaattttctgttcaataggaactattgttgttgaatacttcagctttaagcatcaatgagagtttaactatttatgtcttctgtgatcaggaatctatgcgatatgatcaacttcgggacttggtggctaaacgcaatcctggctgggaatatttgcaggatgtaagatcgcctatttgtggttttaaagtttaggcaaatctggggaactacattggaatatgttagctgaagaagtttagcaatcaccatatagttgtcatggttttacaggccttggtctccattgatcctgtccgtgctcgggaagaccccgtcatagtgaagaatgtcccttattacaaggctaagaaatctctggaggctgaagtcacgaaactcaatccacctccccgtcctcagaattggggtgtaagctttcttcttctttttggttttagcatcacagttcctgagaccacgggtatagttaagaactaactgctgaacatgtacaggaactgaatctcccattgaatatttcctcttggagtgaagaggatctcaaaaacccggcaaaactgtacgagaagacagttcttctcaatgctcaaagagaaatcgcagacaaaatcttggatgcacaatgggaagctaaatggcgtcaagagaaggttaatcaaggaacttttttacacaattcggtattcatatcacattcacgactccaatgcataccgtttatctttttgatttgtaggtggaggaaatgttggagcagaaagtgagaccttacatccaagactcaagcatggctgttcttccacaacccatcttgttaaagtcacagaagaaagctcaaaaggtatcaattgaattggttacaagaataagcctacttgatatcattctctcttacacactaaataaggttccaaattagatcatacaagaagctctttgcctgaaaatagaacctaagatcacatgttgatttatatgtttattacacagggaagccggcaaaggaagtggtggttcttctaacctgccaagtgtgtcgaaacgaatctatataaaatggattttgaattgagtttttttgtgcttctttgatgaaaatatgctttgatatgaatcttgatgggtgtcaaatatgattacacttcaaaatcagttgtaatgttttaaaagaaatgttgtttttgcagacacttggcagattcgttgtgtaccgccacgtgtatacgatgatctttctttcatgctttgaacttagttttcgtctttctcctatcaatcactctctctataattcctcgtgtctcaccgtcacatttcaacaagttacgtgtgtctttcatgttatggtattacgaaagatctttaccctttttttaattaaatatctatcgacatcattttggatagaacttaaacttaattgacaaatggaacttatcaaatttttttatttttttggaatttatcaaattggtattgttcaattgagaagtattagatatatcaagctcttgttatcaatagacaatagttacttcaaggttttagcatttggttttatcgtttttttaggaaatcacatgttgaccttcacgtacgtggagcaggtaaaagaatttaataagtgtttcattttattacaaagtcgtgtataaactcgtattgtggtccgttcaaatcctacattgcaaatttgcaattagtcctttacttgttttcattttttggactgttttattcttacaccataaatgggaatacgtagatcgcatttatttggacgttgaattatataagcatttgaactttagacccgcaacgataaagattgagaaacttctcgagatattacgaaataattataatcaccataattagaagataatgacagacgtttccaaaacgacacctggactttaattagattgaatgtgtcatattagtaatctataattgaaaaacttgcatgacccgcaattaaggcaatatgtcaatataaggacagaaattcatgattgtttgaatgcgaaatattgataattctttagataataatcaactttgtgaattatgagctgaataaaccaaacttaaaataaccaacttattacccatgccataaatacaaattttctcttcttattttgttgacctatttaacaataatgaattctactaagttggagattatgttactactagcaatgatcatgttcatgttttcggtattaaaaaaacgttttggtgcacttttacaaagttgctgtaactcccacacgagttcatgcatatcatcatgtaatcgtcgatgacgtcaaataaagaaccttagaacaacaaactgatttattacaataaaaaactacaaacgaatgcgaaattacgacaaaaggaagaaccgaaagagtacaactagaacaatagaactcaacaatagaataaagaacacctaaaactcaacacaaaaacgcacttaatcttaagcaaacatcagaaaggtaaaagtcgcactaaatagtgtagacataaccgaagtaacggctaaaccacttgctgagtttgtcctgggactaggagccggcgcagtgatgttatcggcggtcggagttgtttcggaaggagaaggtgccaagggtgtagactggtcagagggagcagcagactgatcaggtgatggggaagaaacaggggatggggattgtggtgtcatcggagatggagtggccggagactgagctggagaagaagaaggagatggggattttggagtcgccggtgagtgagatggagaatgcgccggggagtgagatggagcatgcgccggagagtgagatggagcatgcgccggggagtgagatggggcatgtgccggagagtgagatggggtatgtgccggagagtgagatggggtatgtgccggagagtgagatggtgagtgagaaacaggggagggagattttggtgacggagatggagtagctggagagtgagatgtagcatgcgacggtgagagagctggtgtgtgagaaataggggaagaagatttaggtggttgtgctggagaaacagaggatctaggtggctgagattttgaaggagcagacgctggagcaacgggagaaacaggggaatgagatttaggaggttgagtaggagaaactgaaggaacaggggaatgagccggagccgaaggttgatttctgacggcgaggacaacgacgatcaatttctgtcccttttgacagtgatcttgattaccgcttatgaaataaaaagcaccagatcgatcaagagtaaccacagattcaccattttcgaagttcttgatcggatttctaacgttgcatccatcaaaatctgctttcatcacttgttgaacagagtctgatcccttcgcgtacttaaaatctgcataaagattgaatgtttttttggttagaatcagagtaaaagcgaccaagttaaaaccctaacaaaatggagaaacttacagagagagtcattgacttggaaacggtttctttcagcccaagtattgtagttttcttgaggatttgtaacccaagcgccgttacctccgacgttaaacctccatgcatcagcaacggagaagaaagttgcaaatgaagcgaggataaggaaggagaaacagagacttttcatgatcgccgacatggttttcggagatctgaaaattagggtttttgtgttttgtcttttgtgtttgtgttgtggaatgagtgaagttatgtaatgaatatatataggaacttatgagattacgaagaatcaaagaaaatctctgaaatttacaaaaatggaatacgaagattagtgacagaagactttctttctttatatcaaagagattttgtttggtaaggtaataataattttgaaagttgtgaaataaaattgaaggcatttatgttaagaagacgtgtgagatttgactcacgtattaattcacttcccataaaaattgatttgattaatggatttatctatttaattattagtatttttgttaatgatgatttaaatttgttaaaactattgacaaaatgggctggttttccatttttagtttgatttcatttatatgaaagctattgagtctacttgtatagtagtgattagctctttatatgattctactttcggattgttgtttctgaattctaaactagccagctaggtgctagctattacttccttatttgtaacttgtaaggaacggacttcggggactggatttttttagtgagatgtggtgggcattgttaatttcgaagcccaagttaatttgaatagctcacgaagatgggcatgtgatttgaataaatcgtgtggaaaatgctttgaataaatacaatatttcagttttctccaaacatatcagattttaaatacgtcgagatcacatttttcttttcttttttgttaaactattttcttccgaaaactaccttagttttttggtgaataaacacatttgagttaacatgtatcttggccaaaaaaaaaaagttaacatgtatcttaaaccctactaattttatgaatacgcgcgatcacatggatccaaaatatggagtgattgagagagaaagataggagacacacttagtgagggagacccaataaggtcgagcttgttgagatgtgggtatagaagaatagtcacactgttgattaaactacattggtgactggtgagtatatgttttaagccctttttctattagaaacaccattcattttcggtgattattatggtagttgatatactactaacatagacaaattggatcggagtgtttttgtatttgcactaagaaaacgaattcatgtatcgctttccagaccatagttgttatatcatgaattggcgtttttagatatagtgaaatctttagacaaaaaaaaaaagatagagtgaaatctaaccgatccaaattaaagtaaccaaaattcaaaacaagagaaaaaacaaaaccaagacttaaatatatatttagaatcttataaattcttgatgtagataatccttaaaaaaaacatgttttgattgatattcttgtttacttttcagtgaaactctatgaacaacaaagataaaagtgaattttatttagctcaagcccaaaaagaactagattcagtttttaattggttcatacacttacttaaataagtaggatttaattaaattcattaaaggaaaattacgtagaaacgataaacataatcttccacatcttgatcataagagtaaattcaaacaagagaatgatataatataagagattaaaccataatttgcctaaaaaggttaccaaaccataaaaataacatgttattacttgcataatcatcaaatagcagataaataataataaaaatgggataattaattacattttctcaaagtagagttttcactcagccttctctgctttggtttccttcttctcttctttcttctcttctttcttctcctctttcttgatctcttctttcttcacctctttcttcttctcctcctttggttttgtatctccaacagcttttggtttgcccggctttggtttcatgaagcagaagcaagagcaacatggacactggaacaagaacttcattttctctctttctctctttctctctcacttatcttcttcttttctctcacacaatctcactcacacataacacatttgcttactaagctttaatgaaagtagagaattgattgggtttgtttttttgggttacttattactgtgcttttttgacatttctctaacaattctgtctttttcttctcgtttaataatgatgctttcatttggtcccactccattgaattttagtatcattctccaaccaattctttttttattttcaatcatgtttctttgtaaaccgcatatacacaaaagacacacgagctttagctcggctggagtgatagtgtactgacggtggccaatttgtttgtgtattataactaaatagataacttccataatagtttttccttacgtattcacaccatctttgaaattatagtttgaactgtcatttagttttaggggagattagcaaatcttatatataatggtctttttaactgtaatgtagcataaattttcgaactgcggatgcatgctttcgtttatccgtttgacattatgtatcagagaatgacaattttgacctaaacggtgcaaccccattagatcacaaacatttttttaatgaaatcgattttgtataacatataaacgatgattttgatagtggttataaaggggatggtaatggaagtacagaataatggagggaactgatactatgtaatgtaatgtatgtcatgtgggaaaacacttggttctaatttacttctttttacgtatattcatgaatcatgcatatttctttggaaaaagtatattcataggattgataataattcgaaaaaggactatattacttttggatctttatgtgtattatcatatggttggattccacttcggtctctttcaaaccaagtggatggccgccctactctgatttatatatcttttttatgaacgattttcatttttttctagtaaattctttgcaatatcttataatatactcaaaagtgcattttcatacaccatttagatttttttcggctttcctcatccagcgaaaagactcatatgggctgggcttagaatatgagtccatattcatcttatcagttgttattttatgatgagtaaataacaggccatccaaacctgaacgttttttcttagattcgattatggtttgagctaattcactcgcacccgatctgaataatccaactttttgggtaaaagtaattgaaattctccatttgactcaagataatttattcgactgaaccatttcttaactattttcaacatttgttgaaggatgaatggttctcaacatttgtttggttatttatatcttggtcagtcgaatgaaaagaccagacaagggtcatctttgtttttgggtttggtatgtcacatgtctattgtagcctatatagatccttgtcttctttgacaacataatacaactctcacaaaagtttaatacacgttttggagagatattatagttgtatctctctacattctttgtactagccaaaccggattatcttagatatgtaagataggtcaattagctacaccaatagtatgacgattacgacaaattaaggtcattaaaatgaactaaactaatcaaagactaataaaaatagtgattgagttgcgatagattcgaggttcgatcttagagaagacttgaaaaccaaacaaagtaggaggccgataggtgtacggttcgatgacttcacgtgatttgcggtgtgtgatcagttgactatacaatacattatcaaaagacatcactccattttcgatgctcccaaacattactttaattcacttaatactatactatatgaaactcatatatatgtacattttttattaacgttgtggtgcactcaccataattttatgttataaactacttcaaatacataattaagtacagtcaagagtctctctccagttttatcctaacattactcagagactattcatagtattagtattaatttgttgttgtatggttgtatcaattctctttcaccaacaaactctcacacatgagaacacacacatcttcactctttgtctctttctcttattcttaaccagttgataaccatggttttgatcccggtttagcaaaccggtttaatctcgaagtcacttccaaaaaaaattaagaggagtgtatttgcaaacaaaaaaagaccaaacaaataagcatatcatcaatgaaaactgtaaaagtcacgtgggacccgtggttatggcttttatggtcaggatttcaggttcaacggttccacatctttcacggcatcggtcccgtgacgtccgcctgaaagtccaaactgaacccacacggctctaaggaacgtcactctccacggtccacgtgcaccgctagtagccatgatgcgtcacaactttcacgagacgtccgatacaaatttcaaaagtctatgtgggttgaaacagtttgcatatgcaagtacttatggtaatatgtaatagtcataaaatatctactcatttctgtttacttgaaaaagtggggttttcagttgacttttttaggtgaaatattgttaaatagtaagattcataattttaattaagcaaatgatgatttactaaagttctacttataaaattatggtccttagtattcacacaaacagatatgaaaacatgttaaatacataaatgtataaaaattaacattttccggaaaaataataaattaaatttccatctcttaattattcaatatgataaccaactatgaattagctacatgattggatcatcgaatttcaacagaactattaatctttatcaaatgtcatatatttgtatgttgtatttgtgcttaaaaggacagaagtaggtattttcaatagagaaagacaagcaaattttgtccaatgttttcttaatgcgataaattttataaaagaaaaaacgaaaagcctttggaaaaagttttgactaaaactacaaacttttcttgactttgtttcaactaaaaaaatcgttgtttcccactaatatgtacaaaaatatagatttgtattgtaatatactgtctacatatactttaaaatcttgaaaaacaattgtgaatatagaattacagtcaaactgttacgtttattaacttgtgagctgcaataaatagttgtgcagaattttgtccacaaaattaaaatagtaatttaataaatttgtagcaaagaaaaaacaaaattaagttaagacacaagacttttgagacctgtccctaaaaaagttaatagtaactctcactgttcttgagaaaacgaaagaactttccttttccgttttttttctttctcaatcttctatcgtcttcttcactgtttcttctttttgatttccaaagttaaaaactttgacaaatttgaatcccaactactctgttttttcacttcacttttttgattggttctgtctcttggtcgacaaagacctgcacttgctaatgagacattaaaaacccttgtaatcaaatcttcgtcattatcgtttcccacagaaaaaaactaaactttcgatgtttcaatggcggctgtgaactcgaaagctcttaactttatgtaggaattggcaaattaaaggttttgattgacgaaattggtgattaattgcttaagctgctggtgcttagaggtaattactttatactctctttgactatctctgtttatgtttttgagttatttgttttgcttaagttacaagtcttcaatagtattttcgagatggtttttgggatgtgagcgtttagtttctgcttttgttttgatactgtttattgggattcgattttcaggaagatacgtgttgctgatttcaatttgcttccacaatgttgcttcaactacaagttgttaaagcttgattctttttgggacatgagcatgtgacttatgaaagttttagtctttatttgtgatttgagctggctagagaagactcttgtctctgtttgatagtagtcatggtgatcattctcctattggtcttctttgttggttcttctgtgagccaaccatgtcatcccaacgacttatctgcgctccgggaattggcaggagcgttgaagaacaagtctgttacagaatcttggttaaatggttcacgttgttgtgaatgggatggtgtgttttgtgaagggagtgatgtttctggtcgagttacaaagttggttttacctgaaaaaggtttggaaggtgtgatttcgaagtctttaggggagttgactgagctgcgagtacttgatctatctcgtaaccagcttaaaggcgaagtaccagcggagatttctaagttagagcagcttcaagttcttgatttgagtcataacctgttatcagggtctgttttgggagtggtttcgggtttaaagctgattcagtcgctgaacatttcgagcaattcgcttagcgggaagttatcggatgttggagtgtttcctggtcttgtgatgcttaatgtaagcaacaatttgtttgagggtgagattcatcctgaactctgtagctcatctggtgggatacaggttcttgatttatcgatgaatcgtttggtggggaatcttgatggcttgtacaactgcagcaaatctattcaacagctccatatcgacagcaacagattgacgggccaacttccggattatctttattcgatccgggagttggagcaactatcactctctggaaactacttatccggagagttaagcaagaacttgagcaatctctctggtctgaagtctctgttgatatcagagaaccggttttcggatgtaattccagatgtttttggtaacctcactcaattggaacacctcgacgtgagctccaacaagttctcgggaaggtttccgccaagtttatcccaatgctcgaagctgcgggttcttgatcttaggaacaactcgttatccggttctatcaatcttaacttcactggatttaccgatctttgcgtgcttgatctcgccagtaatcatttctctggacctcttcctgattcccttggccactgtcccaagatgaagatcttgagtttggcgaaaaacgagtttcgcggcaaaatccctgacaccttcaagaatctgcagtctctcttgttcctgtccttatccaacaacagctttgtggatttttctgagacaatgaatgtgctgcaacattgcagaaacctctccactcttattctctcaaagaacttcatcggcgaggaaataccaaacaacgtcactggtttcgacaacctcgcgattttagcgctaggaaattgcggtcttagaggtcagattccgagctggctattgaactgcaagaagctggaagttcttgatctctcttggaatcacttttacggaactatccctcattggattggtaagatggagagtttgttctacatagacttctcaaacaacactttgaccggagcaatcccggtagccataaccgagctcaagaacctaatccgtctaaacggaaccgcttctcagatgaccgactcttctggaattcctctctacgtaaagcggaacaagagctccaacggtcttccatataaccaagtttcaagattcccgccatctatctatttgaataataaccgtctcaacgggacgatcttgccagagataggacgtttgaaagagcttcacatgctggacttgagcaggaacaacttcactgggacgatacctgattccatttcagggcttgacaatttggaggttcttgatttatcttacaatcatctctacggttcgattcctctgtcttttcagagtctcactttcttgtcgaggttcagcgtagcgtataaccgtctcactggcgcgattccatctggaggtcagttctacagcttcccgcactcaagcttcgaaggaaacttaggactttgtcgcgcgattgattctccttgcgatgttctgatgagtaacatgttgaatccgaaaggttcttcgcgtaggaataacaatggcggaaagttcgggagaagcagcattgttgtacttaccataagtctagccattgggattactctacttctttctgttattctgttaaggatttcaagaaaagatgtggatgatcgaatcaatgacgttgatgaggagactatcagcggggtttcgaaagctctcgggccatcaaagattgtgcttttccatagctgtggatgtaaagatctaagtgttgaggagttgttgaagtctacgaacaatttcagccaggctaacattataggatgtggcggatttggtcttgtgtacaaagctaattttcccgatggctcgaaagcagcagtcaagaggctttctggtgactgtgggcagatggaacgtgaattccaagcggaagttgaagcattgtctcgagcggaacataagaatctagtctctcttcaaggctactgcaagcatggaaacgataggctgcttatttactcgtttatggagaatggaagtttggattattggctgcatgagcgggtagatgggaatatgactcttatatgggatgtgagattgaagatagctcaaggcgcagcgcgagggcttgcttacttgcataaagtctgtgaacctaatgttatacatagggatgtgaagtctagtaacattttgttagatgagaagtttgaagctcatcttgcggattttgggttagcgaggttgcttaggccgtatgatactcacgtgacgactgatttggttgggacattgggttatattcctcctgagtatagccagtctttgattgcaacatgtagaggagacgtttacagttttggcgttgtgcttttggagctagttacgggtcgtagacctgtagaagtctgtaaagggaaaagttgcagagatttggtgtctcgggtgtttcaaatgaaggctgagaagcgtgaagctgagcttatcgatacaacaatacgcgaaaatgtgaacgagagaacggttttggagatgttggagattgcttgcaaatgcattgatcatgagcctagaaggagaccactgatcgaagaagtcgttacttggcttgaagatcttcctatggagtctgttcaacaacaatgaaaaactcctctataagtagctttcttagtttcttgtgaatgaaagagtgtagatcactggttttaatctaagaaacttggggtatacatgtaaagcaaagaacttttttttttgactcaacatagtgatcagacttttctcatgtcacagtccttatgacacttgggaatcaacctgacaagccacctgttccttctctggacactaacttgatcctgaggtacttgtgtgagagtatatgtaatgtaacagagtcgtgttctgatgtctgtaacaaaaaatggcggctttgtttaatgttaagagaggaatcataaacatctacagaacatcgccgagacagcacaacaacaacactcttcagttctctcgttgcttcacctctcaagtaagaggcgaaaatattcttacttgctctgctttttctgattcagttgttgtattgtaacctaatcagctaactcagaagagcttgaacactctctccagggaagcaatggaggtggagagtcatctgcgagtatgaacgaggcgagacaagaggcgatgggaacaagcacagatgctaaggcacctgatgtttcactcagctatgcagcggatactgcgaaagaagggttaaaacaagccatggataaagccaagaaaaagagcggagacgctgccacggaggaggcagcaacggttgcaggcggcgaggacgagagtgaagagaatgtgacagtgggtgagataggaactcttaaagggaaaaatcaatcttcaagctgaaaaatatgtctctactctgtatgttaggacttaaaagccaaatctataacgtgtttttaaagtatcttcaaatgttaaaagagtgttgacataaaaggagaaacaatcagacaatatggtacaataacaacaacaacaacaagaaggaagaaacaacgaacagagagtttcatgtatttataacaagcataagctaataactagcatcgagagcttttagtttaatctgtccttaaacctgaatcttgaacatgtcaatcacctcaaaaacgtctccataacgtcagggaacaaacccgagttgcttccagagttattgttcctaaactccagtggttgttgctgatcaagcgaggttgatgatgacgaagaatccattcgagctggcaatgtatagcttcttctaaacttgttaggatgatgaccttcaaggttcaagaactcgttctggttttcgacattcatcgggttctgctcctggttaaacaaaagcctactagcttcatctgcacgtccagtcaacgcattgaacaacgacaaaccattaggccatttgatgtcgtcttcatgctcttccattggaggaagcatctgaggaggaacattgttatcttgaaggaaaccgaatctagctgaagcaggtagttggttctgaaagctaggggaaggtaacaaaggtgagtgtgatccccagttaaaaccttgagactgaggtatctggtttggaaccgtggaagaagatggagtcgcggttcggtttgaagagaagagctgtgagaggtaaaaacctgatctgtaaccaattgattcaaacatttgcctcatccttagcacaaaatgaagatcttctggaatctgaagaaacaaaacaacgactgatcacacacacaccgcataaccgagtcgaaaaagcgataatatgaaaccgtaagagaaagaactcacaatcttgcaagaacctagctgtaacagaccatgtccagcttgaatcacagcaattgtctggtcaaataaaacactgttaaggtaagatcaagaacagtatataaccaaaagaagtttgattatatttacctgaatgcctgattcgaattggtcggtccattctggaggaagctgcaataaatttttgacttttaagtgtaaggtagccatcaggatcataaatttctacatctaaccaaaaaataaaatttaagattgaaaacgtacagcatcaaaagaactttgccagtaattagcaagatttggttcagattcagatggttctttgaaaacccacttgtgacatttatcagaagcaactttacccatcaatctgcagatatatcacatgaacatcacaagatcataataacttgtgttgtaaataattatatctttaatcataagttaagtgattagggtgtgtttatataatctaattatcttttggtccataattacttatatataacacctacccagtacccacccttctccataattatataactgaatggacatcttgctgaaagcttttctgacaagatcttcttcatgaccttcaatgtctgtttccagacaaagatcttcacttcttcctccaccacaaaacccatcttcccacatcaacatcctttttaattaatcatcacagacaaaaacagtttcagaaagtctaaaacagagctgctctgtttctgtctctcttgtactaaaaagcagaggaaggatataaagacaccaaaaaaaactcacaagctgccactttcatcaccaatcttgcagccattaccaccacggaccctcctgaaatcagaaagtggaacataaaaaaggtaaagaaacagagaaagattgatgaacagagagagaaagagagagagagaagtgtgtacggtcggggacgaatggtccagaagacagagtaaatccagtcggagttaaaacagacgcttctaagtgcttcatgaagtgccatcattcctacagcatctttgcttctatctcctcctccaactcctgagcccaccatgtctctctctttgtctttctctgtctctcttacttcagagttctccaaagacacagtttcttttgtcaagaatcatcacaagtctttagctttcttcagacagagtctcttttgtttccaaatattttaaagaaaaaaaaataagttatcttttctctgcgagagcaaaagagttttgtcaaccacagactcgctcttactttctctcactactgttctttttcttttttcttctgagtcttttttagtgaaacagaattatgttaatcgaaatcccggcgacaagttagggtttagccgtttagggatatatatatttatatataatattatttatttgtttggaatatccgtaaatattatttcttttaaggtttatcacgattgtcataatgtcatctccacttatcgatttgcaattcataaatatttggtccacctattagtactgaaatattttgtcttaaattttaatcttcttttatcacgttttcctatttttcaatatttatacttaatgaagaaattatttatccgaaaatatttgtatgactattattatttttttttttaataaatttttggtcgttggatattttttgattattttaattatcgttggttatgcgagtttaaatcataatttaaatttgatatagtaattcactattaaaattattatatgatatattaggattttaaaaagtattttgattttcaaaattgttcattttacaaaaaaaaagatttaactagtttgaaatttcgggttttgttaaaagaaaaatatgttccatttaaaacatgaataaactttgtcacaattgcatatttgtcaattgaaaaataaaaatagaaaatagaaaatttgagacagtggggacaagtattatcttctttctggctagcaagacaaatgtaggtgttgagggatgacaaaagtggttctgtttttgttttcccctctcatcactcactaccatctctcttttagattattattttacccttcatctcccacataattacatacccgagaatagtttgtttttgtttttaatggaccatttcatctcctaagtgtggaccatttcatctccatctcacaacggttcatgccaaagtttaagtttaagtttaaaagagcaaaaaagatagaaaaatctaaatttggttttgtgtatgcttcgtagcttaatgaacacattacggtacacattattaaaatccggcccaaaactagttccatttacgattttccgatcaatcatgttacgttgttttagttataacttaaactttagaaggatattcgagatgacatgaagatgacattctaaagaactcttgattatatgttcttttagtagattacgtacattttattgggacatgcatggaagtccaggttggcctcctgttgagaggaggtatatccaacctagatggaatgtggtcacctcacacttacttaaaacatgctttgtgttattcaagagaaaacatatgaaacatctccaaattttcaaaattgggtaaactccgcatgaataaagataagtaagtgaaacatcgtaaaacattttaactattaatcttgtttgacaaatttataaggatttcccgttatctttgtataattaagcagttaaaaataagtatttaaaaactcatggcacagttttttttttgtttgctccatggaacatgaagttagatataagtaaaatatggcagattaagtgtatatatgtactgtattgtattttgaagatcatgtaaaaaaatattaatagaaaaattaaaagttttgaagaaaataagaaaatctagtggagctttagaactagataaaaccagaaattgagaaagcataaaagactttaagcgagagctagaaaggcacgcgaatgtcacggtcgatggtggaaccagatgtcagattgcatatttgatatttattcataatttaccaaataatttcgaactcaggtaaattagtaaattgttttcaaattaggtgattaaaggaagttaggaagttactgtgtcgtgtttaatgtcttgctcgaatcttttcgtagcttgtttttttcaacgtttccaagtcttttttatgtctagtcatttgatatgtttttaacaatgacccatcattatccttttaaaaatctatattataattttcgcaaatggtaactacaatataattttcgtaaaaaaatataaagatattgaatttttactctcaacaacatttttctacaagacgacgcatgtattaaaatttaaaacacaacactatgtactagcttagcttcgtagtttttaacttttaaaaacttcatatctcaaaaatatgatttagctttagcatagttacatcgttttgaaaagaaaagagtgtaacaaaacgatgtataaaactagtaatgtagtatcaataagcgctaagaaaatataaacaagtttccattgaaaaaacaaatacaataatatggatatttacttgatgcaataaaaaaaaaaaaagtggaggtgtaatctaatattaattgtaccaacatttaaatccgcataattgatacattattaaaaagaatatgtggatattagttttaacttaagaaaagatatggtcaatactgaccatttgactatgtaaacaaagaacaaatactatactgatggagtatcataaaaagttacacagtccaactcttttaaaaaaggagaatattgctatagacattagacaatatagagataaagtttttatcaacttgaataatagaccacctaatcactgagatctgtctaaaaataattaattagaagaatgtactaatttaatcagattattcagaaaagataaggagaatataggagggggtcacgtgagcacgtgtcatgagcagtgagtcggtgcgtcactagtcgtgagggaaagcgaaacgcacgaatcgcgggactgtgctttctccgcctgcgacactcttcgcgtcctctctcgtctcatccacgcgccatctcctgcacacactcgtacgttaaataattttattgtgtactgaaaaaagttcgaagcctattattaaaccttggttaagttcatacgagctagtaaaccggtttagtaggaatattttcatagcaataacacaaaaatgtttcgtcgatttggggtaaagaatttacgttcgtgttttcacatagataatatatcaaagagtgagtttgatatggctacgtaaaatagactagaattctatgttaataacataaaatatgtatatttttgttacatagttcaaaagaccaaatcatacatctaacatcattattatctaagtaaacaatagtaaacctaccttccaacgccaaaactacttctactatagtgcgttatcaaataatttgcgttacatacaaaatgaaagcttagaggaaatgaaatgaaattaagaatatttgatttccccttaatcagacagacaaagagaacgttggcgcgtggataccataaagcgtgtggaagaggaaactgaaaacattatttttttgtttttgttttggagaatcatcaaatcaactagggctcccgcattgaccggttcaatcctggatggatctaacctctcttttacgacctagggtgggtcctgattcgtatcttattgtgtgttttctgcatatatttgtttatttagtctcaaagttgataaagcaagtcttaattcttagacggtcagactcagacagagacctcagtcgtaaaaaaacaattcttagacctaaatatataattaatcaatagtgtaatgacccattgtgaactaattcgctgcatctaactgtgagtacctattattgttttataaagccgcaataatcgtaaatatcacttttgacttcaattttcaattttacaaattatcctttattctagattacgaactttgatttgttttcaaattgaatacttttcctaaagaaaaaagcaagctaggaagaagcagtaactatatagagaggtaacctagtgatagtgtttcaataatcaacaatgaacgcatatttgtgtttcaagtacacctactactactggtcacattttgtgttaccaatgtagtttcttttgtaaaagtgaggaaatagtgaacaaattaaagtattcaatattataacaaatggttgacgtgtaaattagatgcaaaatggatacgtaaacagcaagaggagacatggttttcagagacgctttgtgtttattaccaacaaggcaacaacgcagctttcttaggtctataagcatgatgtgagttcttttagctttttgcaacacttttaaatagaaaaacaacaaatttgtgagtttctaatcaaataaaaaacagttctttagttttttttttttttttttaattgattctacataaactactatttcctaatcctttagatcagcatggaatattttctatatgttgttacacattgcgatggaagttagaggatgagataggcaaaaatggagagagtcactgtcacgtgcggtttttggggtggttaagagtagagcgtgcaatatatctatagtgggaaccaaacttactaaagtacatacgaagaccacttccaagttccaccttgtgttcttctgtcttcgacgaaaaaaaaatctacagtactttggcttcttttcatttttgtttgcagcttttttttttctttctcatattccaaatttgtaatgaaaattaaactaatttcaatgtctacaacaactacgtgaaacaacaacaatttctgtattaacctttaaatgttagtttactttaaatttttcttatggctcagcctgtgatggataactgaatcaaacaaatggcgtctgggtttaagaagatctgttttggctatgttggacgaaacaagtgaacttttaggatcaacttccgtttatatacggagcttatatcgagcaataagataagtgggctttttatgtaatttaatgggctatcgtccatatattcactaatacccatgcccagtacccatgtatgcgtttcatataagctcctaatttctcccacatcgctcaaatctaaacaaatcttgttgtatatataacactgagggagcaccattggtcacgaccttacttgaacaggatctgttctataggctcgtacctctgtttccttgatttctcaagagacaggcccttaaccctggttgatgaaccatgaccgtgcggctagagcgtgattgacggctacgatcgtcctcggacgcatccggtgctgtagaggatcgttactcggctcggtttctaccttgccggggtggtcgcacggcggtctgacaggtccctttccttttttcttttttttgccataaacttaaatttgtatatcgatcattgtagatattgaaaacctagaacaaaccaacatccatgtgaatgtctttcatgactgatttagagataattcttgaattttggaactagaatctataatgagcctaaattaaaacattgtgaatggtcccatagatacttcacttgtgtgtaggatcggctctcttgatgcgagaatattcacttttgagaagaggagggaagaacggatttagtggaaatatttgtgggcaacactttgcatctattgccgacaacgtcgtgcaacgcattaattggtccaacattatcaaactttcttgtaaaaactgatttatagatttcagttacgcaaccttaaacattgacaagtgatgacaaacattttttgagatcgatgggataaccagggatgacagggagttgaggtgtcgtgtgtgcgggtgcacttgagatgatgcgagagcaaccatccttgacaagaggagggaaaaatggattcagtggaaacatttttggccaacagtttgcatccacttccgtaaacgctttgcagctttcaaacttagcggttaaaacatattttaaaatttcgatattgcaaccttgaacattgaagagcgatgaccaacattttgtgagatcaactagagaaccaggaatggaaggaaatcgagttgtcacaagcccctcggctgtcccctccacatccatttgttgcaaatgaaacttgttttgagatggtagaatttttatgttggtcaaaggctatgaaccatgaacacaaattaaggctaatttccccatagggtatactagacagcaataaccatgcagcaaaattaccgagtcgtatgataatcaattcatcagtatcatagtcatcgtcttcaaagattgtattttcttccttttcaaaataaattgtcttctttatccattaagcatcatcatcgaacggaccttatgttcatatctactacaatttcgatttataatgaaactaggtgacgctgtttttttcattaataatacctcgtttttttctttatccactcgttacgttcaatctcgatttctttaattctctccattcactagttgattctttctcatacaaaatacgaacaaccatgattctggatagaaactcccatgctcaataaacctaaaacataaaccaacgaatttaaaatcatcagcaaaacaatattgatatatagtaaaataagaagaactcacggaaaattaattctcgaaatcgatatcatctcgaacaaaaaaaaatagttcgattcaaaggaaccgaaataattaaaaaaatccaacaactgtaatgatttatttagcggctatggcctaagaagtatgaatacatatgatatttttatatttaatgtttagggtaagccgtcataattatcttccaaaattttgactttttaaattagaaaagtttcaaataaaaatattcaccaaataatttaagttttatctctaaattttaaaaatagaggaaacgcaaaattccatattctatatcaaatacttatgattttatcattatctcattacaaaatcgaaaccgaaattcatacacttttcattaaggatagcttcgagttttgacgtcaaatttcaacaaaagagtttcattgccccttcttttaacgtggtacaaacttacttctcatataatgttcataaatatatgtacatactttgttaaaatactataaaaattgtagtattttattttttaaaatgttaattagtattaatactttagtatatattccataatttatcatattttggtaagattcttcttagaaagaaaaaggccaatgaggaaacaaaaaagtcaacaacaaaaaagaatgtaaggtaagttttggtcatggaaagaattcactactgtaaatcaaatatttaattggaaaccaattataaaaaggaaatattggaccgaaaaataaataaaaggtaatataaattttccaaataataatcctacgtggactattccaccgcctcaatagagtataaatataagaatctctgaatttacacattacaaatctctttggtctacccacatcatggaagctactcctgtattcaactaccatattgatgtcaatcctgaacgcaaaaagattggcacaatccaagtctatgtaagtttcgtcggatcagccaacatgtcgccgatactaacccggtctaacttctcatgttcattacctgccaatgaattaactgacgacgaagattctccccacaaacaaagactctattacttcttaacagattcagcagttgattcacaagatgcttacacgttaatactaaaactcactcaacttgcacgtgatttaacttctaattcgtttgaatactgtccacgttatgctttgtcagtgtggttgactcttgatgtggctcctttgaatgaatatgagaggaatagcgagtatagacccgcgagcaatttaagggtcggagccttgagcaggagaatatacaagaggaaacaaaagaccagctctattgctaacaagagcacaagatacatgagaaaacgagagacctattctagtggtgagtacaaatgcgcaatttgttttcaggagtttaaaaccggacgagaagttgctactttactttgtggtcatgaatttgacaataagtgtattatggaatggtttaaggttcgctacaattgtccattgtgtcgcttcgaattaccacgtgaagatgatcatattcctcaaagaactacagatttataactaacatacattaacacttaagcgctttatttggttttatttaattttaggtatagagatcaatattatacggtttttgaaatgagtaagacacttatatctttcgtcataactgataacttagtggtttaatttgtgctagtgttgtcgttgtgtcaccatccatattcaatcatgcataatgcacgcatgttgacaaataaaatatttatatctattattacttttccaatgatttcgagagcttcatctcttgattttagtatattttcttatgttttccgtgtatcgactttagcttttcaatttgttttctacggacattgtattatacaatgaaaataatagataagttcacaaacgttatgttggttacgtctacaaccaaaagaaaacaatgttatttgtaaaggttggaaatttgagtgttctacgagaaaacaaaagtatatatatgacgcaacctagatttaggataaccactcaatatttgtatttaattttattcatagtaataatatatttaaagcgtatcctattttgataaaacttatctttcaggattttcatggttttcagattaaatattaaatatatactttatatttaaggtttcttttttttattatgtatatctttgtataattaattaaaccctaagcttttgtgtgtctatttagacgaaaatatctttctatctacatttttggaaatttcctcttaatttttctctatttgtgacttgacagcgtttaaattcgataattaggtgaaaaaaaaagaagaaaatgttagcttggaatttcatcaaacactttccgtgcaagaatctctcccgccatatcctcagagacagcagagtcagacctctctgcttcttcacttcttctactcctccatcctccttttcaatctttgcgtctctctctacttcttcttcttcctcctcctcatcttcgtgcttcactgatgagtctttcgctgcaccttacctctcagttcgtatccactgtccaaaacatgccctcgtatgtgtatctctcccattgatctcttttaaggatatgagactgcgatttgactctttgcttgttgggtttttgttaggatccattctcggaggcacttttgtgttttggagcaagctctgtagctgtagatgaagccatcgaagaagccgaccaagatgagacttctcttgcttcaaaagaggtgaaaaatctatgctttgatcgttttttgttcagctccatttccagaaagcaccaatcttttgtatgattgaacaatgttagagcaaattgatgcataaaaggaacgattttgctcttaggaagcatcttaagggttgatctgtctatattcttgtagtctcatcaatcatgcttgtgctctttggtattactctctgcagatatgtatagaatcaatatttccagtgcatgaagaggtgaaaatgtgcatttcacaagctgcaaattccataggcttgaaagagatacccaaattcaaagttgaaatgggagatgaacttgactggattaccaaaaaccaggtgagttctgagtttaacaaagaaaggatcatcatttcagtaattgctttcatttaagaaaacttgcatagttatgctcaaaactcagcgcaaatactatatttgttttgcggcaatgtcacttgaagctaatatcttttgaatcatattttgcaggatttgtttcagcctgttgaaatcgccgagagactttggattgtacctgagtggacatctcctcctgtatgtgtataaatcaatattctttaacaaaaccattgcactcatttggattcttgttactcttttgccttagttgacataacgaagagcggtcttagggtactgaatttgcagaatatgaatcaccctctttctgtgtcagcttatatagagggatatagaaagttattatgtgtggttttaaagtactctttcactatcctttgcaaggtcgctgaagcggtaaacataattctgaaccctggatttgcgtttgggactggagaacatcctactactaagctgtgtctattgcttctacaaagtttgataaaaggcggagaagctttcctcgactatggtaccggttcaggaatacttgcaattgcagccctcaaggtaaaaatctcacgcctttgatctttcaaaaaccaatcattacaacataaatcatcttatttaaatctttgtgcatcgctcatttaaatttgcagtttggtgctgcatcatccgttggtgttgatattgatcctctagcaataaactctgcaattcataatgcagctctgaacaacattccgttggagaaactggagctgcaccttgcacctattgagaatagctcttctggaagagaaataccattgcaaaaggaacagtttgatgtagtcattgcaaacatactcttgaacccggttatgaatctggcggatcatatcctttcattcgtgaaacctggggcaaccattggcatttctggtatcttatctgaacaggtaaataaagagtactgtattgttataacaagcaagcaagctacctgcaagtcataggaattgaaaattatactgtaaactgactaattcaatgctctttttgcagcttccaaatgtaagagaacggtactctcccttcttggaggacatttctgtagccacaataggtgattgggtatgcatgagtggtaccaagaaagaggagtttattgataactaatcatttcttcagtgttatatcagaaaacagacaataacataaaaagcactagtaaagcaaaggtaagaacaaaagtgtctaatcatcagacattaagaacatatcagccttaatggagttgtgtaagaggttacaactacacatgatatgaaacttaatgaactcttcattgttgtattcaaagtttcaagtctatgataataaaatttgtgttgtcaccaactctggttataaccattgtatttaaattctacagaaacaaaaaatctgtcaacatagactatcttcatgtcgtcgcttcacctgttgagttttcttctacccaaagaagaggccttcttaggaatgtagaccttgtaactcacctgaacacaaatttcaaaagaaaaatgttaggactcaaatagacatacctggaaactacaaggaaatcaatatttcaagaattgcagaaactttacctgaaccatttctccacccctcatcacagtcatcgttttctgttcgtactgtgactcatcttttgtttcatcaattgttttctgttcagactgagaccctcctttgacttcatctacctcctcagtgtcagcatgagaagaagactctgcgttgagcgtagaactaacttttgttggttctatgtgttcaccttcattctttgttaccaaagctagagtactttctaaacaattcttgtcaacggtactgccatcaatgctctctgcttcagcatcttggctaccactagcttctttcttgctagctagatttaaactatctttactcaataccggtctaaccaactttcgtttggttgtacaagagctaagaccagaactaactttaaccttggcagtatcaccagactgctgatcttgttgagaggcagaattagccaatgctgttccagattccttaacattaataacatgtaaaatcttttctgaattctcaagatctttgcttacagcagaatcacaaagtttctgctccatgagatcatggtcttgtgactcaactttttcagattcaatttgcataggttctccttctgaaacagaagacacctcttttttagctattccactcttttgggtcactccacgaaatcttttaagattctccagagctcttttctttagaatggcttccaaatcatcatctttcaagctattgtctgtatgagaaactttgctagtttcagatttattatattccccaaatccgttgtcatcagcacgaattctagaataagagtcaatagattcaccatccatctcatcagagtcctcactatatcctaactctctattgccaccaccgcgtgtcatatagacatcacggtcatcttcttcctttctctcaccattcccataattatacgatacaacaacaatcgatttaagccttctaggattcttctcaggtataacttcatcttccccttgccagcattcatcaggttcttcactctctccttccaactcatctctacttctactccgggaatccttaaccttaccaagtcttcttcctctatccctagaccatctcttcccatcatcactctcactaccgtcattatcactctgctcactacttgtagagcttgaactcaaatctctcttacgtctctttcttgacacaactttcttcttcttcttccctacgttttcatccttcctcttagatcttttctttttctttaaaagacgatcatcatcactatcatcatcactctcactactagagtacctcttccgtgacctcttcttactcaatttagatctacgcttcttctttctcctgtaatcatcttctgaactagaatacaaagaggaatctgaaccacttgattcactctcatctttaatccgacgaatcttctttgatttgtttctcttactcttcttcttcttcaccgatcgcaactgcaacattgtaacatgattcatcaaaccaacaatccctaattaaagatcaatactttaacacaaatcaaatcaaaagtttcgatttttaatctcatggatctaatttcaatacatgagaggataacgggtcagtcataaatccattcaatcgctagaaaaatctcatctttacgaagccataagaaacagagagaaagagagagagtaccttattagacgaatctttgattatctttgaggacgatgaagatttgcccattgtactctcgagtctcgatggtaacgctttggctttctcctaatctctattactctgcaaaacaaaaaagaattgaggaatcgttaaggtttgagagagaacacgaacagttttgtcttctttaactaatgatggctttgtccctctttacacatgttaatggctattgaacttataaataaataaattttatcaatatgggaatggaaaaaaaaaaaaaggaaatgtttgatttggttggaattggatgacaaaccctaacttttttaagaaagtttcctaattagtacctaacagaagaggacttttcctttttttcttaaggatgttgttagtaaatactttaagaaatttggtaaaaaatctcaaagacttttatgaggttttatgttttctcttaagaatagtttcctacaatttactggggaaaaaaaaaaaaactatacaatcgacctatcttgagatcgccgtttcaatagtcttttctaagaaaatcgaataaataaattctgatctaaattcaaacctaatggtaataaaaacacatagtctgctaattcatctgctagaaaattagtttctgtttttgtatacacgtaaaaaatatggagtatcatccaatcagtttatgagatttattatgagatttattggttagtaaaacttttcatttagtgagaacccaaatacgaatcatgtgttatgagttattcgtttaatgagtttttattggatttaaaataaagattcgaattcacataaaatttctacgagatataaaaacaacacaacaagtttgatacacatctctataaacatgctacagatttctacactaacaagctctgctcttgacaaacacacagaaaaaaggtaacatttaagaatcttctgtgtcgcttgtgctaccatgagtatcgatataaacctcagttgataaatcgatttcatccacgatccttcctctgtaaaaaaaaggattgcaataaaccagagtttatggctgaaaccggaccagtgaactttagaagagaagatgttattacctttccagaacaaatttgccttctttatacttctgagctttctcgtgcgctgattcctacaaacaagaaagcaacaaaggtgacatcagaaactgctctaatgaatcgtgcaagtgagaccatagagagaggtgagatttacgtatttccagccaacattctgtccacaacagcagcagaaaatgtcagctacggtgtgcataccggaaagcatcagtctttcctctagaggacccatacttatgttcaccctaaaattcaaatttaacattggaatcagctatactacatatccaacctgattgcaaaaacctcgcattagagaaacaagaacactgtatcgatgcagagaaactgaagcaaaggcagagaaaacactagtttggagtaatcagcaagattcagaagatgataaaagctaaaagacagtttccatctacaagttatatatacagaaactgatagcaacagaatactagaatctagcattgtatactgcttgacattgaagaaacagaacaagtccataacaagtacatcgagtaagtttatacttacgaacggttgaagaggtaagcctttcctctacggcaatgaaacgactgaggaaaaaagataagtcagtaaggtttacactctatatataaagaaaaactactgtcaacattaagcaaagcttaaaaaacattatactataatcttaatttgcctcaatttctcatatctcaattataaaactttcatctactaacacaagagttttaagtagaagtaactcttaagtacaagttcagcttaaatataagattcttctctcaagtcagaccctttattcaggtacattaattccccaatctctatccgttaaacccatatgaaaaacactaaacttgagaatttctatgtaatatacatcaattcccaaaaattcaacaagcagtttcaacatcagcagcattatcttcacaatcacaagttttctcaatggtttttatataattgggaagaaatgagaaccaacactagctaaaccaagcaaccttgtaaagggtcctacataaaattctacaattatgaatcgaactaacatcctcagagagagatgtgaaaaaatatgagaacttgggaatagctattaagttaaaggaggaaactttaagatacccgagagacaagatcatcgggaagagcgagatgggttctgcagaacctgcatctgtaagatcttccttcaagctccaccgtgaatatccttcccatttcttcttcactgttctatctctctattctctctgtttctttctttacgaactaataagaggccgtataagtgatatgttgggccttaactgggcccatttcaaaactggtcaccaagaaaagtcaacaaaagcaactaatgattgttttttgatatccctttcacaagtatatattatctgatgatgttcccaatagaaacgtttgcttaaatttgcatctgaaaaatatactacaaattttgaagaagttttattatttcattcatctcaaagaatgaaaagtgaattgactaagattttttatatttttcaaactattgataagaatgatgtaaattattgatttggaaactctagtttaaataataaaatatatgattagtgctgataatttaaatatatatatttttatagatggttcagatatagtgaagatgattttttcttcattagaatggtcggattttttgcatattaaaaagatttttagattgatagcgcaaataccaaagcagataatttaatactaaattttttttaccatattgtatcatatcatttatataaataatattcatcagaagaagaaaaaagaaagaaatttaatcatgttgagttgtggtataaccttatcgttttccttttgacgtcgtctataaatttttatctactatggtaagctaaaatataatatgccatcaaacccatcaatctttttgcttactttatacattcatgtatcacctaaaactaaaattagaggaaaatttgttcatctaatacatctaaattactcaaaattttatgagacaaatcatttaagtattactatataaaaccaagtacatgaatgtatcgtagattcagaccattcatcacgacccatatccctatgctcaccagcagctgtctttcttcctgaaaacgtccaagccctaacttttttccattttccttccaatctcaattcactttctcttttccaaattaaatttttcttgtttcttcttagttttcttttttatgttttaccctgaaactttaaatacatgaattatcgaatgatatatcgtccaagaccaagttccgatcccgtacgacgcgtggattgctatttccatgcaccaagcctactctctccactcattagtacgtataaccacattgcatgcatgctcgtatcacgtgccgttacctcgccggccatgtccatcaacggttatgaatctgccatttggcacaacctggagggttcaatactgttgggaccacgaccatcatcatcgtcggagtttgatgatgttttttaatattttttcactctcaggttttgtcatttgctgcgaaacatgcatattgccatgtacttgtatttgaatacttagggttcttgtaataattgctcgatataaatagaaatttagagaatattcttgctgggaagattacaaatacttgaaattagtttcagtccgacaaagaaaacaacccttatttttacctctttatgtagctaaagcagtatttctgcaattttgaaaatagtataggacactcaaatgcttaattttatatattcatttgaaagtgtacatgtatgtgtgtttaaaaaaaaatcgttggcacatcatttgaatgcaattgatttatatgcgaaattttgatttagatttagttggcataatttttcttttcctcttcacaaactttccagctgttttaatcacatgataattgttgggcgtaatcggtgtgggcgtaatgacgtacaaaatcagacatttgtttttggggcaaaaaatcagacatcttttagaaaagcaagtaaaatttaaatgttgtagttattgaagctgataataataataaaatatagtaacttttggtttaagatttttattttttaagtcaggccagctgaattttctgcttttttatatatacatagtgtgataaaattagtcagttcttatcatcacttagctgttcttttgtgtaaatagctgggttttttcttatatatatatatatatatatgttggtcaatgttttttgaaccaataccatttgccttagtttgttttgtgattgcaaatgtaaccaatgaaacccaaaataataagcatacaaatgtgtacatatattcctttagctaaaacatcatgaaattttgccatttagcaagacgtatatgtgagtctgtgaatttgtcttatgactaggtagtataggttggtgatgcaacaagagcaataattgatgatggtaatgatgatgatgatgatgatggttgtgttacacacatacatatatcatactcctactagtatacacacgtgaaatgaaaacacatatataatggtaataaacagaggtattattaattatgtctctttctaaaaatagaaatgtgaaagccatccttctgaaagtgaggtggactgttgtacaagatctgaatttgggagtggtccgttcgtcagcatgcgcatcatattcatcatccccgtttcaaaatccttaatttcaaaactacttcttttctttggtgggtttacaatgcattaagttaatcaaaattagtatgtaaattattttcagtaactaccatgtacatgcatgttatcttaatcaattaagccaaacgcaaattgttgtgtttagtctcatatgtgtacgattgtagcaagaagatacacctaactgaaaatggtgttcatagactgattaatccactgaattatgagtacttactttaaaagcatgaaactttcttgaaatattttggcagttacacatgtcaaccttaattagctagaattaataaacaaaaactacatgcatgttttacatttgagcatcttcaattgatgaagaaattaaataattagccatgttatgtaattacggaaatcatctaaccgaagattcggaacggttgaattccggaaacatatatataaccgccatatcaaattgtattaacaagaagaaaactaaggtatctagaagcgaccgaagaaattcattttgtcggtaatatactgtatgattgtattgataaccaaggacacatgtcaaatatcatgagaaatataaaacatgaaaaagccatgaaattaacataatgtcaaacattacaaaaacgagcatagcttatacatatgcacgttcatagtctagaaaacattttccttgcatattacctcctaattaacacaaccggataaacttaaaactagagaattaagcggaacatcaagctaagtgcaatattaagctcctcggtacacacatttcataataccataatcatcctagaaatacataaataaaaccctaacgggaacaattataagtcacctcttttgtgatcagtagttccaaatacagtcaagtccagcatgaagcacaccgacctttgactcattctcttcggcagtcgccggtagccagtaattcatcccggagacgcctccgccgccttggaaagaaggcagattaacggcggaggtcatagtcgatgcagaagacgatccaaagtaaggaaattgattgaagttttcttggaacgatctgaagttagattgagtcgagacgtttctagaaacgaaacgaggaaaagggtcaaagtcaaaccctagcggcggtggaagacggctgaatgagttaacgtctaagcccaaggccgtagtagtagtagggacagtggagaaacaggacacgtgctcggttattgcgctggctgtgacggttgtgttggtgctacggctgtcgtaggagcaactgctgtcggtgtagccgagggtagtggtcggatccaggagaggtgggagtgagacggaggaaggagagcttggttgttcttgatagtttcttgagattgttgagggtactttcgtctttttagatggaccagtaccgctgcttacgctcacagttgctcctcctcctcctcctccttcggagacggctccggtgctagctaaagtggttttctggaaaaccctagagatcacccattcatcctgaaggaataaattagagttttgaaaagtcaaatattttatataatatatgtttgatgagaaagtcaatgttagatcttggaaataaaagagagtgaagattaagaaaaaccatagagtaaaagcgtgcacagagggaatgtacattggacactacaagtctacaatggatatggaacactaattaagtaaaattaatttaattaaatttctttttaatatatctaggtcagaaaaaaatcctgaagatttgcattggttctggttttttgcattaagctttccaaaagtaggatgtattaatattttattttatcagagctattgaatgttttcttactttaggaaaacaccattatgattgaaatcccaatacataaaaacagcagatcttttctatttcatgttccataatgctctcagataaccacagtaaagaaccatgccttttcagccatcaaaattaaatgcaataaagcaaaagagaaaaaaatcaacgtcaccgactatgtcacactctcgaattttttttccaaataatagattgtaaatttattaatcaaagaaaattaaggctttactttatcaacaaaataactaatgaaaggttaaatcgaagtaccttggagcttcttgagatgaaatggtaagagaatttgccttcaagacgatattcatgcataacccaattactcttctctcctttcggagctcttcctttgtaaaagacaagagtcttcttcatcccaacaagtgcacaagtctttgaactaaagatctctctgtcttttccggtagctttccagtaaccagcctcagttgctctgttagttctcagtcccgtcggatacttccggtcacggaggctaaagaagtaccattctttctctcccatcttagctctccctaagtaacattgagagtaaagatttcagaaaccttaattacaaaagaactacaagtaagttagttttgtattttcttaccgggaagttgccaaggctcacacttgttgagatcaacttctgcgatggcacggcttgagaagcaaccgtcgaggactttgcggagaaggtaatgagtgatgagctcttcgtccgtgggatgaaacctgaaacccggtggaagatattggctgtctccgccatggtcgtagtggtaatacggaatgtccattaagaagaaagatctaaagcttttgtttgagagagaaaaaaccctaaggagactcaaatgttttgaagaagaagataaataggttaatataatggatggttcttgagtaaggggcgtggtaataatgtggatggatattattttttggttttattagtttattttttttatacattgggatttggtaaatctaaaacggcgaaatagagggaagctttttttttggggtagtgaaagtaaaataattattaaaagattaaaaaccagaaagtcgtagagaagataattataaatttagtaataataaaaagacaggtacgtctactctttcataggaatctgtggttttctctgccttgtcttgtagtaaagagagcaaagccaaagcagattattacatcacatttttgagtttatcgatatattttttacataactcgagattgttttaaaattacaaaattaaaattaatcatgaagtgtccgtatttctttgaattaaattattaaagaaacgaggaatgggctcttgtttctatctgagtatgcgtgcgtgcatgagaaaaagtgcagtggtattctctgtcagtgatgaaaataaaagagaggattcagattgtatctttttttttatctacgaacttgaaatttctttttattattgtgtttggaaattgggatacataataatttattatacgtacaatgactaatcgaaacaatagtagtatagtgagggatacattattagacatatacactagttatttggaaagtgaagagtttcaatttttatttttaatagaaaaatggatattatatcgataaggctgtttcaaatcttggagtgtcagcacagtacatgattaatttatcaaaaactttgacagagacttcgttactacacgccaccaccttctacacctttcacctctcttttttttttccttgattttcttttcgtttttgtttcatcttttccattttccaattttttactcctgtgatggatttttagttacttttcattgcttcatattcatttgtaagactcagcaaaagaaaattaaatttcattattttcaagcaacgagatttatgatgtaagattgaaaaataatttaatcaagaagttacaggttgcaaatcagagaagatatttatgctgcctggttttgtagttttcttaattactatctcaagtctgttttttctccttttttatataaattaattatggctcatcaaataactaattatcaattatgttgattgttacaggtccaccaaaatgacatgactaaacgtaaatttcacaattgttaatttatttctgttacttccaatattttgattattatctcatacaaattatttattttagtggaacttcaattttagccctatttgacatgacttgttttttaaaatttcccacccaaaaatgtactaaagaataaactaaagaataaaagacacacccaaaaatgtaaagaccttaagatcaaactaaaaagatagtgagttgatcaatttctactaataaattaactacagacttattgactattttaaccgtatgaaaaaattgtataaacttaaatcaaaataactctccccttcgagtattcatatctacggacttatcatgtgtgtaactattagttaaaaaaaagaagatgttataaagtatgcaaagtaataattatacattaaaaatcattatcagagacatgctaagactattacacctgctactactgtttaatagtagtatttattactatctagaaattgtaggtctatctatacgtctttttagacatatctgcatatgacagtaactaaatctaattaataagatcctttcctgtcttaattacagatagttgaagtaaaagattatcaccaagctatgaaccgaagcaataacattatataattgtaattacttgaatttatgaagttttgaatacattctagtgtgccaaagtgttaattgtcttaaactgaaaacaatggccaaacagattacaatgttgatattgaccttgccaaattttagaaatttgctttactttatcttaatttaaacatatatttttcacggttaatttgtttgtttgcttagcatttttttcataacgagaaaaatattcttatgactttaaatatctaatatccgtactttttcaaggttaaaatgcacactccctactttctatcaccttcattccatttatgctatatttttgacactttaaataccacatttatccccttttgattaattaacacaatagtagagtgtttgatattctatatacatatcatcctctttattttatttttcaatttcttttccaaattgtttatatttttctattgatctgaaatttatggctgctttcgaacaccaaaatggatttgtttttctctacagaaaaacatatgtcctaccataaaattcgttgttgttttatcaatcatttattacaaaacttttatttattttctaaaatgtttggtaataccgcatatcatctttttttaataactgcaaaaagcaaatgaacaaatgccaataataaactatttgacgtaagagaacccaataaaataaataatgatagcattataaatgcaggaggttaacacagtattaagaaacagtagatattcccttgtgacctactcacttgagtaaactaatagcccaatctatgtttaatttctttttgtggtcaacatttttttgataatacatatttgtaatttttatggttcgaaagaggatcttacttcagatagactttcccaaaacaaaaaccaaattatttgttatctcgatggtcaagctcaagcagtcgaagagtaggtaaggagaagagcagttaatatagcattatatggctacatggactctgttttctgtaatgtataaataattgtatactgtaaatatcttaatttatgatatatatttagattaaaggcaattgtgtaagaaacgtcgaatttgaacttctttatcaaataatcagaatatcagataataagtaaagatcgtctaagttaaactaatttagtgtataggcattgattattctttcttcttcttcatctcttaactcttcctctagtcgaccacaatgctaatgatttcctgaggagaaaacaaaggaaatgctgatccatctgagtgaatcaccgtcgtatttgatgaaggaggtgcttctccttctcggtcttgaatgttggacacttcttttatatattgtttcaaaaaatgtgaacagatttgtgattttcacttttttttaccctttagtttcttacgagacacttctttggtgtgttttttttcttggtcccctttgatagccttacacctaaaacctagctgttgatgcaacgtctctctatttttttcctttttttttgcaacttgttcgcgtcttcactcttcaagactatagtacagccccatatataaattttacctgtatactatatatttgttttacatacgtagaattattttctctcttaacttgtattttcttgaattgcacgctatatctgaagaaaatgtagtaggatcgaagttactttgattaagtttatcaatgattatatctttatctcaactttacccaaacatattattttaaatatgccttgatgatatcagattatcagatgaataaataaattatagtattcccaggcctggtcctgaggcccattatagtttttcttctaagataaaaataaggggccgaaaaagaaaccaacaaatttatcttatatactaaaaagcccaaacaaaatgtagaattaagcatcccacaaaccctaattttccctcttattctccctgctcttccttgcgtgagatctacactttctcagactcgatccctaccatggctgcctctacatcgcaactggaagatactacccgtgagattatagaaggtacttccatactcaacatcgacgatacttccatactcaacatcgacgatgtgatgacatcgcaactggaagatacgatcgagaagttaaagaaaggtacgcgaatatttgtttattctgttattcctagtttctaaaaatattaaaactctgattctgttcaattttccgttttagtggtgaggagtttggaagagataaatagaaattcaaccatggcctcactcacatataagctttaccgttttatactggagaaagaagatgaggctgccgccgaactcaacgctgtggacacagactctatcgagacaaaggttgtgaaaagtctaaaatttattgtcgacatattattgattgagacaacagtttaactttaaactgtctggtgcagctggtgaaactagaaaacaaacagagatatatccgtgaagttgaagacaacccgatcgacatccgtagtttgtacaggcctaaacttgttaagcttttaaaggagagagggtttacaccattcccatctgaagataagcctttctcacactatgactacctagatgttgctttacatatggaattacctattcaaaaatacgaggagctatgcgatcaaaaaaatgtgttgcaagacatagtttctattttgaagaggattattgatgcctatcaacattaactaatctgcggatttggttcaagattggtcaactagttttttttttcttttatgaaagctgcagtctctcaattgctatggaaagatcaaaatagtagttacaattctgcattgtaacacgaatgttttcttcttttagctttcagtttttgtgtgttgcaaactcttttgttaaatttttatggtttcttaactcgtttgtcatcattttcttcagccttgagccgtagaaactaaaatatacatagagtttatgtataaatcaaggcttccgcctatcgtcaatgagctcatgcttaatgggctaatgccgtattttccctttcattaggtccagtggcccattgaccggtttgattgtccgtccatatgtttacagagaaactatatacttttatgaatttatctaatatataagatctacttgtaaaatacacctataatgattagttgccagagaactcctggatctgtacaagcagattcacattcttcgtatagacacaatggttataggacttctttaacatggagaaacaataacctgctggaagtacacttagattctcctaggtcttgccattttcatatttacacgcatttagtttctttctaggtgtaatcatacagatagtgtttagttaaaatcgtgaagtcagcccttaccatattatatatatatatatatatatatatatattgtctatcaaaatgtttgagtataactttctttataattttcacaaaaatcattcttcaattaccacttttagttttttaaaaatttgaatcttgaattgaaaactttcgaaatacacagatgtcctctagtagaaaggaatgcgttaaaaactatgaaacaaataaaaaatcattatgagaaaacagtgattcaatgagttgtggtctcttctccatttggacagcgatagtgagacgacgaatacgatgaaaaataattttcttttttccgttgtgttagtttaggagagggagagggagaagagaggacaaatggaagcagcttgcgtaccaaaagtgcgacacgtatgtaaagagtcggaaggagacgtacggtgtaagtcatctcgtcttcacaaatatgttttggttttatcttatgctttgtcttatcctacgtggccattaaatcgttccattcgtctaaaccataatatcaaatcaaacaatcgtataatatcttatcaaccgtaaagatggtgtggtccgtttctctttaaaggtttttggtttggatgattctaaaacgtcacatgaattcttttttagattaccaaaaagttatgggctgaagtccataatgttttcggattagggattagaacattcaaacatgggatatatattgtgtcctttgtgtgttgtatcaaatttgctattgtttgctgcatatatttatctgaaattcgtaagtaaacctcacataaatttcaaactcatgcgtgtgtgcttctcatttctcatttggtttaaaaacaaattcaccctcattaccaaaattgttttgactttattaatatcattaacaaaccatcatcagtcaaatatgattatttagacatatacattgcctcggattttgaactatggccacgcattttttcatggctatgcaaatttcttttgatagctaattattaattattagttattataatatataattgttttttaatttagttttaaacgatgatatcggtaatgaaacaaatatttatgggctaaaatcgtaatttcaaccatttcctagtttggtatatttgtttgggtagaatatataaaatcttaacccatctcctagttgggttaaaatgtataaaattataagaaatttagtgcaattcgtacttaaaccaaaattttttgggttaaatccaaatttcactcctaataaaacaaatccatatataaacaaggttattttctggtcaataataatgttatttttttgggtcaaaataaaataatgttatatgaaggagaaaaaacgagtggctggaaagtaaacaatattttcttagttttcttctccaatctggcaaataaatctcactctctcaatcaaaaacacacatcaaaatcaaaaccttctcttcttcttcttcttgcgagttgcaccgaaacactcaacaaaaccaaatcatccaaattgggtaaaacaaaagaaactaacaagaagaagatcgaattcaagaagaagagatggagaatggagcaacgacgacgagcacaattaccatcaaagggattctgagtttgctaatggaaagcatcacaacagaggaagatgaaggaggaaagagagtaatatctctgggaatgggagacccaacactctactcgtgttttcgtacaacacaagtctctcttcaagctgtttctgattctcttctctccaacaagttccatggttactctcctaccgtcggtcttccccaagctcgaaggtcactttcgtcttttccccatttctctgttagagttggtttaattcaaccggaatcagaaataaccgattagatgactaaaccgaatttttagttaggatgattgtataattaggttgttttgaaccttctgattgcaacggaatatttcatttttttattctatgagagactaacttgcaaatcaagtctcacactttttgtgtaatgataaaaacagggcaatagcagagtatctatcgcgtgatcttccatacaaactttcacaggatgatgtgtttatcacatcgggttgcacgcaagcgatcgatgtagcattgtcgatgttagctcgtcccagggctaatatacttcttccaaggcctggtttcccaatctatgaactctgtgctaagtttagacaccttgaagttcgctacgtcgatcttcttccggaaaatggatgggagatcgatcttgatgctgtcgaggctcttgcagacgaaaacacggttgctttggttgttataaaccctggtaatccttgcgggaatgtctatagctaccagcatttgatgaaggttagctttaaactttgacaatgaggaaacagaaccaaatttgttgtttggaatttgatgtatacaaatttgtgtgtttagattgcggaatcggcgaaaaaactagggtttcttgtgattgctgatgaggtttacggtcatcttgcttttggtagcaaaccgtttgtgccaatgggtgtgtttggatctattgttcctgtgcttactcttggctctttatcaaagagatggatagttccaggttggcgactcgggtggtttgtcaccactgatccttctggttcctttaaggaccctaaggttagtaatagcttcaatcttatacaaaaagtcgatgatgcaaagagcgtaaacaagccgcttacttactgaaatcttgttttgttcttttggatcagatcattgagaggtttaagaaatactttgatattcttggtggaccagctacatttattcaggtatatatatgtcacattcgaaatcaacttcaattgtttctgattatcttaagacattaattttgttcttgattgtgttgtattaggctgcagttcccactattttggaacagacggatgagtctttcttcaagaaaaccttgaactcgttgaagaactcttcggatatttgttgtgactggatcaaggagattccttgcattgattcctcgcatcgaccagaaggatccatggcaatgatggtcagcctatgtataaattgtgaaaaaatgttcacaaattacttacatggtcttacatattttatttctgtatttcttataggttaagctgaatctctcattacttgaagatgtaagtgacgatatcgacttctgtttcaagttagctagggaagaatcagtcatccttcttcctggtaaggatattatttcaatctttcataatgattcattcatcttaagagtaatcttttttttctttttttgatatataccttgtgtgtggatggatgtggctgagcagggaccgcggtggggctgaagaactggctgaggataacgtttgcagcagatgcaacttcgattgaagaagcttttaaaaggatcaaatgtttctatcttagacatgccaagactcaatatccaaccatatagttgatttctgattttggtatggtcataaattgttcttaaattacatgtttaaaaacacagatacagtacagtgtctttttgttctccctatataagtgttgatataaaatttctttattgtaataagattaactcttaattaaaaacatcaactaaacgaataaacagaaaaatgttaactttaattgtatgtttttaactgtggttcttaaaagggatttaaaacttttatgtaatttgagttttgatcttgaaacttcgtgtagctatagtctaagatcatagacttcaattcataatggtagcttgatgatatgcaaatatgagcccattcttttcgacacagcagaaatgagtatagggcctctaggcccaatatatttggtcgtaactggtaaaagatatgtcgtctacaatacaacagagcgtatctaaaatgggatataaagtgcttaaagattctgatatgcaaattccaaaattgaaaattaaagaactcgtaaaacaagatgcattgtcccaaagagaacaaaaaagagttcatactttatttttttattttttgcttaaatgataatgttattaaatttaagtaggtacgatacgaccagcccacgtgaagacatgcatgtatttgagagaaatacttgttaatcaactacttattttaattaatcaatcagaatagtttatgttctcttagtcccaattcaatcttctgaatagtacaatgggtccataaagaacagttaagtgagtctttaggccccatagctttgattcccaaatgaccccttctaaacaaaccgactcttgtgttcttgacttctttttatccattttggaaaatatttcttactagaataagctatatataacactattatataagggatcataatggatataattgttctaaggtaggtttagagattttcgaaccatcactacttggtgaattacattttgcaacttttgaaaaatattttttgtgaaagtaatacatgaatgttttggaaaaaaaatgaatgatacattttccactataatgaatatgttcagaacgttaaattgtgtgttttaatagttttagtgtcagataaaccaccgttttcagataatacttcaaatccatttcgttatacatgcatcgaaagtcttttaattcacattaaagtttttgctctaaaaattttaaatgtgatttctcgttttactatcaatgcattagtaactttgacaatataagttaggtagatgatatgaattttttgatgtcattgtatgtcttctatagtatatgttaaacttatatcactagaaacttatcttagttatgaatacaaagtttgtgttaattttgtttgcttatcttttacatagaacaccatcaatgttttaagtatgagtgcgtgtgtgtatatatacacatccttagccacaacgttgtacatagctcacaacaaaagaaaaaacaaaaaagaagagaaaaatggagaattctcagagtcagggtaaaaacaagaagaagaggctaacacaagatcaagttagacaactggagaagtgcttcactatgaacaagaagcttgagccagatctgaaacttcaactgtcgaaccagcttggtctacctcaaagacaagtcgctgtctggttccaaaacaagcgagccaggttcaagactcagtctcttgaggtccaacactgcactcttcagtccaagcacgaagcagctctctccgacaaggcaaagttagagcatcaagtgcagtttctccaagatgagctgaagagagcaaggaatcagcttgctctgttcacaaatcaagattctcctgttgataattctaatcttggttcttgtgatgaagatcatgatgatcaagtggtggtattcgacgagctttacgcttgctttgttagcaatggacatggatcttcatcaacctcatgggtctgattctgtttcgacgcagacaagattccaatatatatagtcttgtctctgttttgtttcgtttgatctgtttctctttgtctgaatagatttaaaatttgtaattaaagtcattcagacattcactaatacaaagagatgattttcttcatttcttgttatggttataagaattgcaatgttgtaacaacacaagaaaccaacaactactccatggtctagtttcatcttaccttattgatcacatcaagtcttttcattcaatatttagtatcatgcactagattatgcaataattcataaatctagtgtttaaataacttgatcaaacaaatataagctacagtatttggcaatcacttgccagagaccgccacatttattcgaacccgcaatgattcataaaccagcctagtgatggatgagcaaatatgaaatatcaatggttcacaaagcccaccaccctgcacccgctacttgagccatttagtaacgcttatcgaatcttagattatcctctcggtggctttaccgatataacaaacgtaaacctgtaagctccattcctaagcagagttcttgaagttgatccttctcgagagtgacttggttccctagtgaactatatatatcactgagcccggttcaaattggctcatccagggataacattgatcatctagtgtataaatgtataatcttaatttcttcttaaattgacgacattttttacgaatttgtataataatgtaatatagagggaaagaaaaaaaaacaaattgtgtgaaaataattttcttatgtaactttataaagatcacaactcttttttgtttggatccaaaatttagaaggagcattaaggattctagaaaactttttgttatcaatgctaacatatcttggtcaatcccatgtcttttatatatgaaagaaaaatcgcattcttgctttgtggatttggatcactagagtcaacaagcagttttttttttcataaacgagttgatgaatttatagaaataaaataaaattgaacaaagacaaatctattacaactttgaggaagagacaagacactaataacgacttcatggtctagttccttattttaccttatttgtgacatattttctttataatgaaattgtttcattcaagatttgtatcgttgactatattctgcaaagtttcaacaaattcatcggtgtaaccggttaataatccaggactaaccaaaacctcctttaatttagcgtggttcctcctcaccagattccctaactcactatctttgtccatcaccgaggtgatcgcaacacttaagctctctttcgagaaccatcctgtttcttctcttttcacttccaccgaaacctcgagttcctcactcatcaatctagtgttgagaatttgatcacacaaatatggaagcaagactatttgacaatcactcactagagactcccacattgatccaaacccacaatgggtcacaaagcagcctactgatggatgagccaatatcaatggttgctgcacccattctccccaaactactccatgattcttcaccctctcctcaaacccttctggcaacgcttcttggatcgtctttgcgccttttggtggttttaccgctacgagaaacggtaaaccagtgagctccattcctaaacagagttcttggaattgatccttctctagagtgatttgacttcccaatgcacaatatattaccgagccgggtttgaactgattcagccagtgattccatcgatcttcgagtggtctactgttatctggctctggaagcattggacctgtcaaaagaaccttcctctggtattgacgctctatatagtcgcagaatttaccttcgatttctttacaagtcctaattgagataaaatcacaattctttagacctgttgttatccggtaatgaagcctctcgtagaagatggaaaaagtcaacaaagcgtgagcatcgtgtccacggtacaacacttttgacgaaggatagccaggtggaggaactcctaattcaccacctggtacaagttcatgagctatggagttagctgatatcacaaagtatatcacactcttgactctgtgttctttcgccatttccggaacccaataagcagtatcgaaaaagatcaggtctggtctcaaagcacgaaccgcggcttcgacctgatcgcgagtgagatccatggctgcggtaagaaacttccccaacgagatggggatgtccgaggcggtctccgcgccagcaggtaggccatcaacatggggaatagtaagagaatgaaagatgatcctgtctggaaacagattgtgatgttccaactgtttttgagctttcttaggcagcaagaaagtaaccctatgacctttagcagctagcttgttggctagatgcaagtatggagtcatatgaccaaaagcgaaccatgggaacataaaagcgtgaaaattttggcccatttttatttcctaaattctcgaaacaagttgaacacaaaaaaagcaaaggtgtcaaagagagcttaaagaagaaatttttgctgtgtttcaattttcaaatcataagcatctttgtttttcttgcttaaaaacttctgcgattaagaaagcccctatatttagctttgagaatgtgctcgtggaagtctttgaagggtgttttaggtttatttattagtgagggttggtggtttagttggtgaaagtagtggttaacatgtgttaaaatgacctttgtttttattagaaaagttgtctgatctaaacattaatgtaatgtaatgcctcgaagaaatacaatgctgcgtgtcaaaaagtcaaaagtaatcgatcttatgataatatggcataccaggtttgatgacgcgtgttaatctgaaccagatcagcctggccaaaacattagtcaaacgtgagatgaagaaaaacaaagacaaaaacaaacactcaaggcaggttgttcgtttaaccttctaacgtcactattaggttcaaaatcttttagaaagatcgtctaacaacacttacacatacccaaatgagggtttgatattattggcaacacaacacaaatgatatatcacgttccaacaaagaagcaaacgggatcttatttcaaggatcaagtaactaaagagacatgtgtattttgaatatcaaaagcagactgatcaatgtttttaacttcagatcattgcagcttcgatcggtcttcgaccttgttgatagtaatcgaagaagtttttctcagacttcttaactgctttgtacaaccttggtctagcctcagacacaagcccatttaaaggttgaatctctttgtcttcatcagcattacaaaatgttgccacatatatcctttccttttttccgttaagcaccactctatgaaccggactcttgtatattccattgctcattacctgaacatgcataagagatttctatcaaatcttcaccaattaacttcaactatcatagaaacatatatatacatgattgattacctccatagtatctcctacattgatcagaattgtatgagggagaattgaagctttataccacttcccatctttgaggaactgaagtccttctacatttttgtcgggtaggataagagtaaaggctgagccatcagaatgcggttttagcccaagaaccttgtccggcctcggacatggagggtagatgttgaatcttgtctccaacgtagcattttcaccatgcatctctagaaagcaattatcttccaactccaacgatctagctaatgccttgaagaatttctcaaccactaactgttgcttcattgtgtattcatgtaaagtttccctaaagaaacgattttaaaatcacagatttacagtctaaaggaaactgaaatctatgcatggatgatcctatggattttacctaaatccgcttggattttcaggccagaatttaagctgtcgttgatcttcagggtacgtaatgaggtacaagcggtcgacccaatcgagaacttgatcatcagacagaatcatgtcgtttccaaatccttgaaaactacttatctctcttgcgtacttctgtttctctttggtcggaagtacaaagaactgcttcgttagctcgtgaatcttgtcgagcaaggcttctgaaattccatgattcatcacctacgagatataaaatttcttcgatgattttttaagactatatgatcatcactaagagggtcaaaaacttaaacctgaacaacgccccatgtagagatcgccgagtgaagtttactcaactcttctcgaccgtcgtcagaagaagagaaaaggagattaagatcgatgatcgaaattttcatctctggcaacaaaccattgaaaggttgatcaccttcgccgtcgccggtgggtgtgtagaggtatctttccggtagtttttcgccagctgcgaccacctcttggactgtcttcaactttggtttctccattgtttcggaggatctttgtttgatgatccttttggtcagaagaacttttgtattacacgtagctagacacgatcttgaatttatggtcttgcttggtatatccaaacccggcccaaagataaacactatgatacgtaacatgacaaaaaatgccgtttcgtaacatttatctcaagagagaatttagtttacaaactaacagttatcctctcttttttttttgtagcttttgattgtggccaaaatttaaaggacaattaacaaatagcaaaaaaaaactaaaaatatatatttttcttggtaagaaactaaaagatatctttgatattaagaaaatacactatgcttagtatataatgttacttaatatatatttagagtttagggttgatgtcaacaaacctaaatttaagtatgtctcggctataaatatttttttgcattactcccaaagttttattatatatttcttttttaacaccaaaagaattagaagcaaatcttttttgtaaggcaatctacctaatttccatctcaaattgagtcatctacctatttcacccaaaacatttattcaaaaatagtaatatatcaagatgagttcaatcaggttatatttgatgatataaaattatttcctagctagtaagtgaagcttgaacagaacatagacgagaaacgaacaactacttggtggtctactttttttaccgttatgactcttatcgatcaaagctgctctttacaaagtttttcattcaagatttatattttggactagtttctccaatgcttctacgaacttattaagataaccactcattagtccatgacgaagcagagactccttccactttacgtggttcctcctcgcccaattcccgagctcgctatctctgtccatcacagacctgaccgcaccgctcaagctctccttcgaaaaccatcccgtttcctctcttttcacctctaccgagaccttgagttcctcgctcatcagtcttgtgttcaatatttgctcacccaaatgtggaataaacactatttggcagtcattcactagagcctcccacattgacccgaaaccacaatggctcacaaagcagcctattgatggatgagctaatatcaatggttgctgcacccatcctccccaaaccactccacgtgctttaaccctctcttcaaacccttttggtaaggcttcttggattgtcgatgaaccttttggtggctttaccgctacaagaaatggtaaacctgtcagctccattcctaaacagagttcttggaattgatccttttcaagaatgatttggctgcccaatgcacaatatattactgatcccggatcgaacttgctaagccactgacgccattgatcttctagcggtttgctattgtccggctcaggaagcattggacctgtcaagagaacttttctttgaaattggttttcgatgaaatcgcagaactttccttccatttcttggcatgtccttatcgaaatgacatcgcagttcttaagtcctatcatgatccgttcgtaaaaactagttccatctccaaacggataggagaggaacgacaaactgttggtttcgtgtccccgaagcaacaccttggaggaagggtatcccggtggagtactacccaagtcatcttgactacgaccagggacgaacgaaatagctacacatgctgcagaaatcgttatgaaattgacactcttgactccatactctctagctatttccggaatccagtgagcaaaatcgaagaaaatcagatccggtttaccaacagaaactgcttctttgacctgaatgcgtgtccgatccatagccgaggcgagaaaactgcctaacgagatcgggatatccgaggttgtctcagcaccatcagggaggccatctacagatgggatggtaagagtctgaaagacaatgcagtctgggaagagattgagagattcaagttgctttcgagctttcttggggagcaagaaagttattttgtggtctttctccgctagtttgttagccagatgcaaaaatgcagtcatgtgaccaaaaccaaaccatgggaacataaaagcatgaaactttgaccccatatatgttcttcggggaaaataaaataaaatatgttcttatgttcctctgtttttatccttatagtcttgttcttaaggttcttgtgtttctgtttgtgagaattctgtttcagattacctgaagtttaggagagtactggtttaaattgaatgagtcaagtctgttacgaaaatatcccaaattgtttttttgattactaatttactatctatttaagttatgttaataatcctttctttttttcgccagttgtttatattctgtagtttccttttgttatgtaagttccggaaattattccctaatctatggtagatcatctagcttccgaaagctaacccccaacttatggaaattgcaaagatcatgacattcaaggtttgttacgaataaaactgcaactaaagagattatgttatgtgattctttgtttttttaggtccacaacggttatgaataaatattctcattattcataatccgacgtaaaagaacaataagtatggcatcaaatattcttaaaacccaattatattctcaataaaaattaccatgcgagacaaataaaaataataattggaaatggttcttaacagaaaatgttgaaagacttttaaagcacactgttttacaatttagacagagaatgtaaaacatgaattcgaatagtaacaactagaccttatgagcagtctattgaacaagcgtgtgatgcaggttcttcttctgtactccttatgaagaaagggttcttgcaacgaactttacaaccactgcagagaggtcgagtagcctcattgtttggacatatttcaacatcaggttctgggattcctagcttcaaataatataaatctccaagtacacaatcaatatgaagactaagcccacactcatcacaagtataataacatacactcggatctgtcttcgtctcacaaatatcgcaccacaagtcgccggaatcgtttacggaagaaccttgacatagtgacaaaaaatgatcatcacacctgtgttttacctttcttggtaaagtagtgcacctcatgcataaagagtaatcatcacaaaccgtacaacttaagggatcatgatctatttttgtgccacaagcctgacattgtctggaactttgcaacgtaaagtataagggatgttgatggagatcatggtgaaacggttctgatacagagctacaccgaacatcatacttaatacttttaacgaggtatctacaaagcccatcatgacacgcgtatatgaagccatcagtgtgggtttgacaagcaatacacgtataaaagaaattgtctgatcgacgaaaacgtgtgaatgaaacctctagagagagtttatggttgtgcaataaatgtcgcatcttccgaggaagattagcacacttttcatgaagtatgaaatcacattccaggcatctgtagcatggatccccgtcgatggcaagaacacaacaccgacaacgcatgttaacattatctgtaacataattctcatccaatctgagaacatgctcttcatgacaaaaatgaacgatatctcccttttcattaactaccttgaatggatcttctatttcttcttcttcttcgggcacatcttcgagctctaacccatcccacacttctcttcttgttgcacaccttgaatgaacggcataactaggacaacgagagcattcataacctccgtaggcccaattaatcttcttccgacaaactccacactctttatctccttctccttgaccaagatgaaaggtatgatttatgcgatggtcatgacggtttatgcttatgacgcgtggtagtttctcaatacaatatttatggaccatcaaattgcattcaagacaaacataaggattgcggtcgtcttccacaccacatgcattacaagtaaaggtgactaaccttaacaagagggtgaggctatgcttgtggtgctttggttgataaattgtgagtggtggtggatctttcacacattctctacccacgcttatgttgcatatcgtgcaccggaaatgctttaacttaagcttgcttcgacaaaaatgacaaaagtggtcatctgtactgtcaactaatggtgtcttagcccggcggaagatcttgagaacgtgattgcagataaattgctggctgaagaagctgtcagcccattctttgtgaaacgtcaagctgcactccttgcagtgatagcagttgtatatgccatttcttagcttcgggatagataatatggagcggaaagtgtaagactcaaaagtaccacatgataaaggatgatgatgaaacggaagggtaacttcttcgtggtcagtagaagacattgctttcaaattaaaaaagaaacaaagcataagttgagtttcagttttttctctttctaaagagagctgttctttatgtatacttaaggaactcataaattcattctaatggtaattgaacggccgaccagctaattttgttttttttgaaaaaatcaaacataagccaactaataataatgtatgaccttccagtcacttgctacgattagccaacgtggtaacgtgcccacaactttagattcccaaagtcgtcgccttctacagaatttgttaataaaaatatatatttgtttggtttatttttggctactcccattagcctattggactctttcggcataaattattcacagatcgttgcgatctgtcatcgacttatgtaagattcttgacattttggtagatgacaaatgggtgggtttaaatattcatacaaattattgaaaccacaatatgtacgtggaaacaaaacagcagtaaaatagtgatacactgactaaaaataataggatatgaccttccaaccacttgttacgatttagccaacgtagtaacatgtaagtcatcgtgcctacaacttcagattaccaaagtcgtcgaacgttgatcgccttgttcagaatttgtaattaaattaaattataacaatttgatataatatacaagtttggttttcttgactttcggcactaataattaacagatgatggcgatttgtctcatgtaagattattgacattttggtagatctattatatcacctaccataccaatgaatctccctcgctaactctattttgccttttgtttttgtaaacatttcgtgtacggaaaattcgactttcaaatatcactaaaaccccaattttatatcaattttgcaaaattttatgggtggcctttgcaactgtctacaaacacaacgttaacgacatgatgcggttcaataagattgacacgagtcatcataacgttttataagttataataacacatgcattattgaaatgaattcatgacttcacaagtttcaactttctatgtaatatataaatgtatttaatacttttttgaccaatattttttttcaatatatttttctattggttaaactagtcatatttaatgatttttttttatgtaaaagagataaattaaatgtgatttttttttattttctaatttttgtgtaaaaaccttaaactacaactatattgaaacggaaggaatagtaaagttaaagacatcccaaaaataggggtcttaaatgtctattggggacacaattctcattttcaagacacttatatttctttttttcctttctttattcttttatattaaaaagtatgtatttaaatatccatacaagtaaccaatgtggatgctcttatattctcaataaaaaaataattgcaagacaaacaaaaaacaaaaaacatcttttcttttctttgcttgtgtttacagttcaacaatctgggcagctcttgcgcatggtttactcaagacgaggtacacaacagattggcctactattctagattatctttcgactcatcgtttcagccgggtggaagaatttctcacaaaatacatagtccaagctacagtctatgcgatttggagagaaagaaataatcgaagacatggagagaatccccaaaccgcgcaacgcattattggatgggtggataaacaaatacggaacagaatttcagcgattcgacttgcaggagataggcggtacgatgacgccttccaattttggctccaagccaagatttagcttatgccattgttttgaaacttattttttttcagctttttctcaaatattcgatgcactagttgtaaaaatgtatattttttcttttgaatataatttaacattagattcaaaaaaaaaaaaaaaaaaaaaattggaaatattgttcttaacagaaaatgttgaaagacttataaagcacaatgttttacaatttagacagaatgtaaaacatgaatttgagtaattataactagtcctcacttgcgcaggagtatattgaacaactgtagacagcaggttcttcatcaataaacctaaagaagaagggaaacttgcaacgaaatccacaattgatgcagagaggtcgagtagcaccattgttgggatgtatttcaacatcaggttctgtgattccaagcttcatataatataaatctccaagtacacaatcaatatggagacttagcccacactcatcacaagtgtagtaacatacactcgggtctgtcttcgtctcacaaatatcgcaccacaagtaaccactttcgtttccatcaccttgacttagtgatagaaaatgatcatcacacttatgttttacttttcttggtaaagtagcgcacctcatgcataaagagtacccctcacaaatggtacaatttaagggatcatcctttatttctttgttacaagcctgacatcgtctcgaactttgcaaggtaaagtatagggatgttgatgcaaatcatggtgaaacggttctgatacagaactacaccgaacatcatacttaataattttctttttgcaatcttcatgacgacactcgtatatgaaaccatctgtatagatcccacaagctccacactcatgaaaaatatctttattgataagtgtcgatgaaagagtgagtttatggttgtgcaataaatgtcgtttcttcctaggaaggttagcacacgcttcgtgaaggatgaaattacattccacacatctgtagcatggatcaccgttgatagcaagaatgcaacaccgacatcgcatgttagcatcatctataacataattctcatccaatctgagaacatgctcttcatgactaaaatgaatgatatctcccttatcattaattaccttgaaaggatcttcgatttcttcttcttcctcgggcacatcttcgagctctaacccatcccacacttcttttcttgttgcacatcttgaatgaacggcataactaggacaacgagagcatttataacctccatagacgcaattaatcatcttccgacaaactccacactcccaatctccttcttttttaccaagatgaaaagtatgagatatgcgatggtcatgccgatttatgcttatgactcgcggtagattctcaacacaatctttgtggaccatcagattgcattcaagacatacgtaaggattgcggtcgccttccacaccacaagcattacaagtaaaggtgactagccttagcaggagactgaggctatgcttgtggtgttttggttcagaaattgtgagtggtggcagtgcaaacaaacattctatatccacgtttaagttgcatatagtgcaacgagcaaataaaaattctaacttactttgacaaaaatgacaagtgttttcatatatacggccagatgatgtgaaaatatgagtatacaccttgagaatgtgattgcacagaaagggtcggttgagggaaaggctgttgatgcattcgtcgtgtaacttcaagccgcaatccatacactgatatctgatgcgagtgactatttctcctagaaacgtagagaaaaggcacaaagagcaagaagtcaaaaattcagaagcataacttgataaaggatgatgatgaaacggaaccatgatttcagatatggtttccacttcgaaatcatcagtagaagacatttttacaatcaaaaaagaaaaaagaaagaagaagtttgagtttcaatttttgtcttgcgagcttgtacttaacttcctttgaactccagctaattgatcggccgccagctcactaaacaaacatatgcaagtttacatattttagattttttgtcttcttttttaagttgttccacccaacagctgtgcaataatgatacaatgactaataataataataagaataatatatgaccttccagtcacttcctacccctaagccaacgtcgtaacatgtaattcatcgtgctccgcagtttgattaccaaggtcatcgctatacgaaattataaaacatacatgtctctgttttctctttttccttttgaagtctgtgtttcttggctactcccattagcttattggactttcataataaattaaccagtgatatatctatcaactactcatgtaagattcttgacatgttagtagatctataatatatatatatatatatatatatatatatatatatatatatatatatataggtgggttgactttgaaaatgaagacaaattatagaaaccacactaattagtaacaaaatagctggataataataataatactgacttataaacttataataatatatgaccttccaaccattctgctacgactaagccaacacaaagtaacatgtaagccatcgtgcctaaacagagttcatgaaactgatctattgtctacaaccggttggctaccgaagcacagaacagaacgaaccggggtcgagtttggcttagccactccgaccactgaggctctaaggagggctgattaggttggtctcctgcaggcagaatttgattttatgacatacacggatcagcctggcccttatttttaaaaaaatcagcacagaacaaaagaaagtttctacatacctaaaaggatatcatcatttacccatataaaaagttgattgattcatctagaggatggttagatgaattaagatattgatcatatttggtgagtaattagtggattagttgaataaatcaagtttttatcttgtcctgatttttctctccgcagcagggacaagagacagtgcgattgacgcagcgctaacgatgttgaagcaaacggttttagcaccgatcggtttagcaatttccggtatccaatgggcagagtcatagaaaaccaagtccggtttgattgtacggaaaatggtctcgacctctggccgggtttggtccaaaacacaaaaggaaaacttacatatttagataacttctaaatataacattgttcataatctctttaagatattgcaaaagtttttttttattttttatttttattgctaaagttatctttcaagcttatgtcgacattcagttccatcattcacaaatgcataatgtgagattggctccaatcgtctatatatatagataagatttatgcctaatcgttgtgtttagctcttacatgaaaaatcaagaagtatggaatccattaatatccaaaagaaaacaaataatattctcaatacatacaatgcacaatacaataaaaatttgaaaatagttcgtaatagaatatgttaaaagactctcaagtcccagtcccgaagtccgatgtcgagagcgaatctataaggtgaaactgcaaaattaaactcctttgggcagagatcttttgaacaataccaaataccaagatcttcttctgtaccctttatgaagaaggggaacttgcaacgtaattcacacttggtgcagataggtcgagtagcaccattgttaggatgtacttccatcctaggacctgggcatccgactttggtataatagcaatccccaagtacacaatcaatatggagacttagcccacaatcatcacaagtatagtaaaatacactcgggtctgtctttgtctcacaaatatcacaccacaagtcaccacttgcacttcccacaccttgacatagtgacagataatgatcatcacatctgtgttttacctttcttggtaaagcagcgcacctcgtgcataaagagtaatcatcacaaaccgtacaattcaagggattccaatctatttttcttttacaagcgtgacatttattggttttctccaacgtaaaatataagggatgttgatgcagatcatggtgaaacggttccgatacagaactacaccgaacatcgtacgtaaaactaatacttttgcaaccttcatgaagacactcgtaaatgaaaccattagtttttatgtcacaagctttacatctcaaaaaacggttacctgtcgatgaaagagtgagtttatgcttatgcaataaatgtcgcatttttcgaggaagattcgcacacgctttgtgaaggatgaaatcacattcaacgcatctgtagcatgggtcaccgttgatagcaagaacgcaacaccgacaacgcatgttagcatcatccgttacataaatctcgtccaatctgagaacatgctcttcatgactaaaatgaatgatatctcccttttcattaattaccttgaatggatcttcgatttcttcttcttcttcgggcacatcttcgagctctaaaccatcccacacttcgtatcttgttgcacatcttgaatgaacggcataactaggacaacgagagcatttataacctccatagacccaattgatcgtcttccgacaaactccacactcccaatctccttctccttgaccaaggtgaaaagtatgagatatgcgatggtcatgacgatttatgcttatgactcgcggtagattctgaacacactctttgtggaccatcaaattgcattcaagacatacgtaaggattgcggtcatctaccacaccacaagcattacaagtaaaggtgactaaccttaacaagagggtgagactatgctcgtggtgttttggttcgaaaattgcgagtggtggtcccaatgccattaaacattttttatccacgtttatgttgcatatcgtgcaacgagcaaagaaagacggaagattacgtagccgagcaaagaaagacgtaagcttacgtcgacaaaaatgacaagaaaggtcgtctttacggtcagggtcaggccacgcgaaggtattacggtagatcttgagaacgtgattgcatagaaatggccggttgaggaagaggtggtcaacgcattctttgtgcaacgtcaagccacaatccgtacactcgtaactgatacaagtaacacttcttcttagccatgaagagttcttagagaaagagcacaaagagcaagattccaaaaaaatacaataagaacttgacataggatgatcatgaaaaggaaccgtgagtttaggcatggtggctagttggaaatcatcaggagtcatttttgtatattcaaagaagaaaataaaaagcagaagttgagttataattttgtcctgtgagctcctcattatgtagtacttaacttccttggaactcatcaattaatttttagtttattttctttgtaccaatggtaattgatggccgacactgccggctaattaatataaattatatatatacatatatatacgcaactttacaagttgtacgaaatatttacttgtttgggtttcttggcaacttcaactaaactacacgtaagattcttgaaaattttgataggtatatatcataaaagaaaattacaatatataaccttttctagccactctactatgattaggccatcgtgcctacaacttcaaattaccaaagtcgtcgccttgttcagaatttataagtaaataaacatatactcccaaattgatataatatactactttttatttattttatctttgctaaataatataatcatctactacttgtttggttttcttgactttcgcacaaataataaataactgatgaattgatgatgacgatttgcctcatgtaagattcttgacattttcgtagatcagttatatatcatagctgaatttttctccgaccaatgattttcccttgctaactctattttgccttcttcttttcgtatacgtaaacactttgattagagtttttttttttttttttttttgaaattaaagtttaaattgtattcaacagaaaaaaaaacatttctacaaataattcattggtttattaacaactgaataattacgatagaaacgttttttgcaaaccacatctgtagccttattaaaaaaaaaatacatcttttttttttgctaaaaatgtaaatatttcatataatgaaaaagtttttagaattacatgaagtagatcctatggtttggtcccatggcaaaaaaagataaaaaaacatggaagaaaaacaatcggtccattgaaaaaaaaacatatttagcccttcctcgtctctttggtccccctttcaaagattgagctgaggctgtttctaacgtacttgtcgatgagcttgatcaaacgagtatgagatgagtgattttctccatgtctttaagcatttctctcaagccaaatgtggtataaggttgcttggaaaacataccgtagagagacgtgattatattagacgatcccaatcagtcgaacagtcatttacttgggttagaactcgccaaatttcagctgactactcgtctactcattactggcaagagaagaagagatgacaccttgtctcttcagaatagggaaaattcgactttcaaatatcactaaagccccaactttgtatcgtttttctcaaacatttttgggtattatttttgcatctgtccacaaacacaacgtttaccaacggttgcctttaaataggattgacatgtcacatgtgtcttttcataaagttttataagtttataacatatagatattattgaaatgaactcatgaattcacaagttcaactaaattctgtccaaacatattaatataaccatctgcaaaactagagccagtcaaaacacatctccactagtcatgattctttctcactttctaaccgacctcactaccttcctccatcacactctttactgcgatctccaagctccaccgcgagaaccacccattctcttgcctctccacttcaatcgccacctccatctcctccgtcatcagcctcgcgttcaatatttgcaaaccgtactgtgaaaccaaaacaatctaacaatcactcatcaaagactcccacattgacctaaacccgcattggctaacaaaatatctcactgaaggatgctttaacaccaacggtttgctgaatcctatctccatatacaacgcttcctcgacggttgatacactcgaaggagacgtaattgcaaccagaaacggaaaaccggttgattctagccctaaacagagttcttgaactatcttgtctacaacgggttggctaccgaaagcgcagaacacaacctaaccgtggttgaatttggctagccactccacccattgaggctctaaggagggctgattaggttgggatccagggagaaccggtccgggtccggttaggtaacccggtttgctgtattggctactgatgtcacagaattttcattctcattgcggtaactttcccgtcaaggaaagaaccaatcccctccgcgcacgcaagacgactttcgagacgtcttagctaactcctcccctctctctctcggcgctttagcaatttccgttatccaatgggcagagtcgtagaaaaccaagtccggtgttgattgtacggaaaattgtctcaacctctgcccgggtttgtggcctttttcagctagtttgttagtcagatgcaaaaatgcagtcatgtgaccaaaaccaaaccatggaacataaaagcatgaaactttgacaccatatctgttcttttgttcttctgctttgtcttctgaacttcttcttagagtttatatgtttctgtttatgagagtactggtatgaattgaatgattcaattgtattacgaatatgtcaaatctttagttttgattactttactatctatatttaagttgtttataatctgtagtttccttttgttatttaatttccagaaattactccctaaaatctatggtatatgtctacaaaattaactgcaataattattagcttctggaagctttatttacattcaacgttgtttctaatatgccaacgactgccaagtatacaattgcaaagaattaattaatttatttttggtaggaaagaattgattaacttatgtaatttcccctttttattctcatttttttcttcataaaatatactatcatgcgaaagaaaataaaaattggaatataattcttaacatcaaatgttgaaaaacttttaaaagcacactgttttacaatatagacaaagaatgtcaaacataaatgtgaatagttataactagtcctaccttgggcataagtctattgaacaaacataaagagcagattgttcttttgtacccctaacgaagaaggggaacttgcaacgaaatccacaacgggcgcaagaaggtcgagtagcaccattgttaggatgtatctccatctcagggttttggtgtcctagcttcatataatataaatctccaagtacacaatcaatatggagacttagcccacactcatcacaagtatagtaacgtacgctcggatctgtcttcgtctcacaaatatcacaccacaagtcaccacttgcgtttcccacaccttgacatagtgacagaaaatgatcatcacacctgtgttttacctttcttggtaaagtagcgcacctcatgcataaagagtattcatcacagaccgtacaatttaagggatcatcttttatttctttgttacaagctt

SEQ ID NO: 894 - DNA, 31827 bp, Arabidopsis thaliana
gacatcgtctagaactttgcaaggtaaaatataagggatgttgatgtaaatcatggtgaaacggttccgataccgaactacatcgaacatcataggcgttcttattttcgcaatcttcatgaagacactcgtatatgaaaccatctgtatagattcgacaagcactacactcaagaaaattatcttcatcaatacgcctagatgaaagagtgagtttatggttgtgcaataaatgtcgcctcttccgaggaagattagcacacgctttatgaaggatgaaatcacattccatgcatttgtagcatggatcaccattgatagcaagaatgcaacaccgacagcgcatgttagcatcatccgtaacataattctcatccaatctgagaatatgcttttcatgactaaaatgaacaatatctcccttttcattaattaccttgaatggatctttgatttcttcttcttcttcgggcacatcttcgagctctaacccatcccacacttctttttttgttgcacattttgaatgaacggcataactaggacaacgagagcatttatagcctccatagacccaattaatcatctttcgacaaactccacactcccaatctccttctttttcaccaagatgaaaagtatgagatatgcgatggtcatgccgatttatgcttatgactcgcggtagattctcaacacaatctttgtggaccatcagattgcattcaagacatacgtaaggattgcggtcgccttccacaccacaagcattacaagtaaaggtgactagccttagcaggagactgaggctatgcttgtggtgttttggttcagaaattgtgagtggtggtggctccgccacacatcctatatgcaggcttatgttgcatatcgtgcaacgaagaaacatatgatgaacctcaaatcgacaaaaatgacaaaggtcgtcaactatactgtcaagtggtgagatagtgctaacaaagatcttgagaatgtgattgcatataaatggctgattgaataagcggtcaacgcagtctttgtgcatcataatgtcgcactccttgcaatgatagttgatgttattggatattcgcagggccggtccgtggtattcagatgtcctataccaccaaaaaaagccatgctctttaaaaaattttcttttttgtaatatcataaataatattaatacaaaattgtcatactgaaacttaaaaaacagtgattaattcaataagcagtttataaagaaagaaaaaaatggtaaaatcacaaataatattaatataccttagtaagcttgaatcaatggaaaaataaaattttgtaagcgtttaggatattattttattttaaaaccaaaattttactaataaaatttgttaacaacacattttactataattttattaactgaaatgctaaaccccaatgtatggtaaaataaaccccaacaaattaaaaaaaacacttaaaattttgtatatgaatatgaaattatatttaaaaattctaaaacttaacaattatttttgaaaagttatattttaaaattcaacaaattcaaattaaaaaaaaaaacctcgccaataaattcaaaaaatttaaaaaaacttagaaaattttgttttaacatataagacctaaattttcttaaaacaaatatgccttttataattttattacctaaaccatggctccacttcattctgccatacgccggacctgaatacttgccaactgagggaatgataatgagagcacaatgagcagtaaaattcagcagcaacaggatcatcacaacatgataaaggatgatcatgaaacggaaaggtgactacttcgacatcagtagaagacatttttttctaataaaaattataagaacaaaaagagagaaagcagttgagtttcagtttcattggaactcatttaatggtaattggcgcatactgccagctaatcgaaaataaaaaataaacaaaccaactaatagtaataacaataagatatgacctcagtccccagtcatttaaatacgatctagacagagttgtaatgtgccaaagtcgtcgcattcttaagaattcttcttctttatttttatttattgtcgacatcgtgcctacaacttcagattaccaaagtcgtcgcctcttgttcagaattttaaaaaaaaaaataaaaaaataccaaactgaaatattttttttttctttttttttaaattttaaatttccattaaaagagaaatatacaatgccaaatggctaaaaaggctcgcaggcctgaacattacacggcaaaagcccaacacaggttcgtaggccccaaaagaaacagaggaagagaagaaggagaaaaggaaacagagacttacccgaacaacctaaaccaggttgagagaactgaagatcccggtctggctaaccgctgggctctagcgatcggatctaggcgagctttcaagataaccaaattgaaataatttaattatctggtttaatttatagctgatgatggcgatctgtcgacattttggtagatctatctacgaatctcccttgcaaacattctgatttttgagtagggaagatttgactttcaaatatttttgagtagggaagatttaactcttatcgattttcaaaaaaattatacgtgtttttgccactgtccacaaacacaccgttaacgaacggttgtggttagatacgatatgcaccaatcataaataatcgttacatctcatttcataaatgtttataacacattgaaattattaaaatgaactcatgacttcacaagttcaattaaattttgttcaaacttatcaatataaccatctgaaaaaccagagtcagtcaaaacacatctccacttgtcatgattcttcctcactttctcaccgatctcactaccttcctccatcacactcttcacagcattctccaagctttgccgcgagaaccaccctttcttttccctctccacttcaaccgccacctccatctcctccgtcatcagccttgcgttcaaaatctgttctccgtgctgcggaaccaaaacgatctgacaatcactcatcaacgactcccacatcgacccaaacccgcaatggctaacaaaacaacccactgaaggatggttcaacaccaacggttgctgaatccaacctccaaacacaacgccacgtccttgaaccctctctttgaatccttccggtaaggcttcctcgacggttgatacacccgaaggaggcttaatggcaaccagaaacggaaaaccagttgattctagacctaaacagagttcttgaaactgatctatcttgtttacaacgggttggctaccgaaagcgcagaacacaaccgaaccgtggttgaatttggctagccactccgcccattgaggatctaaggagggctgattaggttgggatccagggagaaccggtcctgttaggtaaaccggtttactgtactgcctacttatgtaatcgcagaatttgccttctgtctcacggcaagtccttatagcgattgcgtcgcagtttctcatcgcggtaactttcccatcaaagaaagagccaatcgcctcgtgcttcctccacacgaaactcagggattttgcttcgtgcggacgtaagactactttcgaagatgggtaacctagaggcgtcttagctaactcctcccctgacatttccttgccatcaatgacctctctctccgcagaagggacaagagacagtgcgattgacgcagcgctaacgatgttgaagcaaacggttttagcaccgatcggtttagcaatttccggtatccaatgggcagaatcatagaaaaccaagtccggtttgattgtacggaaaatggtctcgacctctggccgggtttggtccattgcaactgcaagcaaatgtgtcaagaagaaagggacgtcggagtttgtctccgcacccggagggagccctttgacctgagggatagagatggtgtggaaagtgatgagatttgggtagagattaagaggttcaagctggtttagtgctttcttgggaagcaagaaaacaatcttgtgacctttctctgcgagcttgttggataggtgaagaaaaggagtcatgtgaccaaaggctaaccacggatacatcacaatactcatgcttgacgattcattcgatccaaaaacacccattttcttggactctcttgtatttcactttaactaccggaagatccttattagactttttttgttctcttttgttaatttctaagttgtgtgttggatgtgtataaatacataaacctttaacggatcagattggtgagtgtcctgatgaatggtgtgtggttattgggtaaccaaatgaccgggcaagtgtaacctcctggtaagtgcaaacacgtgatggtatcgtaacatcaacaaaagcaaaaccagacttcacgtggtaattgatgggcctgaaatattcggccccctttttaagcaaattaatagactctatttaaaagtcgttatttgttcgttacgcttaataatcccacagtcaacgttttatgtcttaattcaaaggttgtttacgaacgattgtcaaagtggtaactctcgtaattaatataacgtttctttacatattacccctataaattgtttgtttattttgataccaaaagcatcacaattaaacagtcgactaatcttcatagaaaacaaaagaaaagatcactagagtcactatggaaggtaagatccaagctcttctctcgacgattctagttgtgactttgtgtgccactactttagtgaagcccgggctagctcaactccctaccagtgctgggttttctctacccggctcccaagttgatctcgcaaaatgttggtcatcgctcctcaacattcacggttgcaatatcgaaatctttaaatctgttttaaccggtaagtttgaaaacgttggatccacgtgctgcaaggcttttacagaagtggatgcaaagtgttggccaaaaatgtttccgttgaatccattattccctcctcttctcaaggatggttgctctcgcatcatctcaggtgcaccagcacacaagacaccgcaattccctgtcatccctggttctccgatcgatctcacaaaatgtttgtcatcacttgtcaacgttcaaggttgtgtaactgaaatctacaaatcagttttcacaggaaagtgtgataacgtaggatttatgtgctgcaaggcgtttatggctgtggatgcaaaatgttggccaaaaatgtttccactaaatccgttcttccctcctctcctcaaaaatgtatgttctcgcatcaacacatctgctcctacacacaagtgaagtagctatgggaccatcattcacaatgttttaatttaggctcattaaattcatgaattatccctattccaaatgttggcggatgttgttttgttctacctatattattttctacaatgctataaagaaattcaaatttcgacacactttttattgtttcttcaagactctttctttcaacttagactggactatcacttagcctagagaaatagttaaggttaatagcttttcaaactttctaattgatggaggtttataattttggtaataaacctttccaaaaataggcgtatgccgattaaatgcagagaagacacggtattctttagtaaaaggcgaaagaatagctcgctttgtcttcactgctcggctccgtgaatattaaagaaatgctctcgatctttatttatagtagactttagtcactgttcctgaatattgtaaccgatgtgggacattacaagaaaacaaactaatccatgggtcattaatttagcgggatatgggccattcgccaaagcttgtttatttgtaagcccatgccaaatgggcgatttccttaaaccgaagatttcttctaaatctaaaccgaatggttatctggttaaaccggcggtatctcactgagttcgtacgatcaaaccggggaattaggaatcttcgtttcaaatcaattgtgcgattttctgttctgcagattctgtgtttggggttttcaaattcgagcgagaactcctgaatcgtttgattcaagtttcgaatgaaattttttgtcatcttcctcggtagatcaagctaattgatcactatgagaatgaagtttcaacagattgcgtcatggagtaatgggagcttcaagctcgaaaaggcccttcctttcgataatcccaggtggtcctgaggatgtggtttaccatggggatgcaatacccgatgggacggtaaacttcaacaacgtagagtatatagctcgtgttggttgggtgtttgggttacttatgctgagaaagtgcctctctggaatcctaaaactggtaagcctacagattttagtaccagtttctcctttaagattgatacccgtaacctttagaattacggtcatgggatctgcttctttcttgctcctttgcggattcaacttcctgtgaactcagctggtgatttcttgggtctttttttctcgaatcgagagctacgcatcttcgtttccgctggttcatatcgagtttgactcattcaataaccaagaatgggatcctaccactgttggatctcatgtgggaatcaataataactctcttgtttcgtctaactacacttcttggaatgcaagctcacatatccaagatgttggtcatgcacatatctcctatgactctgttactaagaatttgagtgcgtcttgggcttatgaattaacctctgatcctcaggagagtttaggcatttcctatatcattgatcttgcaaaggttttgccaccacatgttacggtcgggttttcagccgctactggatcggtcacagagggacataagcttttatcatgggagttcatctcaagtttggatattgaggtttgtttataaggatcttgttttagctaccaacagattctcagcccagaggaagcttggtgaaggagggtttggggcagtttatagatggtacttgaacgaaatagatatgatggttgctgtgaagaaattgtctggtggttccaagcagtgaaagaaagagtttgtaaccgaagttaagatcattagcaaactgcgtcatcgaaacctggtgcagcccattgtgttggtgtaatgaaaaagatgagtatttgcttatataggagttcatgccgaatggtagcttggacactcacctctttgagaaaagaccccttatctcacctaggacacacagatcttcacggagagggagatcggtgtgtgttgcatagggacatcaaggcaagcaatatcatgttggacatcaatttcaatgtaaaagtaggtgactttgggctggctcgattgatggaccatgaactaggctcacatacaatagcgctagcaggaaattacataattgtcaaagacttttgtctgtgtgtggacatgtgtagggcaagtgaaccacgttttattgaaattcaaattcaagataatccaatcaagtttgacaaaagagaaacaaaaagatagggcaaaaaaagccagcacttaactaggatatgaaatccaaaacataaatagtcaaaaacagaaaagaagataggtgcaagcgagctacactggaatcattaatggaagtactgaatactgaaaattcaaaacaacgaacttgttgtccaagtgactccagtagagtttcagaacatcgccttctgagagatctaacgaatgcttcatagtactccaaccagtaccgaaataatatttaggtttatcgatacctgatactttgagcgtaactgtgtataagtcgtcttccattatgtcgtcgacttgcacttcaacaccgtttagcaaatcttggtcgttaacattcatcctcgtgaggacagacatcacttctgctttcggtaataccacattaccaacgatatcactctttgatagcacttttgttatgatcatagccggttccaatggatcgttgtaattcatcttgcttaattttttttatatttcttacgttctctattcaaacatatatataggagatttagcctaagaaaaaaggtaaaatacaaaagagaaaaaatcagaactctttttgaaacaaattagaaaattgtctaaatatctagatttctcttaatatggaattggaaagtaaactttttgcaaaatattagatttagataactttcacttggtaaattgagaataaagttttgtgcaaattattgatttagatcatttccatttctattctcaatctctttttgagcgttccaaccaattacattgctgccccgaaccaatataatatttacaatagtatcatagccggctccaatggatcgttgtaatccattatggaccgcccaacttcagcccacaaaagaaattgtccacacgaaaacgctcaataatctataaacggaccatttgacatatttaagtgttttgcaagcccaaagtaatcatattcactcaacaaaaagtataaaaaatctgaaatttaatttaggtcgttgctaagcttgttgtagggtacgtacgtttgggagcattttaattagaataagattagaaatttagaatagttttaatcctccgaaactttttgtagtacggacttttgggagcatttttatgagtcgtgccaatcttgcaaaaggacccatgcagagcaacaaatttggttgtggcatgtcggttaggtagcccaaaagcttcattttatattagttataaactttgctgttatatagttagtaaagtttagtcagtaaagtagactgttacttcttttagtactttgaatacatcttatttactacaatgttaacagtcaacatggtataaattctattccatgttttgtttcaaaggttgacataacggacgaattttaaaatgtaactattgtaataaacagtaatgagtattaacttgagttactctatacaattgtttgtttcttgtgataaccaaagccatcacaatcaaacatttcactcttaaaacaaggaaacagtaagtgcaatggaaggtaggatccaagtgcttctctcgcaacgattgtttggttgattctcgtaaaaatgtgagtatatgaaagaggaagttagaccgatgcaatggttgcaatgtgagcatagtcgaatttcacctgccatggtgtttcttcctttttcatcttcccaccggattcactcaaggctcgtcgtttaatccattatcgcctatgtaaccgtcgcttcttcacctgcggccacaaccaatgcaaccgctataacaagtttgtttttgatctctttatcgaccattaagtctctttatatattccttaaaactctatattgcattttgattttctagtgcgtataacattgacgttacagtaaaaatttctagttttaatattcacaagcatggctgctatttcaattcaatataagttttatcatcgtctacaataatatatgaattttatcatcatatagaagaataacagagctctgatcacagactcacagccctgtaactctagctaacaaaattatcttttaactctcttctttattaaaaaaaaagcacttgcatagtagcattttaactgatgtatatgctttccctaagcgacacttgtcctcatgcatgaaatcaaattcaatggacgaccgattcatcttgaccgaccacaaagatccaacggctagctggagatatacaggtgttaataaattgttatattccaaaaaaatgggttataatgtggcagctttttgatagtaacactgatgtatttcttacaataaacgaccaaaaagttaatacaagaaatagaaacggtgtaggaagctactatgacggcaattccaaacgtcgtcgatattgaatcttcttcctcttcgctttgtcaagagacggcaacggagaccgtcaccgttgaaagaggctcgtctgattcatcttcaaagccagacgacgtcgttttactaatcaaggaagaggaggatgacgccgttaacttgtcacttggtttttggaaattgcacgagataggtttaataacaccgttcttgagaaagacgtttgagatcgtcgatgacaaagtaacagacccggttgtatcatggagcccgacccgtaaaagctttatcatttgggattcttacgagttctcagagaatctacttcccaaatacttcaagcacaagaacttctccagttttattcgtcagcttaactcttacgtaagcacagaacaagtttttactctttagctatgtttcttgctttacaagctttgtaaaaactagagtttttttgtagggttttaaaaaggtcgattcagataggtgggaatttgctaacgaagggtttcaaggagggaagaaacatttgcttaagaacatcaagaggagaagcaaaaacactaaatgttgtaacaaggaagcgagtaccaccacgacagagactgaggttgagtcattgaaggaggaacagagtccaatgagattggagatgttgaagctgaaacaacaacaagaagaatctcaacatcagatggtcactgtgcaggagaagatccacggagttgataccgaacaacagcatatgcttagtttctttgcaaagttggctaaagatcaaagatttgtagagagactggtgaagaagagaaagatgaaaatacagagagagctagaagcagctgaattcgtgaagaagctcaagttgcttcaggatcaagaaactcaaaagaacttgttagatgtagaaagagaatttatggccatggctgcaacagaacacaatcccgagcctgacattttggtgaacaatcaaagcgggaatacgagatgtcagcttaactcagaggacctacttgttgacggtggctcaatggatgtaaatgggaggatagagatagagtagagcaaaaccggtaacatagcaatagagaaggtaccaaatcccaaggcttgagatccgaatccgtagcgctttgttgtatggtttcatgtgtatataagcgaaagggacttgtaaaaagcgactcaaggacttgtaaaaaagtgtagctctagtgaaaagggacttgtaaaaaagtgtagctctggttaactgttgccatcgccttccattactaataattttttaactagcgagtagtgacttgtagcataaaatagaagaaattcattcaaagttttgagggtgaaaaaataaaagaacctgtcagaccgccgtgcgaccaccccggcaaggtagaaccgagccgagtaacgatcctctacagcaccggatgcgtccgaggacgatcgtagccgtcaatcacgctctagccgcacggtcatggttcatcaaccagggttaagggcctgtctcttgagaaatcaaggaaacagaggtacgagcctatagaacagatcctgttcaagtaaggtcgtgaccaatggtgctttgtagccatatataaagcagttatttcttcactcgcttaccgatgtgggacgcaaaattcgtaagaaaaaagaaatcataagcttatgggcctaattgtatacaaaacccatatatgttcaagcccaatagttagagattatggttttgttaggaaaaagagttttaaattcagacgtcatttcttcttcctctttgatcagtatgccacgtcatcatcattcctccacgttattaaatatatgtatcgatcatcgtctctctctttaacaagctcctctctctgatgtgaagaagccatggaagagaagaagaaggagcttgaagagttgaagtatcaatcaggttttggtaaccacttctcatcggaagcaatcgccggagctttaccgttagatcagaacagtcctcttctttgtccttacggtctttacgccgaacagatctccggtacttctttcacttctcctcgcaagctcaatcaaagaaggtacatcatcatttcaattgtaagttttggataatttcgttgaattgattgatcttcatcttgttttttttttcagttggttgtaccgggttaaaccatcggttacacatgaaccgttcaagcctcgtgtaccagctcataagaagcttgtgagtgagtttgatgcatcaaatagtcgtacgaatccgactcagcttcggtggagacctgaggatattcctgattcggagattgatttcgttgatgggttatttaccatttgtggagctggaagctcgtttcttcgccatggcttcgctattcacatgtaaaaaactcttctttttattttggtatctttggtgtagatcagtgatacataaagtaatgatcttttgtattcattttgttttgaaggtatgtggctaacacaggaatgaaagactccgcattttgcaacgctgatggtgacttcttgttagttcctcaaacaggaagtaagttagtagtcccaatgccttaccttaccacatctttgggaaataaagtcagtcatgtattgagaatggattcaagatagtcttggatcagttctgatagtttgagtgggtgttttagggctatggattgaaactgagtgtggaaggcttttggtaactcctggtgagattgctgttataccacaaggtttccgtttctccatagatttaccggatgggaagtctcgtggttatgttgctgaaatctatggggctcattttcagcttcctgatcttggaccaataggtactcttgagttcttttagattcagccggaataacatggattctccgcaagaatcttattggtggatgtggacaggtgctaatggtcttgctgcatcaagagattttcttgcaccaacagcatggtttgaggatggattgcggcctgaatacacaattgttcagaagtttggcggtgaactctttactgctaaacaagatttctctccattcaatgtggttgcctggcatggcaattacgtgccttataaggtgagtacattgtttattgagcctaatcttgtaaaacgttaatgcattgtttttctgagaatttcaatttctgtctgcagtatgacctgaagaagttctgtccatacaacactgtgcttttagatcatggagatccatctataaatacaggttggtggtcatctgcgctaaatcgattcttctttttgttttgttatgggttggttacttgttctttattgtaatcacactctttgggtgaattattgtactctcagtccttacagcaccaactgataaacctggtgtggccttgcttgattttgtcatatttcctcctcgatggttggttgctgagcatacttttcgacctccttactatcatcgtaactgcatgagtgaatttatgggcttaatctacggtgcatacgaggtaagctgcttgaagttcctgcttctgcaaatcattagctggcttgtgttatcctcctactgaaatctgtaaactgactccaccattcacaggcgaaagctgatggatttctccctggcggtgcaagtcttcatagctgtatgacacctcatggtccagatactaccacgtacgaggtatcaatccatcttatgcacagcagcaactacacgtttgatttcattttcctccgagatcatgtctaaatctaacccctgaatgtaaaattaagtctgaagcatttttataattgttttgtaggcgacaattgctcgagtaaatgcaatggctccttctaaactcacaggtacgatggctttcatgttcgaatcagcattgatccctagagtctgtcattgggctctggagtctcctttcctggatcacgactactaccagtgttggattggcctcaagtctcatttctcgcgcataagcttggacaagacaaatgttgaatcaacagagaaagaaccaggagcttcggagtaaagaacacataattcacctgcaccactttcaatacccaagctgtacagacttttcaccatatacttgtataagaaagaagcatataacaagtacatatgtaataataagtaggtaatgtttcttcatgtcactttaaatacactatttgtactctgaagctaatataacggtgttggtttagatactaatgaatataactgtgccatttagattcaggccacaacatcagtcagtttcactttcatcttcatgatgcctacttgcactaagatctctttcttcgaatgttctaccttcaaaacggtcgcttttttaccaagagaagaaacaaacaccgagctaccgacttcaggaaccttttgagccgcagcttctgttaatgcagaaacatggttcagtttcaaagatcataaccagatagtagctatcttttaaagggcttaagcttatttcaataccaggaagtggtcgtctctctaccacagatgatgaacgaattccattatcttcatccttcgtcgttttgacttttgtttggagttgcgtagctacctttgactgagaagattttccagcagatgagcgaaactgttgcaatgttctgcgaagtgtagaacgagtcatcgaaccagcctgagttagttcttgtctcatttttcgtctctctttggtggaatgatcgttaatgttcttttgtgctgtgagtagattctcatgaagctctcttgagagcctaaaaccaaaaaatgaaaaacatgaatagaatgctcataagagaggtcaagatttactgctgttatatagaatctcaccttatataaacacgtgactcattcaaaagtctctgatattcttgcttgtaccgttccatgtcaagtatgacctcattgatctcagcacttgcagagccatagagttcacgagcactttcgatgatatcacatggaagccccaacctatcggctatgtttattgcattcgaccgacctgacaagcaatttcaaacgtgggttggtgaatcatgttaactctgattccgttttggaggtaaacaaatcgatcattaaagagcctagatgagcttgtagctaaacctggtactccccatagaattttgtaagtgggttttaggttcaggtcatcaaactccatgcaagcattctcaaaggcggaattgctacaatagatacagaaagatagaaactgaatactcattaaaaacttgggtgatccaagcaaaatgtcaggtacagttaaaaacctgtatttaagcgtcttaagctctccatgatgtgtggttgccatcgtgagtaaagaaccgctttctgcaaaagattcgagaattgccatccctaatgcagctccttcaaggggatttgttccagctccaacctgttattagcaagcaagactttaacgcagattcttccaaacatatgctgaccttaaatctcctaaactatataattaaccagtcttttaacttacttcatctaacaacacaagtgatctgctcgttgaatgcgagagaatttcctgcaagtttaccaatcagagtaaaagaaacataagttgtatatatatcaagagagttacatcttccaaactaatttaaacaatcattccaaaccgataaaagttaaatcaacgctaataatttatctaatcccatcatgttggaagatttagcgagtccaaacttcaaaggaataaagcgtttttgagtcgtagaaaaagggtacataaggaaaactctgttggaagtaatatcactttatgatataaaaggtgtgacaacaacagagaacagacttacacttatttgtttcaaatgaccagaaaaggtagaaagtgactgcagcaaagattgttcatcaccaatatcagcataaatattgtcaaaccaaggtatgcgtgcagattcagttgctagaacataaagacctacaaaaaccctaacaatcatttatattgatataatattaagtgactgaaatctctctctcccctaagggctttatatctttggtggagtttttaactaaccaaagatactgtaagtttcatgtcttacccgattttgccatcatcgcagcgagcccaactgatttcaagcaaatggttttacctcctgtgtttggaccggtaataaccaaaactctagtgcccttagagatctggaaatcagccggaattggtggagctcctgataatacagtgtctgcctataaatataaccatgtatatattaacttcagctaaaatgcatcatcaatcgactctatgatcataacatctgacgaacttactgttttatgaaattttaccgtctcccgcgtctttcttatgcctttcttgtgttggtaaagcaatagaggatgataacatctaggtagatacagcaaccattcttttttagaaagcggtttctcactcggtaagttaatatccggcgagttttctccagcagacaaagattcaacctcatcttcaggtggcaagtatatatcaggatgtgcaccaccatatgcacgactgtaagttgctcgagcgtttatctagccagaaaagaaaaaaaaaaactgtaaaccacatgtttggaagctcatgttgctgagatttgttttactgagttttgctttaatagaaagagaaatgattggtattaaagtataattaccacatccagctgaatcgagtagctcaacaccacctcgatttgacaaagaccatcttgcatctgttttgcttgcatcaaaatgaacaaaaatgtcaacaagcagaaaacaataagaaggaaagttacagaattctaactttaaaaattaatacacttttcatcaaaatgaacaaaaatgtcaacaagcagaaaacaataagcagaaaacaattaccttttcagttaacattgaaagaatctctgcctcagcctttgcaactgatgctctcgcactttgaaggtcatcattcatagacaccgcagctattggctccgccgcagtccctccacctgaaccactgaaacacatattatcttcaagagatagaacttgaaaataaacactaaaagagaagcataacttctcaataacttggaaaatggtaatgaactcttgttaataaatcattgataaattgcaaaccaaaattctgaatcttctttggtaacttaaatctaaaaattcaagtttacctggaaagcagaagaccattaacagaagttagctgatttgagctcatttgtatacaccatcttccatcaatttcagccgctaactggaattttatcttcaataattaataaaaccaacttcagaaaatgaagatttaagagaatccttaccatgacagattcgtcatccttttggctccttatgatagcatccagcagttgctgcagctgaaaggagacaacaggtagttttcagacaatactacttcaaaagatatcttcaattcacagttacaaagaaaaactaacttgacctttctttcaagtgtctgcactcgttcacgtgattgtctcagggcactactctgaaacaataaagatgagttcaacataaggatcatacatcttgatgacaatgtagtcaaagtgagaaaaagaacaaaccgcggaatctttgattgtaccatcaggatctataacttgttcaaccaacttgacaaatgatctattaatcacagggtgcactatctgcaaacacaaagtgaatatgaggccaccacaatgtccaagttaaaaaaagcatcaaaaatttggagagaaaactgcaaataccaattcagataaaggcataaaccgtttgtaccaatctccatcttgcttaatggcagctttcaaatcaagctgcaaattttcgaagaacctaagaagagaagcaacttcaagtgcttggtctgctcgtaaagaaagcctcctcttagcatgacgaattcccgattcaaccttcacacaaatcagtattacatcaaaaactatacaattttcatgcaaagattatcacttcagagattgaagatgatgaaacttacgagggagatatgaatactggagaggtcaagacagaaggaaccatgttcaagcattttaatggcggcatcagtttcatctaaaagtttcaaactttcactgaaactctggtcaagagaccaaagctttttctgaaaaccaacaatctctgtgtcaatataaaacagagaatcaacggctaaaggagaaaacccaatagaaaaatcaaacctttgtagcttctcggcctaaagaagtacgagcaaaagaagcgacaacatcgcagagcttgtcccattccaacaccctcaagctatcggtttgagatttagactttgaatggcaaacaagagtcggagaagaagacgagattaaactcaactttactctgtttctgtttccgatagagtttcttcttcttatcactagggcactgttgcagaaagctattgataaagtctgcatttttgacctcccccttttggtttcagagaagaattgtatcaaatccaatttcaatgaaaccaaaatttccctatttcatcatagtttataaccttattatcttcacaaaacgggaaagttaagaattaataactttaccataacttggaactgaggaaaagatgtttttaggaggtaacacaaatcacaacaagtctattgtttcattaacgtacgtatggtaacaatagcaatacaacagtggtgcgaaacatatacatattacagatttgatgcacaacaattttggggttttgagaaatgaaaatgtgaaagaattaaagggttacaagaggctcttcgttggttttggtgtaattggctgctacaacagcctcctcttgttttggtggctcagtctccttaacagtttcgacgacagcttcttcggtcttcaccacctctggagctgcctcagcctcagcaggcttggctacctcagcctcggcaggcttggctacctcagcctcggcaggcttagctgcctcggcctcggccggtttggctgcctcagcttccttcggtgtctctgctacatctccagcagactcttccttcttttctgtgacaacttcatctgccttctcctgtaaatcaacaaaacaatcacacatctttcacctaaaacatagacaaaatggataaaaaccgatcattctctaatgaacttgttctacaaacctgagatacggtttcagtttcgacgttcttggactcgacaacagtcttttcggtttcagggatatcagattccttaggtttgctcgcacagcctcccatggtgtttaatagaaagaaatcggtttgaaacgaaaacaaatttacacaatgggaagaactgtggagctaaaagattctgattcctttcaagaagccaaaactgtttgtttcttttttctccttattagaggctgagcaaatgtaggtgaagacacaaaagagatatatatagtggttcgtaccaacacaacacaacacaaagctatttcaggaaaagggctaaaaatttcatgtcaccttaggttctttaaggctcttctctgtcaacgacctattcatcaggagaacaaccaaaccttattctcaaccgctcttgcgtttttggttttagccagatactctttctgtgccaattcgattcaagacaatagcaacaaaatagcaaaagcaaacataacaaaatttggatattgatataaagataacaagagccaacacttagaagaccaaatctggtgcaaaaactctgtcagaaatttgagattagatctgttttctagtttgcaaaatggttatatggtaagataactgtttctcatatgaagaaataaacaaactgaaaatggctaaaaagcctggacaaatcaaaagaatagttgttccctaggttcagctacattatagcttctattcaagtttggcaacaaccacgttagtagaggattctactccagaagtttccctgaaaccactgttgggacctttgttgacaaccctttgtacattcctaaagcttgagcgatcatgctagcaggattgtcgacattactcggaagcagcattgttgtaccctaacaagaacaaaaaaatacaactctattagataaatcccaaggaaggacgagattagaaaagtaaatgggatcaagtaaatgatgtgtttacctccttagcaattttgccaaaagcttgaatgtattgctccgcaactctcaaactcgcagcctgcatatcacaccaccattaagcatatgaggttctcttttggaaagcaaaaacaaataaacttaaagagtcaacatttgcaattccaataaacaactcaaatctttatgcagcatctagagggaatcattcattgcattcacatgtgaagggttaagtagcactaacacatccaaatttgataaaacagtattaacgcctaagtaatagttaattcattgatctcataattcaggaaatcacctcctctccaccagcttccttgagggattgagataccatggccagtcccttggctgttgcttgtgctctagctaatattgcttcagcctcacctggatagcaacagaacaaatacataaaaatgttatggtgaaacatactgagtcagttatgatatgaggttaacagacgaatggctccacatcttattatgatgatttcatgtttttcaatcttaaatgcttactaaatactaaccttgtgcacgattgacttggtccatcattgcagcttctgattccaagattacagaacttttcttaccatcagctctattgatatgggcttgacgttctcctgttaaagtcagtacagcagattatgagaatcaaattgagccaagaatctgaacgaaatgagctgtagcaagcacatagttcaatcccagaacatatactttcaagcaattttaccttcagactcaagaatctgggctctctttttacgttcagcttcagcttgcatttccatagcaactctcactccattaggaggcatgatatcccctggatatacatgtattagatacaaggccaaaagggtatctagctaacaccagcaaagagtcaacagaaaaataactcactgatctcataacgaaggcactgaagaccccaatcttttgcagcaacattgatggcttcctgcaagaacatgtccatttcaaaatgttcagatacttccaatatccaacacatacactacaaaagcataatacattccacaacacatacactacaatactcttatctaacaaaacttatatagccagctatcgtgaaatgaacaacacaattaaacaatctgaactacaaatttcacattaacatcactgaccatgaacatcaaagaatcccagttttcaaaatgaaacgaaactcaagccatagagagagagaacataccacaatcttctcattgagagtgtcccgttcctcaaaagtcttgtcaagagtaattttaccgagctcactacgcattgtagtctgagccaactgcataacagcatagatcggattctcaacgccataagaagccaacttaggatccacaatctgcaaaaaaatttcaagacaatgacatatcaacaaaagcaaacaggaaactgtatacaaaactggaatctgaaacgaagataataaccttaacgtagagaacaccatcgatgtggatgctaacgttatcctttgtaatcgcagtctgattaccaataggaatcgcttcttcctttagagaatgaacataagcgatacgatccacaaacggaacaaggaagtgaatccccgccggcaaagtcgtgtggaatttaccaaaccgctcaatcacacaagctttcctctccggcacgattcggattccccagttagacggcggattaatgtggtagctacaaaaaaataatttcagcgaagatccgtttaagcctaaccgatcaaatccataaggtttctactaaaaaaatctgaagtcaaatcgaaatttcaaaatgcgtttaacgaaaactaaaatacctgttgaaatcactgctgggagatgagaagctacgggcgccgaaaagttgttgcggaggagtaccggcggaggaggattggtggagaagcctggaagtgaaggattttgacggcgaaggtttattgatttggtagctacaaaacaaaacgaaatcaatcgtaagcttcctatacaaaatctgaagtcaaatccgttcaaatttcacagaatgtatttacgaaatcgtaaagcttaaaaaaagacctggtgagaggacttccggtagagctgaagttgcggacggtggatgcggcggcgagagatgataagatcttcggaacagctgcggaaagcatagggagaaacctcacggcggcggtgtaaccggatcttgaaagcgcgagctgattcatcgttgaaagctgtgtaactaactctgagaacgtggagaagaggaaatccagagaaaaacctcttaaatctttttttttttgaactatagtttaatcggttgacttatataataatcaaaatttacttgaagaagaggttttaaaaaaaaacttggggaagagtcaaacagaggtttttgtttttcttgcttatcacgaatttgtataggctaataaaaaccctaagacttgatgaataaacctgtgttatgttgtctaataataaggttacgacatgtgttaattataagataagtatgtcacatgtgtttcctccttgggaaaatggtaacatatgtttttgtaagatcttgcattggttcatataacatacagtaatataaaatcatatgatttgaagaatcttattacattaaagcttccgtttctagatgagtttaacaatcttactttccctttttaaaatgtgttcaacattttggtaatttagaagggaaagaaagttatgttcgaacgttagttagttaccataattacagttattttacgaacataacgaaatttacgaatccaaaatctgtagacgcacaattagtcacacaatcatgtttgagtctggcttgaaaggaaagattgtataaaatgttttgtccccaggccaaaatgatgtatggacttttaaagcccaaacttcctcagttacaaactctttttttttttttttttaatatgtttaaaactgtttttaatacaattcgaagaagaattcaaactagttttgacgtgaagtttcaaggaatatcaatacaaacaccatataaactgacatttttaatactgagtataacgttatgtgattgatttcaaatctttaaattcgcataattattctattattagtaataacatacatgcataaaattcgcgacatcaagaacatcattgttctgaatatcaagaatatgcattgaccgcgacatcagaaacatcatcacatcgagaaagaagaacggtcatttccgcaaattaatgacactttggctgcgttaaattctaccaaaagcttctctcagattttactgaattctttgctttaattttgatttttgccaaaacttcaattgtttaggtttagtgtaagaaaagaaagtgattgttattcaattgcttgctttacaatgaacggctgtacaacgtatttgtacacatgacttaaccccaaaaccctagacgagacttaccgaccaagtaagttctaagtcggctaagcccaatatacaaacgcagcccactagtactacttatctccaatatttagcaagtctgtaaaacctaataatgatatttatatgcgtagaaaaaaagaaaaaaaatccatataccaaaaaacacttttgaacaaatccaaaagtttacatgatgacttgtgttgagatgtgatatatataagcctaccaaccaaatgcaaagacaagaaagaatccaaagataaattcacgaccaaccaaaccaactaaccaataatcactgattttcaattccattatataaattccaaccccgaaagaaacatccattggacttttatttgtcaaaacacgttttcacacggacttaacagaaaacttataaactactaaaatttataaattcatctaaatccgattttaaagaaaaacacgtgaccctctcgcagacgcagaagtaaaacgccaaaacaaaacgccattttttgtcgattcttcgtcgtcctcctttgaaattcacaccaatttgtctctcttcctagagaaacaaaagattattcgaaactcgggaaagtatcatccggtcaccggaaaattgattatttccgatgccaataggtgaccgtcagaatccgagtgtggagaagaagaagaacctcttcaggctatgtccgttttggcagaggagaagcaccacttcttcatcttcaacacagaatccaaaccaaaactaccgtagccgccatggaaatcggaatacagatatttccgccgtctctaagcctccgttgactatgtcttccgtcgccagatcacttcttccagctcgccgtcgtctccgactagatccttctagttatctgtatttcccttgtacgtcttctttatttaagtttctgccgtcgatttagcttgattcagaaatagtcatagttctctggaaattgattgatttggttatggattctgattagagaatcgaagtgattaacataggctctctggaagtgattgatttggatttccattgttagagaacgaagttagaatttgtggatttgtgtttgtttcagatgaacctggaaaacaagttcgcagcgcaataaagcttaagaacactagcaaatctcatactgcatttaaggtaatggagttatgtgtatcattcacatcaattttggctattgattctcgcatttctgatacttatttgagaactagttaagaaattgcagagaagttgactctttgttgactttagtatgtacttattcatctatgtcactctgtatcttcttgtttagttccaaacaacggcacctaagagttgttatatgcgtcctcccggaggtgttttggctccaggagagagtgtttttgctactggtaatgagattctggaaaagaatgatgtcttctttggttttgtgtaccctaactagtttatacagcctctgagtattgcttcttgtatgtatatgtttaagtgcagtgttcaagtttgtggaacatccagagaacaatgaaaagcagccgttgaatcagaagagcaaggttaagtttaagattatgagcctgaaagttaaaccaggagtagagtatgtgcctgagttggtatgttatgtcgctcctttctaattcttattagtttacttacaagtccaatgttggaagcaattttattcaatcttagaaatatgactcttataggctgaaacattgcaattgatagataggttttaaaaggataagtgttaggttttcaatatcgttacctccgattccttaaccaaactggcacacactaacacaccatacaagagagagactagcacatcactagctcagctctcaatacaccatacgagagagactagcacatcactagctctgctcttaagtctctcataccattcaacaactatcaacataaacctctctaaacattcagagccattatttatactcgaactgagtttgttcaagatatttttagatcctaaaaatatcttcttcttcaagcaagtttcttctcacgtgcctcctcacttgaacgtgtcttcttttgctttctctcattcacattcttcttgatacatcaatcgtatcaataagccctctctgtctcagagattcttaggcataagtccatcgatgatgcatttttgggtgtttattgtgcagtttgatgagcaaaaggatcaagtagcagtggagcaggttcttcgggtcatttttattgatgcggaccgcccaagtgctgtaagctattcatgctgataagaccacatacagtctaaattctatagtttgaacatttcataaggagaattacgatgtaatgaatcaggcattggagaaactgaaacgtcaattggatgaagctgaagctgcagttgaagcaagaaagaagcctcccccagagacagggcctcgagttgtcggggagggtcttgtcatagacgaatgggtaacatataattataagatctttggtccgtttattgttgttccttctttctcccatatattcaccaaagtttgtgtcatctatcagaaggagagaagagagaagtaccttgctcggcaacaagtcgaatccgtagattctttgtcctaaacgcagagagcaatgtggacttgttctgcagatcatgtacataatttattatccctcgattatgtatttatctctagacgattactttgtggttcttgtatgtctctgtttgttgtgtgattcatgccggttttttctccttcatcaaattttgtttcggtcgtttttagttgatctagaatcgaaccagagtttgttcagtatttagttacaaatgaaaaatcctgttataccattcgttaaacgtttcttagaaatgagtcattaaggttagaataagaatgatggttttgtggacaattataaagtttccccaaccatgatcaatttgattggaacatttcacaaaccaaagtacaaatttgttttggatgataggctaccattttctgatatgtcaattgtcaccatgtttatttttagttttaaagtggtttttttattttgatcagactctaaactaaaggtccacaagagtgacctataaaagactgatacccactaatacaaaaaaaagacttatacccaagtactgagattgatgtgttgctacttttgctccttgcattcagaaactacgatattctctactggcccaaataattagtggacttacgtaactgagtactttgaggacacaattatagaaaacgttattgcatttagtttcagctggttaagctagtctgtcatataatctttcttcttactgtaatgaaaacaataataataactttactaattttctactaataattatgagattaactgaataagaatagccgccaaagagaacgagaaataattaagaatattttggtcttaaaactttgaaaacacgtaactcttaaccattttttcgtctttgtacgctgaaatctaagtcagaagattcaatgtaagtatatttaactagcattcgaaatatgatcatatttgtttgtaaatggtatactttatagacaatcaaatcacttgtatgaaatgagaatatgagatataagtaagattcacgtggtatataaaatttggaacaaattatgcttaattagaagcacacaaaaatctaaagttagatatgttttatttcgttattagaatatttttattcggaaaaaaggggaaataaaatcgactcgtggagattatgaaggaacaaagacaactagaggtgtcttttgatttccatgtcgctttatgaaagctttcggccaaattgcacaatcaacaaattcgacaatccttatctctctctctctcttttttaacctcaaatttagtcttatcaaaggacataagaatatatttttgtatcaaacttgaaaacatcacttaaaataaaacaaaataaattattaaaatatcactaaaatgaagaagagagataacttatatatacttttaccaaatatatatctaatgtaagattctgaaattgagtcatttttatctcagcaaaatcatttcataacccgggcgaataaagtgtgtgtttagtattacgtgcttgaaacgtaactagatcattaagctaagacttgtagaacacgtacatgcatcataattcataaatgattagtttaagaataatcaacatatggttaataaattggtaaaacaatattagaaaaaagagaaaaactaccgtttaaggtagttttccattatttgcaaagcatatatacaatatatcatttcatttcattatggaacataagtgttcaatactcgtcttaacacaatttaagaagaagaaaaaaagactaacaaatgaaaagcttagtgactgtgtcactgtctcttaacccgtcactaatctgttgcaacttctttaatcctataacaaagaaactgtttttaatccgaaaacttcaactatataaaccggcacaaaaaaaccgtcatcaatcaaaacaaattacttaaacaaagatctcgacaacaacgtctacaacgcataattatgtccatgcattgttttttccttttcacaaaaagataacaataaactaaaataaaaactttactattacaacaaatcgtatctcaatttcatgaagagatggccgaaaggaataaaaacatggacccacccgcccatcgaatcgtgcgttacgcgaaagcaaaatattcattaccattaaaaacaatatttatcaacccctttttaaaaatgtaacgaacaaattcaggaaataaaatatttatattcctaatacaaagtgcttcaccaccataaacacacattcactacatgcacaagcacgtatatatataaatgttcatgaaggaagaagctttaacagagagaacaactaaaatagcctaagcctcaaatttaatcgctatttagtttctaattttgggttaaaagaaattcgggtttcaattaattcgaaagagcggtcacgacgtttcttagagaatcgtcttcttcatcttcttcgtgaactttttgttttctcctttttttgattttcaccgccggagatttttgtatttttccgattattcgccggcggtttagagataatgaaggggaggatatcaaaaataggaagctatgcaatctcgtcttccattagagatcagcatcagcaaccttgtatttcttgtactactttcaatatccttgctccgatctataaacgtctctctcacaaggttcctctccatcatcaatttcttgaatttgaattttgtgtttttttttgaggattttgattttattttggaaatgtaggatcaaagtcttcgtgaaagtgataatcgagcgtattggcttggaaggaatcatcgaatcattgattggttattgtatgagagatcttcaatcatatgtttacaggtgttcgacgaaattcctctgtgaagactttttgtttttatgtttttttggttatgtgttctgatgattttgatttttaggagttttgggtaggcaatgaagagcttgttaatttgtacgagaagagacttggagacgctggttatctaagttacaagcttggtcgtactaataatcgtggtgatggtatatataaacatttctgtgaatcttcttctttttggttttttgatgtttgtgtttgttcattcttttaaccattcattgtatttcataggtttgcttacggctgttcataaggactattttagagttgtgaactcgagggatttgctttttaatgattgtggtgatcgagttgctcagttgctacatgtagaattagttcctccttactctcagtatgatgctcatcaagaagttttgattgtgaatactcatttgttgtttcctcatgattcaacattgtccatagtaagattgcagcaggtagagttctgttttaaatcttagactaactccactattattgtgatgattttgcatatttctaaacaaagattttgttttgataggtatataagattcttcagtatgtagaatcttaccagaaggaagttaatctcagtcccatgcctattattctttgcgggtaactatcttgtttggattttacttttccatgggttagatgtgatgattacagtactataagctcctatgtttgtgtctgtggcagagattggaacggaagtaagcgaggacatgtctacaagtttctcaggtcacagggttttgtgtcgtcttacgatactgctcatcggtacacagactcagatgctcacaaggtcactgtctttcttcatatggcgaatacttttgggtatgctgtagattttttcgatgttttgaataggcgatcgggattctgaaactgttgttgttatctttggtttaacagtgggtaagccaccggaatcatcggggtaacatatgcgctgtcgatttcatatggcttttaaatccaaatcggtatagaaagctgctaaaaacaagttggagcgaggcagtctttggcatgttcagggtgagactctcctcaattgtgtcttatcacaagttttcatctctgaatgaatttcactgtcttttttatccaaaagtgatttacttgttgatctttgaactggttcaacattaacttaatagtataccaagaaaaatgtctcttcctttacaattcttgtctaaattatttatggaaacggaattgttttctggttcctgcttgtaacatcagaacattttgatatgcagtatctactgagaagagcttcactaacagctgaagatgcttttgcttttctaaaaactgacaatgatggtgaccacattacattcatgggcttctgtgagactcttcggcaggtatgtagaatctgtaacgcagttaatcatattcctatgactgccttactcagcttaatgtttacagagttttctctttcttaatttcatactctttctctatacagctcaatctaacaggtcactgtaatggactcacgacaaaagagatcaaagatttgtggactcaagctgacattgatggaaacggtcttctagattataaggagtttcaggtaatgtttcttcattagactccccctctctagattacaaggaattgttcatgataaggtagtttttagtagaacttaagagttacaatagctgaacataatcgcccgtgaacatctagacatagaatcgaaaacccttgttcttgttcttgaaactacacacaagtttctcaattgcttatgtaatccattgcagcaaagaatatggaaccaaacctggtcagaacaaagagatgcagaggacggagaagcaaaaggtaaccaagaacaaaccgttggattcagtgtcaaaaacgcagttttgtttcctcctgaagttgaaaaaggaatgtggccagaaaattactctctatcagatcacgcgagactcactgttgtattctcacccataagaatgccttgctctcaattggtttcatgacaaaacacactcaccaaacaaactttagcttcttccatttttaagagacctctgagttttggtgtccccttacagagaaacttcgctctgtctctccattggatcggcttgaccgctctcacgttgcggttcctgcgttgggtgggaagaagagagaaagggggacataggtctataaatttttactgtgtacaaaaacatgtaaactaaatatattagcttcatgtacaaaataatgtcgtagtagagatttaagaagcagctttttgcaactcttttttcatttctgtttttgcaatttcatcaactccagagactttcatagagatatgtttagatataaaatgatacaaaaacaaaataatattaatctttaaaaaagtaatgccgccaaaaaaggaataaaatatttcggaaattaataagaaaaccacaaaaacggaacaagtttcgagcttcaaggtcagcttcttcacttagaatataaccaagtgtcaacaaagtcaattttccgatcatagctttttagggttccgttgacttcaaatttgacatggctaattcctcaatcgtagctcttcttcttctctttgttatcgctagttccgtcaatggaggagatcaagagtatccaaatcaatatctaacag

SEQ ID NO: 895 - DNA, 31309 bp, Arabidopsis thaliana
aagctttaggtgataaagaatggttagtgtctgtaagaagacaaatccatgaaaacccagaactccttttcgagttacataaaacaagtgctctgattcgtcgcgagcttgatgaattaggggtttcttattcttacccggttgcgaaaaccgggatcgtagctcaaatcggatccggttatcctccggttgttgctctccgtgctgatatggatgctcttcccttacaagtaaactcgacttctctctctctctctttgattgtttgttaatttcttctgtagattgatttgcttcgatttttcaggaacttgttgagtgggatcataagagcaaaatcgatggaaaaatgcatgcttgtggtcatgattctcataccactatgctccttggtgctgctaaattgcttagcaaacgcaaacgtatgctcaatgtaagttttgggtgaagtaaatgtgttttgaatttgtgggattagcttagcaaaagcaaaaaggatgaatcttgttttgtctttatgtacaaaagtataaatctttcattgttttggtttgatttggagaatgttgtagttgtagttggagaatgtacgaaaggtttagtcttttttatgacttgagaatttttttttgtgaatgaaaagattactctttgcttagggaacagtgaggcttctttttcaaccagcagaagaaggtggtgcaggtgcttttcatatgataaaagaaggtgctttgggtgattctgaagcaatatttgggatgcatgttcatactggcttacctacaggagaattagcaacaatctcgggtcctgctttggcatccacaagcattttcagtgtaagaatgagtggtaaatcacccgcttcttcggagacctattcttgtgttgatccggtgttggctgcatcatctaccatcttagcattgcaacttattatctccagagaagtagatcctctcttaagccatgtatgttctatactattccaatcgataacggtcgtttatgcataatatagatctcccttagtcttctgacgctaaaagatcctgtttttggatttaggtgctctctgttacatttatgaaaagtggcggttctgagtttgatgtgattccggcatatgtagaatttgggggaactttgaggagtcttacaaccaatggcatcaactggttgataaagcggttgaaagaggtatgtacacgtgtttcaaaacaaccttaagtattcgatgcagagaagaaaccgaaatttggttttcaatatcttatgaatcttatctcatctaaaccctgatgatcaattttaaccttgaagtaatttattgtatctgttctaatacctggatctcttgttactctgttctagtaaatctttcatgggacaacaaaccatttatatatccacaagctctctttccatgatatacaatcactaatgttcaaatgtaatctaatcttcagtttgatcttcattcaaccttgagctaacctttattgttgatgacaggtggttgaaggacaagctgaagtacaaagatgcaaagcggatatagatatgcatgaagacgatcatcctatgtatccagcaacagtgaacgatcacaagctacacgaattcactgaaaaggttttgaaactcttgcttggacccgagaaggtgaaaccggctaacaaggtaatggcgggtgaggattttgctttctatcaacaaaaaatacccggttactacataggaatcggtataagaaacgaagaaatcggttctgtgcgttcggttcattcgccttatttcttcctcgacgagaatgtgcttcccattggatcagcaacgtttgctgccttagctgaaatgtatctacaagagcatcagaatcaaactaagtctggagattgagaaagttactaaacaaaagcttagttaattgccttcacaagtaaatgctattgtttttataaaatgcaatttttacaacttcaagaaatcaagttgtatattataaaaattgtaagtaatgggtctctgtctcatatggtaggtgcagatgtctgagtctgagacaccaaaaacgatgtcgtttagtttcgagatatcgacaaaaaaaaatctggtgaatttttatgaaactaattagtaaatgaaatgacatttgaacttatcataatgactacagacacaaacacattttgtgtatttttaaaaattttgtttttgtctattttgataaagcaaacaccaatcaatgataaaacataggcagcatcttagtcagtagaaaagcaaaaaagcagcattcagtctctataaaactaagcaaaataaaagttatcttttgtatttttataaattttaatttgcctttttcctaaaaaacaaaaactagacaagataaagatgaatgtgtcacatgactctcaagagagaaaaggcaattaggagataaagagattagttttaataaatttgatctaaaccaaaagacaaaaagtgatgacacatctgtccctaaaatggctaaatgcctaaatccaagtaacacgataatcgagctcaacaacaggcacttcatcttctggatctatattatagtatagattatagaatatgattactactatttctttttggaaaattattggctcatataatccattgatgaaccataatttgtactagataataataaaaacataatagctaataaaatcgtgaataattcggtaagaaaaggttaaagttgtttcaatacactcacctaaacaagtcgattatggtccaaaagaaatccaattgagataaattttaaacttttcgttgctagttaaatgtgatttaaaatatgaaattttcaatttcatacaaacatgaaaacattttatttaatcatgtaaattagaaaatatagacatgttatatcaacaacaatggcaaaaagaaaaaggtcggttttcaaatctattgatattttccgtatcctattaattttgcatgcgatttctgaagaaaaagttattttgattatttagagaatttttatactaaacctaatttgtcactcgtgataagctcttctctcccttggaaagccatgaagaagactagtgttttcacgcccgacccgaaccgtccggtccgaccggttaacccgtgacccgaacactttttcggtttgggtttagtattaaaacccaacgaaaaaaaccacaaaaactcgcaattaacccgtgacccggtgaaccggttgaaccggccgggtgtgggttttaaaaagttctcttgattttacaataaaatatgggattttagactttattcaattatttttaaaagttttttcagtttttaaattcatttgatgttttagattttggtgaagactttacaataccgccttaaaattgaatcgaatggtgagagagacaaccgagattagttgtttgaattcacgatgttttattaatttatttctgtcattgatgatctcctaatatatttgttacggtgttagacatttagttggatttcaaatttttaaccactttatttattgtttgattttttctatatatatatgtatatttgggtataaatgattttatattttgttaaacataatataattttatatttgattaaatatgatatgattatttttgttttatatttataaatactaaaaaaattttttataaaatactctaaaatttttttaaatattaaatttattaaataaattttaactaattaacccgttgtccaacccggttgacccgatgacccagtaacctaaaatgtagtccagttcatcgtacgggtcgggtttcaaaacattgaagaagaccttcaattacttctgaaacaagttaatcaatcacgtcgttcgataaactcttggatcacgtgactctcgttggatatgtcaatttattaacactaagaatttctcgaaactaaaacttttaaatggccaaacaagaaagtccacacattctttaattatggagggaggttgagaaaaatcttcatcatatctttctatagaacatgcatgtatgcatgtagtatgtagacacgtacataatacatatatagactctccattattggttacggtgagttatatcgtaaattaaacccccaacaaaatcaacatacgtaatataaataatactatttcccgatattattcttcttgtaatttaatatttggacccaaaaaagtttatgtatcgttgcagtttacacatactgaaagagaagctactaattaaggcgttattgaatgttttttttatccaatcatgtcaatttacatgtattaagaagcttaaaaaattctataatgtataataaataatagatttatttttaaaagtatcgagagtaaatgttaagggtgtctgatcatacaacttttttacagtttttaatatatgtaaccttcttggattagtcgtttaatcgctgtaactctcaaataagtcattaaaggacacagactttgttactttattatagaaggcaaattatgttttattagccacttttcgattttttttacgttgaatacatggaattgacttagagatttatttcatttataatattcgaggtcacacaaagctccgaaaagaaaatatactacatataatatttattttccccaaggtgtgaacgtctagttgtcaatagactggattgtgagtatatatatattaaaaaaaaaaaaaaaaaaggaaattgataacttgaaaatatttcgtttaaattaatcactacatcgaccaagtaacatattcaatcccctgtatcggtatctcaagagctgcaattcgatttcccctattcacaaagggttaaaaaaagagagccaatgggccatatatgtaataaaagaagaaaaaacgcattacacaattacttttcaaatgctattttacccaacatttatcaaaagcttatgttgatcatttccacttaaaattttctatgtactgacctattgagaatgtatctactgtctttatggttgattctatgatgctcttatcgatcggttcttttacgaatgtataaacatatcggatgtgctagatataagttacagtttatggtaattatagatttgcggactgaatccggtcgttgagaaaacaaaatataaatacgtaaaatttctaagtggaatgggtatatagtaaaaaaaaggtatatagaaaaatgctactaatttaagaggcggaaagggaatggcaatcataaccatattaccatatagtaggaagacatggaccccctcgctatccaattgataatatctcccatcgtgtatgtgatttcaaagatatctagtatcaaattttgtaatttgcaagtccgctctttgattttctgcaaaagaaaaaaccaaaataaataaacatttgattagggaccttataattgcggtcaagttcttcttcttactttgtttttaaagtgttctaagttaacatctctaaccacccactatcttttctattacaaaaatctaaattattagactcacaattcagaactcatctcaattttcggctgattaaacacctattaattaaatgtaatgaatctgatgatgtaacattatatcagggcaacatgtgaacgtggcaagttatatacacaccattaaataagccattaattactattcaatattatccccaacaagaatcgacatataatatttgatgttcatatacaataatacaactacaaaaaaaatctggtccatcgttaacttttaatcatataacgatcgatcattgagctcttaaatcctttggttggtaatccaacaaaaatatatggtcgataagtttggcatatagatacaaagggattcactttggttattagaaaaagttttaatgacaaaaagcttatgttttacatatcctagagaaggttttggtttcgataaaaagttatattttcccagttatatatacatattgattataaataagaaaacgctgttttttttttgttgaaaagacattaaattattgatatgcatgtactatgtacagtcctaaacaaataatggatactaaagctatgtatatgaatgcaaaacaacaaactctgatgaatccagttatatactacgtataatttatagcttcccctgtatacatctgtctggttatatatatatattttttttttaaaccaaaatattttcggctaaatttgaagatcaatgatgaagtatcaactacaggaccgaccatttatttattgctagaaatgtagcttttgatgatgattatttgtggaaattaagaaatccaacctgatctttttttaatacttttacatctaatgtacactgtgcgtgagaagcgggtaatttttaaaaaaggagagataaaaaaacaaaagatatataataatgtaaagaaaaaatatacatattatagtattgattattgaagtgttaaatggtcgtctatatattgacaaagaagtctctcacattctcacactactcaaatcttcatcgcttagatctttctttaaaaacaaatcagaaattttcttaagagtcaagaaaatttcaagaaccaattctataatgatctcagtggtgattcttactgagctactagtagagtacacggcagctctagctaaactcaccgccgggattcttccacggcgtaccggagatagaaacgccgtaaggatcggtggttttctccttccttcaccttcttcaacgacgtcgatgattcctgatttctcttctcatctagttgatttctgatttgccaacttttttattttggctgatttattcagtttttgacttcagatcctagctcccttctatgatctagtcgatgagaagcgactgagatttttactgagtgtctcgtcgtcttgaatcacgttttcttgaatcgtatagagctttgtagaatctgtatctaatttttatatatagagatggttgatagttttgaagaactaataagtttactagatctttttttgtttccatgtgatttgtgtttttatagtactttaacatttgttaaaggctatgatcttgatctgtaatttcataactagacctctattttgctttatggtcaatgaaaacttgcgagcatttgttcacaaatcacagatgagggttatcggagtctcgaattcgatttcgaaaatgagttattgaatttgttaacattagtatttcgattaacttcttgacatttgaagtccttgatcacgtccgaaaaaaaagaagaagaaggcaacttgatcagtaaaaattgctttaagtttattaattttctacttattaaaatatgactgaagtagccacaagttgatatataacggagtaattggtaattaagactttgaagtttgaaccttcaaagaagttaaataatggagatttgtaacgtacgccatctttattaattttatgagccaaatgttactatctacactaattccaaattaagctacagaaattaataaatttgtgatgggatatgtttactgaatcaaatgaaactaaactagctgaatgaatattctcttgatgacgttgcaaaattgtgaacgaatgtcaaaattgcgatctttttgtattttcatctcttattatattttcacaattacatcacttatataatagatatttaaaaagagaaaatataataatatatttcgattacatatatgcaagtttatagttcaaataacgtaacagtgataaataaatcagtatagtcggagaaaaacctcattatgattatctgcattttagtctgtacaaatatatacactatagttatatatggtcttaagactatgcacaagtgcaccgactcgtttactgagcggcgatgtataaggttgttggtgtctgttgttttgtgggatttaaagtatattgttgtctacatgatgctagacaagtaatgcctttctgtcttgcaaattgcaatatagaaacttttaaaaatcaagattcgaaaaaattccaaatattggtatatataaatacatggaggagtatactgtaggagatagctaaagacaaagttggttggatatataatggatgaaaaaaggagccaaatgtcgcaaacgattttttgttgataaaagtgttggatcgattggtgccttttaacttctcataatgctataaaattctacgtaaaaacgatcttttttctgtcaacaacatcaaatgctaattattcatgaatatttttttatttttttttgataaactgtttcattcatgaatattttgtttttaataacatgcagaatgcgaatttgagtttagtaatgtatcaaaaacataacacagactacttgtatgtcttattcactacaatagaaacaaaatacaaagaatttttaagtgttaagattttcaattcatgtcctaattaatagttgacatttttatatatgaaagtcttccacacttggtttaaaatatactgtaaaatttcgtagactttatttatttatttattaaactacagaatattagatgatatagtccatatcttttatttgaaagaaggttactttcaaagtcattttccagttctttttaaaataatacagtggaaagtagaagataaaaattaataataacgcagcaaggctaggtaggaacagtgtgaaagcaatggtttagtcgagatttctgcgttcgctaacgcgtcatggcatctgccggctcgtgggtcctaactcctaactattgtcacctaaactctcatttttattaaaattaactattaaggaaaaatattgttatttttattttattttggtaaaaaagataaaatatttaactatgtataaacaactttataaaaaaataaaaaaaaataagtaggtttaaaacaaagaccttcacaaattataacaattaaaaaagctctttttttacagctcatcttgaagaagaaaaaacaacttgtgagacttgtgaagacgacttgacctaatatatatattttaaaaactatttaactaaatatcttaaggttattattttttaagaccatctttagtacttagcaaaaaaaaagacttgtatcatcaattttgattgcatcatttctcatctcttagttggtggtagttattaccaatttgcaaccagttacaatcaaattattaatatcattactgctatgaatcattgttgatatgaacgaaatttattgaaggtctatctactctcattatgaatatgacccatgatagactgtaattgaggtatacatccgttgacagttgtttgttgaagacaagttttccactaaatagatagaacgttttgaccaaaaaaataaaaagatatatagatagaacgaaaacataaggttcttcaaaggagtgtaaggtatcaatttagagcattttgtggcaatagttttatattaacaatataattcactcaatatgaataacttgaagtttcacaattcgttcacaacacaagtaaaccatagctgtagttgtttctaaatacatgtgtttgaagataatctgaatcgtggcagccaagccttttaattgtagattgtgtacatgacactattcaagatcgaattttcaaagttggttttaatgtttggaatgtagcggtttcactttgaagctgactagtgggagatagtatttatgagactagattactagatcccacacacgattgaattcctcaaccatgtgtactactagcttataatggggaacatcttcgatgggtcaaatatataccgagatttttcaaatacagaagatttaagccaaatgaccggtatagctattggaattgtgaacatcatcagcattattgataggaagtagaaagtatctataaagtcaatagtcaacgttctacaaaaacaagtcccaaccaaaattacaggcccatattagaacattttccaagtctctctgttttcaatcgcttagggatttaaacatttgaagttatggaagctatatcatatttaggtactaaaagttgtttgttcttcaagagcctctttaattgcaaattttctcatgatcttaaaatcaccatcaagccttttatgcattgaaccccttagacattctttgagctatggttgaatctaaatgctcaaactggatcaaaaaatgtcaaaaaagattaataggaaagaacaattcagatgacccaaaaaccgtgctcttacttcctccgtgaactatcgatagcgaaaaacctaagagtttaaaagtagtaacctagaagcaacattctccattacttttcaagaaatttgcaaatgaaacttcaatgcataataaacaagttcatactaaggaaatgtcattacgtcacattacttctctaaaacctaaatcaatctattagtctagccagagatgaagaaactacttaactgatgaagtcataagaaagatctctaatccgtagaagtagccagatttcactatgtcctacacaaattccacaaagcagagtcatacgcattgcaatgtgaagtcgatatagtccactctgcacaaggagcaggcttatcacacacgtaacagtaacactgcattgcaagacaaacacaaagttaatccatttaattcttcaaatccacaaagaagaagaataagaagtgtttaaattaccaaatcacagtggcttgaattaggagttgatccaaatggaaaattcaaacagaaatgtcttggatgtggataatctctacaagccacccattgaatcatatcaaattccattaaaacataaatttttgaaataaaccctaatttcaaaaccttgaatttcaaatctcaaacctggcctgtttcatggatgatggataaatctttgtcaccttcacgaacatcatcggtaaaggtgagttttttaacgtcgaacgaatcaaaaggatcgaaatcgaggataaagcaatcctctgtttcttcgaaccttttcatgtcttgtcttgttttcagacagaatatccctacgagtggcgtgtcatcttcttcctttttctccatttttttcgctacaaaagtctcagagatcgaaacggaagagacgagtgagagagacaccgaaccgttgctcttccttcagacgtagcgtttaaaaaggctttttatatatagcaatatgggcctaactattagcccaattagacttcattatgtgattggcttattattgagtgctttagcatatatgaatcaataagcctgcttgtcaaagaagttgttggttcaaagttaggtcttttctataaaaccgcatcgtgttattcggtctgaacgtagacaaatgttcacggcaaatataacccgtctatccgcaaggtctatactggaataattcagccagcaacaattcggctagcaaattggtttcaaacattaccaatctcataattagttaggcattgtcattacataatcctccaaagctaatcttaatcggagtaataatagctctcactctcattggttggtgacttcggatccacagagtccgctgaagcattgcaatgagaagacatccacagtgcacaaggagcaggcttatcacacacgtgacagtaacactgcataatattgttgatctctactgttaaaacaatgtacatatctaagcgagaaaaaagacagtttcatagaataattttaggaaaacattaaactacaaaattagtccatttcatacttcacttaattttttacttaaacccttcaatgaaaagattaacaattaccagatcacagtgggttgcattagaagttgatccaaagggaaagttcaagcaaagatgtctcggatgtgggtaatctctacaagccacctgctcaatatatttcatcacattttgtcatgattataaatatgtgtaaacccatttgacccccaaaaaagagaaggaaaatcatatataaaaccctaattatagccttaattttaaaactcaaacctggcctgactcatggatgatttccaaatctttatcaagggaaaatgagagccttttaacgtcaaacgaatcaaaaggattgaaatcgaggatgaagcaatcctctgttttttcaaatctcttcatgtctcgtctggttttcacacataaaatgcctctgagtggactcccttcttcttccaatgatggtttcgttgttctcgccttcgtccccatttttcccaactcgtagaggtcggaaggaaagagtggaagaccaaacattgcagctagtgaagggtcttaatgttttagtttttttttgtagtcataaagagtagtttctaacttctagacttgtaaaaatcgagtgagagaagggacagttgcaattagagtaaggccttaatgctttagtaatatgggccaacttataatggccgaaaactacaaagtgcaaacttgaataaaatcagacttttgtatgttcggcctaaagaaacttggtagaatattgagaatttggttggttacgataacaaggaaatttgcaaaactatcctcaaacaaaacaatgatttgaaaacacctctcaaaaaacaccaaaggcataagctagttccgaaaatgctagttctaatgtttgcgtctgatgatatatatttatcgaggacgtgatattcaggtgtgaagtctgatacttacgcttgtgcgtaaaacttcaaatcaccaccctttagtctaaaataaaaataaaaaatcatatatttatgtttgttcatatattatcatatgcatgaaaactaagtgtactggaacaccgaacatttagttgtgaatttcatgtcgagcaaccaccaaaaggatacaatccatttccaatcctttctatttattttacgatttaattcatttaggtgtcaaggttaacatgtaacatccataaatactattttacttattcttttatggataatataaggcacgttctgtgatcatgacgtataacacggtagtaggtaggattttttttttttttttccctcaataagactttgaaaattgaggtttctcgtcccatttttattttttattttctattttctaattgctattatagaatttttcagattaaagctatacttttgaaaatagaggccatactccaaaaccttaattatattatttttactatgattaagaaaattaatcatcgaagtcaactaacttggatgatctaagtacattggatgataacttgactacataatttaaatttaactctaaatgagcttgtcgggtaactttgtcaaaaatagtattttgtttttccactataatttttatatattacttttgatcttcataaaccttggatgtgttattttggttgattttaaaatttccaatgcaaaagtcatttccaatcataaactggaaactggtgtatatgacacatgactcttaattaagctatctcgtatacaacattcgaggattgtcatagcacgatcctctttattgaatcaaatgttggactttacatctttacttctgtagttcaacgtaccaatttcgacggacagtaaaacagtatatgtaaattataaatattatataaatgttgtactttatatgtaaaatttgtatataaaacaccaatttcttcagtgaataaacttatcaatttcaacggacataaataagcaaatgtacttcttcttttttgtgtgcaaaaaaatccgtatgtacttgttagtcgaaactaataaatagttgtacctgacttgtggtcctataacagtttgtgtttgttatctgaaggcaatgcgaagtgttggagatatgttcacaatgaacatctttcagagtagtaggtgagagatgagagatgcttctctttttgtaatacgaaattctaccaaatcacaagttcacacgtgtctcgtttgaaaagaatcaatttttgtatcaatagttataagaaaataaattatttgtcttgtggttgtggttgtggttgtggtaggtgagaaatatcaaatatttttctttgttaaacaattcaaacaaagataaccaactctgatgacttacaatggtagtattttcttctttttttttggacaaaaaatggtagtattttctaatcatggattcttatcatagattactacgaatttatttggattggatttagtttacaaacaaaatttcaccttacttaattcaactgcaaagttatttgaagagtatatacatattttgatgaggatatacatgtgttctttatattgaagggtctttacctactaatttttgtgtatgcatgtattcttaacttaatcttgttgttaaagcatttaagaaaattaaaagtgatctagaaagtgaagtacatcgaatctggtttagtgaattatctttcacaattcaacacaagttgtatagaaaattaagatggtgtaaaagtattcgtcatgctatgacgacgataaatgattttaaaattttcacttaagtattagtgtattacgtatatgtatcttaataaagaaaacaagaataatcttgtgccgaactcaatttcatagttaaaaacttttttttttggacaaccaaatgaatttaattaaagcatttctaggtaaaacttttcaatcctttcttattttctattgaagtagctgacattctatgaaagcaaatgtcaaggaaatgatttagcgttgaaaaaaatgaatgataacgattttaagcagaaactgacaatcaattaggaacaagtgtgtcgtctgggtcctactcaccatactatctgtccgactttgattacacagtcctctcaagtctaatctttttccttttattaatctatttgtttatcgattaagagtttgatcactctatagtttgtataaaaacgtttggtttcatgagaattaaagttaaaatgacgacccaaaaaaatgtttaagattgtcaagtgtaatgaccatccatacattcttagttaacctactttcatttacatatctgctaattccaaattttagtaccgtactttttcatcttagagatacttttctttttccaactttttctagaattattctctctatttaacaaaacgtgtcattctaccactgtttacataagttaagaaaaaatgtgaaaaaaatattttatgtcctttgataataatctataacagtttatctctctagtcaatagactgaaataatagggattaaaaaaaaactgcaaaacgacattctttgttacacaaaattattatattaaaacaacattctttgtgaaaagggagtattattaattagagtaaacggttaaaacattatcctaacactaataatcagttttgaaattattgttgggctttgtatgatttttttgattgttttgttaaagaaatatgatgataaatttagatatcacgtaattaaagaaaatctgttatactagaaaatcttaatagtacaacttttagcgtagtttctgttctttcaaaaatatgacaaacttgcttactgttaccgaatttaatagctttttatttttggtgtgtgcgaaaccgaatttaatacctttatacatagcaagtttaacataaaatttagtagtacataacattgtgatactagctaggtttcctaaaaaaaggcatacttgttgttactgttagcgaatgtaatagctttatagcaagtttaacatatgtaataaattataaaagctactttagttataaatttgtatttttttagaacggatcgtaatatatttggatgtattatctccgaaatatttattttttcatggcctattatttatttttattaaattttctgacattatggcctattattaattgataaaatacaaaagaatggatgtgtctcgattttcaattggaccaaatcattaagccagatcagaaaattgcgttaaaatatgccaatcgtctctaccttctttaatatattttcatataaataaacctctcaacctccacactttctcacccatcacacaatcctcaaaacagagtaacccaaaaaacagagcaatctctaaaaaatctcaagaaacctcactaaaatgggttcaacggcagagacacaattaactccggtgcaagtcaccgacgacgaagctgccctcttcgccatgcaactagccagtgcttccgttcttccgatggctttaaaatccgccttagagcttgaccttcttgagattatggccaagaatggttctcccatgtctcctaccgagatcgcttctaaacttccgaccaaaaatcctgaagctccggtcatgctcgaccgtatcctccgtcttcttacgtcttactccgtcttaacctgctccaaccgtaaactttccggtgatggcgttgaacggatttacgggcttggtccggtttgcaagtatttgaccaagaacgaagatggtgtttccattgctgctctttgtcttatgaaccaagacaaggttctcatggaaagctggtgagttttcttcatattactcgtatgagttctgacttttaatagatcgttatggtaaatcaagctagacaagacaaattcttttttgataatgttgtttcataagttatggatcttggttaatggattaaaaatgaaattgtgcaaaggtaaaggtgagagagaggcacaaagtgtcaaagacaatcagacaaatacagacaatacgacacgtatagtctaaacctgctctctccactagaaaactatattatatgcaattcttttagttagtggttataacgagctacttaaatgaattttgttgctgtgccaagattatacaaataataaggagaaacttcagaaacatttatgttagttggtccaatcaaaagaaacactctttttttttttgcagaaaaaacactctttgtttctatgttttagttcatggctttaaatagagaagctgtaatcgttcttcctattattgagtaacaaaataaggagatagaatagcaacatgattaggaagagaattgttcttttcatgatctagaaaacttcaaatctggttttggttttcttcaatcgaaccggctggttctctatgcaaaccggctgctctttatcaaactgtacaatcaacttgccgtggatctagttcaatcttgtggtcgaattcaaaaactttattatagttagtggtaatcaaaagttgatggtatcgaatttgaaaaaacaaaagaaagttgagggtttaagttaagctaaaagagtgtatatgtgttttcttaaactaatgccaaagagtcatgttttaggtaccatttgaaggatgcaattcttgatggtgggattccattcaacaaggcttatggaatgagcgcgttcgagtaccacgggactgaccctagattcaacaaggtctttaacaatggaatgtctaaccattccacaatcaccatgaagaagattcttgagacctataagggttttgaaggattgacttctttggttgatgttggtggtggcattggtgctacactcaaaatgattgtctccaagtaccctaatcttaaaggcatcaactttgatctcccacatgtcatcgaagatgctccttctcatcctggtatattaacattttcctaacatttcgcaaaatgagatttccttggaagattatgtcatcttatgactaaattaatgtaggtattgagcatgttggaggagatatgtttgtaagtgtccctaaaggtgatgccatattcatgaaggttagtaattaatcaagtattttacaccaaattcaagactaattaagaaaattcttgacattatacgtaattcatcaaggaatgtatctcaaacattttctcattgttgtaacagtggatatgtcatgactggagtgacgaacattgcgtgaaattcttgaagaactgctacgagtcacttccagaggatggaaaagtgatattagcagagtgtatacttccagagacaccagactcaagcctctcaaccaaacaagtagtccatgtcgattgcattatgttggctcacaatcccggaggcaaagaacgaaccgagaaagagtttgaggcattagccaaagcatcaggcttcaagggcatcaaagttgtctgcgacgcttttggtgttaaccttattgagttactcaagaagctctaaaaacaaacaatgttcctatgaagatgatttatatgtaaacattatctcatatctccttccacggttccaaaactatgctgtttaataatggtttttacaagaatttgattatgagtttgtatttttgtttgtttggaacaaaattatgtgattatagggaaaaataaaatgagctattattgaagaaatcacagtgaaaaaaaaaaagattatccgattacaatcaatcacgttcagatagtttccacgtggactctgttcgttcaccgaccaagctagtttcaacgaatcttgcttgattaactcaaaacttttcaaacttctcttacattttctagactcttctagctttacttctctcgttaccgattataaatatttcaccagccccttcttcttcttctcgtcaagaaacaaaaaagttacaaaatctcaacaaaaagaattcgaggatgatgtctatttttagcccattcgaagctctttacgccgaatccaacggcttcaagatgatattctcaggcaccaagaagcaaagctccggtgataatcagtcgccggcgacagatcagcaaaagaacgctggaaaaactccgatttcgtcagacgatgaaaagagtaataagaagaagatccaacctatgaggatagctccagagctcgatggtcttcattgttttgaaactattcttcctttttaatgatcatgattcatgataaagagattttattcattacttgtaaaaaaaatgttccttcctttgtataaagattaataatcatacagcttattccaattctataaactaattttggaatggattattcttaatctacttaaaacgaatctaaatttatatgttgatctatattcttggtctcaagattctatgaagaagtagtctgactctcacttcttgttgttccttcgagctgacgttttcttccaccattaacaaaccttttcccaaaacctaaaagaaacgcaggaggaacaaaagcacctccgcttaaactgcagacaaccgcaacagctccaccgataatcaacagtttcttcagattcgcagctcggtttccttggtttaatgtaacgggagtttcagtgacaggcgatgcaccgttgctgagggagatgagatggtcttgtgtgatcttggtgttgatttgagccatgaaagcagaccgagaaagcttggttcctccatctgagagtctatgcgtttggtaagcacgtaaaccgggttccatcttcttcactgctccccacattcctcgtttcactccaagctttgcgatttctctaggtattcccatgtcttcgtggtggaatagaagtacttcgcaggcacttgttaccccatcgtctcttcttgattccactgcataaatttaccatattgaggaaaatgtttcactttgtttaaagttattcggttcttgaaagatcacagaagatatctttacctggtcgaatgcaccagcttgagtagaacaaatccacgcgtttttgtttgttgttaggcggtatagaaggaaccgatactccctgaaccaagaacgagatacaatcttagggtgttgttattgtaactggttctttgcaatgcaaagtaagagcacaaaaaatgaatctattcttcatctcttttctatataacctgttcaaatcccaaaccaactgatttagaggtaagctggcaattcaattgcaattctatgcagaaaaactagcctgacatcgaagctaactcgagcttctttttactctttatcacatcaatgtaaaagagtccatttttgttactagtacacatacctttgtaacacagtaataagagtttccacaattccatatcctgcgaccgattacatactctctatcactgcagaagaacgggaactgcaacaccggaacatacatgaaaggaaagatcaatctaagaaccactcatcaaaatgttacaaaacaagtaaagtaactagagaggcagagagtaactaaccttgcgtatccatctaacaatcatggttccagtactgggacactcttcaacagtagtggaattagaaagcattgtatcccaagttggtctaaactcatcatcccagaaaaagtctcttaacatcacaggagttgcatcttcaaacacagttctacttctatactcagtaggaccattctaaaacaaaacacaaaagacccatcaagaacaaaaagaaacaaatctctctatctcaaacacacaagagcaagtaatatattaccttaggttctctcaaccaagcttggtatctcataccaggagtaaaacgatccatcatctgaatccaagcttgaccaccatctttcctctcaaccaattgcacaagatgtctcaaatctaactctgttacagtattaggcaatctctcctttgttttcttcactctacaaaaaatcaaaacacacaaaaattaacaaaccaaaacaaaacccttagctataactaaaccatcacaatcatcaaaattagctttaccttgaaaccaaatccaaatgttgttcagaagaatcatatgaagaagaagaagaatcaggagaaactgtttgtctctgttgtcttaaagccatagtccatgtatcacaaacaagagcctttaagcaaggagctgatccaaaacccttcaaaggagaagtaacaacagaactaggagaagaagatggtaaagacaaatcaaaagatcttggagcagaacattgtaatttgacttgtcgattattagaagaagaaacccatcttggtttccatgcccatccaataaccaacccaataacaaaagctaaccatcctgtgattagccctaatattatactctcaagcaaagccataactttgcagaggataagtaagagaaagggtacgcctttaaatatgttaagaagaaactaaaaaagaaacgatttttttatttggataaagatgaaaactttgaaggcggtgagaggaagaagacaaagaaagggacatgagtggtgagaagaagagagataaatctatggacttatggtaaaggggttattattcgtagacgctaagtagtagtagccattgatggagcttgaaagaccattgctttttagaggaggagaaacaaaaaaaaaaaatggtggacggagagtgtgaaacgacgaccaccgtccattaaggaccatttctaaattacggttgattaggaggaacacttcaaatcttgcagggtttatttttctttccccaaattaaattctgagttttattagtcctttgatttttaatatcgtaacgttattttatagccgcgtttttgatgtcacattttataaatgtgttaaatgtaaatattggttacaaacttttataacatgattgttttgacttttttttggaagacttgactatggaattttgctcactagcattaactcatctgtttgatgtattcaaagtttgaacatctatttactaggtctttcatcttcttaaaactaaaaatttctcacatttcttattacttctatcataatatttacgtatccaaaaaaacgatcagtcatgtcaaaattgtttgagttaagaattaaaagatcattttccaagtttgagttagtttatgaaaatcagaaaaatattttgtgttttaatcagtacaaaattgtatatttgtgctgctaaatatgttagagtaatgcaactatgtttgttttggacattaaacaaaaaaagaacaatattgcaaagacgaatttggaatcctttgaccttgccaaggccatagacacattaccacttgtgcaaggagcaaatgacgatttataataaattacaaacaaacttatcttaataaatttatcactaccttgaaggggcattgagaccatagcatgttacatgaggaaaagaaaacctttgtactgattaaaagaacacttaaagagttaatccattgtcacggctattgtcaccaccattaccattgccacgcatgatcgtctccatgactccattgttgccattaccacatcgtttccacaatcatggcaaatgcaatatagtggcaaaggtgaaagagatagacagatagtaatgttccgatactaggggtggcttaaataatttttctatcgtaatgttaagatgataggtactattgcatttttggtagatgaagggtaaattatataagattaaaagtttgaggattcttttgcaattttcccatattagaaacgaaacatgttctcttctcaggcccaataacattttttgttaaatctttgattattaaagttaacccatcttggaatcaaacacgaccgttaaaatcagaaaccttggttttggatatagccagccatggtgatcttatctctcgtctcttgttccttctccgttttctcaccgccgattagtctccggcttcatctcccgccggtaacttctctctgctcccatggaaccttccctgcttcttctacatttcggtctcagctacaaccattgcttatcagctgcttaaatcatcgagaacctgctttaactttccgatgtagctgccttagctctccgattgaatccggaagtcaaattggtaggtgaatctgactatctgacatttctctgcattcatttgttctctgaagcatatttgcaaacacttggtgtgcgttaatgcaaacacttgtgtgcgttaatgcaaacactaagtatctctcttttgctttgcagaatctctgttttcgttattccgagatattgggtttatagaagaagaaactgagatgattttagcgaagaacccagatataaagtcgacatctttggataaaatcggtgctcgtgttgcttctcttcagtctctgaaaatcaatggcttcccgcttcagggtttgatagctaagtgccctaatttattgacttcagaagaatttgatctcgttattagtttcttagttgatgaacttgaaggaaggcttgatcctgaattagttgagcgcttactctctgtggtagacacatctatcttgcttagttttaatcagaaggtgagattgcttctcctccatgggatacctaaagaaaagatctctcatgtattgaacaaagtgtacctaaataaattgctgtatcagaaatcagttgaagatattgagagattgattagtttcttggaaccttttggtggaattggtataattgctaggcggccagtgattctcaatagtgacttggatagtcagttgattcctagggttgatttcattaggaatctaagcggggaagacgatttcgctactggaacggtgctacgtagacttcctgccatattgagttatagtgttgagcatatgaacggccaagtagagtttctcaagtcttttgctggcttgacgagtgagcaagtgtttaagattgttcatgtgttccctaatgttatcagcactagtaaagagaggaaactgcgcccgaggatagagtttctgaaggaatgcggctttgattcccccggcatgttcaaattcttgagtaaagcaccattgattttagctctatccgaaaataatctctcgcacaaactcggttttctggtgaagattggatataagcatagaacaaaggaactggcctttgcgatgggagctgtgaccagaacaagctctgacaatatgcagagggttattggactgtacttgagttatggtctttcattcgaagacattctagcaatgagcacaaaacatcctcaagtcctgcagtataattatacttctttagaggaaaaactggagtatttgatcgagtacatgggtcgtgaagtcgaagaacttcttgcattccctgcatttcttggatacaagcttgatagcaggatcaagcatcggtatgaagaaaagttgaagagcagaggtgagaacatgtctcttaacaagcttttgacagtatcagctgaaagattctctaaggcggctgataatatcgaaatgatttgtttatgaccaagtttgagttcattgagaacttacatcaatagtttttatcacaaattctcacttcgatatcaacagtaatactctaactgtcttgattttatagagttaagcttttcattatgtaaaacacttacaaactaagtagagaacatgtcggtcagaaaaacgagaatattgcaaaactggagcactaaaaaggatccgagtagggactattcaaagcaaactctaccctgcctggattttatttggagcaaataatataagtttgggcttttcgtaaatataagttaagtgggcgttggcccgtatatcgccaaatcgagttatgtcatgtgctccgtaaaagtcccacatcgcttgcctagaaacttaacttcttgaatatataagactgtgagagcgttgatggtcacgaccttacttgaacaggatctgttctataggctcgtacctctgtttccttgatttctcaagagacaggccttttaccctggttgatgaaccatgaccgtgcggctagagcgtgattgacggccacgatcgtcttcggacgcatccggtgctgtagaggatcgttactcggctcggttctaccttgccggggtggtcgcacggcggtctgacaggtccctttccttctttttttttttttcctttctccggttttttttgctctgttttgaggtctattgaacactcgctaaattaaaaataaaaacatatatgattgtaggtgatattagagtctctttatttctaatctttttgttataaagctgtatgactctgcttctccttgtagtttacaatctctgtttcatgttctttgacaaaaaaaacttgaaaagtggaattatttgtttcattacagatagaatcagccaaaacacaactactaaatcaaagttgttacaggctttattaatgtctccttttttgtttgtttctcatcttaagccaaaccaaaggttgaaacaccgaggaaaaatctcatatcaaattttaggccaagcctacgagcttctcgctgacttcccaaactctacgagccttctcgacatcgctagcttcttgagacagctgattctcaaatgaagccgaggtcttgttccagctccaatacactcccgacttcgtcaagcttggatcagccaccaccttcaacaaatcaatacataggttgagtacatagcaagaataataaactgaaagaatggtttcttgcgtcacaaacaacgttaggttttggttaattttctaacctgagcaagtcttttcccagcctctgactcggagacgtaaccttttgtgatgtacttctggaaaggagggaagagggtacggaaaagaggaatatgctctctgaacaaaccagtcgttgcaatacaaccggggtaaagggaagcaaaagttatgccggtgtcttcatggaaacgcctatgaaactcctgcattgtcaacatgttgcagactttgctatctttatacgcctttgcgccaacaaaatctcctccatctatcatcgccgagctgtttagcccgttcaacccgcctgctagtcccctcaaatcaccaagattagcctttggaggtacattaccagccaatgtattagtgtttcctgctcaataagaaacaaaacgaataagatttcagatttagggtttagagtaagtagtaagtacataaagcattcttcttatgaggagactacagaccggttatggatccaacaatgatgagacgttttgatggataatcggagttcttcaagtcatcaatcaacaatcttgaaagaagaaagtggcccaaatggtttatcccaacgctaagctcaaacccttcagcagtgaaagtaggttgattagccgttggctgatagactgcggcattgcagaccaacacatcgagaggcatctcagctcgcctgaagttatcaacaaactgcctcacgctgtccaaagacgccaagtccaaatgcatcacagtgtagctgtccttaggcatccctgcagattgagcggctctctcagccttgaggaagtctctgcacgccattatcacgtgccatttacctgtctcggctaatgcctttgccgttgctaaacctagccctgaagaagctcccgtgacaaccacgtttccttttctaagtgttttcttgcggtctaaggaagattttgtgactgatggagttgaagtcgcgattgcttgagctcgaataatcgctttattattcctcaagctctgttccctctacaaagtagaagcatttcaattgattagattattacatcattttccaagaaaaatactcataaaagattgtgtttggtaccttgcatctcaatgaggaagagacaaagtcagctttgctttgctccgaaagtgaaacaccgaacagactagactctttgaatgatgatgatgctgaagcatttaattttccctgcaaccaaaacatgcgaattaatctccgagacaggtcataaacaaaaaggaaacgattactaaaacaaagaaagagataataaaatacatctttgcggacagagaaagcagaggagaccaaagaagcagcttgaagggccattgtttcgtttaagacttaaagagtgtaatgtgaatgttatgcaaatgtctgtgcttgcgtgagtttatatagaagttgagacaagagaaaggtggtcccctcccatatgtgtttcctaggatatgtgtggataagattatctttagggaaagtttttgtcagtttcttttcttaaagccaatgataattcgagaattagattttctgtcagtagatattttaatgtataatttcatgggactccatctctttgtgtatgggaggattaacagagagctagagccctagaggtatgaaacaaaattatactctgacttgttatggacactctgatctaaagataaaactgttcattgaaatgatgaattgacaaaaatacccaattattttacatgtaaagataaacctaaagacaattacaaaatgtgtatacaaaagtttaccatatattctctccttgaagagttataatatcagagacaaattctacaaacttcaagttgaatagcacagactttcatcgaagcaaactatattggtatatgaagtttctttttctgcctatttgaatctttcttaaaaataacattatatatatttgctagagatttgaattttagagataacaaatcagataaataaaagaagcgtggtaaaaaaaaaaaacgagagaagtcagtggatgaaccaaaccttctctcaatctatacacttttgacaggagatggttttactaagggaaaatttcactttgccttaggattttgatattgtaaaaccttctccttgcatcatagacgaactggaaatccaaaattctgaaatattctgatttcgcctcgtagactgccagtcacaatcaccatagaccacgccgaggcactcggttttgtgttaacctgtatgttagacatgtccacgctcacacgagggcttgttctggctcggttttttgcagccagcaagagtttttcttcaggccatgttgctgagactctatcgaagaagtatcggtttgtggcgcttgaaatgataccgttggtgacggttttgttgttggttggatcgttgacaggtgtcggagggttattattggctgtgaaggatgactgttcggggctgttgttagtgtggttgttactgattttgccaggccaaggtgcagccacagagacgtcacgacaataaaagttttcgtatgagtttgtgactgtgacacgtttgcttcttcctgctcgagagtctgagtcgtagttccatacatacacattagagtcttcgcttgctgatactaggaatttcccgtttgatgtaagtgaagccgagatttggctattcgtgttgcgaaatcctgcgaacccgaaaattttctaaaactcagaaaaacacacattacttggcaagaacgttgagcttattttactccaacaccagatcaagaaaaagcgaaagaacatcatgttcatgaaatgtgggactcatgtgtatcttagatgacgatagagcgagaaattcacctccatgaacaataaagttattcctaactcccgagttctaagaatggagaagagagttttaagcttagtattgtttacctttaaacttgtgaacaaggtcaacaccatcaacaacacgcgtacgtgaatctgcagatgtgacgagaacttccgatgaacttcctgccacaaactgtgaaagtttcacgagaatagtcagataaaccagtacagcatccaaaacaaaattgtagtataaatgaaaagatgagaacagaacggtgtaagttgttttagctttacctgaaaaccagtgattttcttgtgatgggttttctttttcctgttcttcagattgatttcgcgtctctgctgcagtttgttatctgaataaacaaaaaagataataagttcaaaagacgagatggagaaacaactcaagtttcagatgagtaagttctcagcttatgtaccatgtgtgttgtataagcagcatgttcctttgtatgaaccaaccaatgcaccctttacaaaccaagagagctttattaaggtactgcgtgatttagttttacccaaagtcacttcaatgtaagaaaaacttttaatggcatacctgtccatccggtgtgtagcaagcagctgtgaccatctcatgaagatcattccaatcaacaacttgatgatcaggaatactccatatccgaacttttgcatccaatgatccgctgatgaagtaattgtcatccacgggattaaactggatgcaagtcactgtatcgaggaaacagaaaactagatgagagaaaattttatgttacataaccaacatagaaattcttgtgtttcagggatttatttacaagtggaagaagcttgattcataccacattatattgacatatgaatctttccagaacagagttgacacctaaaatgacttaatattcttctaacaatatatgcttagtttcataaagactaagaagaaaagtaaatcatgatcactggtggggaataggatggtatatccactcaccgtagtcactatgtgagaagactttcaaacatgtcttgctagataagtcccatagacgaacagtcttatccatggaagaggaaagcaggtgctggaaacaaaaaaatgaagtgcaaagtcttgagaattcaagattttatctgattaagaaagacgaagcagattctcacataacaaacttagaaaacctaaacttagcactagtaagatgagcaaggttcgcatgaaaatttttgctccacaaaataaagttaccagtttgaaaacaaacttcatgctttaaataagaatttgtagcgaaatgagatgatcgggaactcgtacccacctgagattttgaccacgaaagatcaagtacgtcatccaaatgccctacaaatgaacacacgggtttctctgaaagaccaaagactgcctctggaacaagaacattgtccaagctcactgattttcggctaaaagatgttcttcctcttctctttggagacattgaaacgggttcgggtgatccatttgctaaaagaaacaaatttatacttccatcttcttgtttatccatcgacaagagttccccttttctttctgactcaacaaccttccaaatctgaataacacaatcctcaccagcactagcaagatacctcccatccaaactaaacttaatactccatatcgatcctttatgagcttgaatctcttgactcttgaaaagtgcagtaagctctttacacgacttcccatactgcctaaccttaactctctcagggtcatgaaaagacatatctcgactatcatcagttgcagagctaaacctctgaccacctctctcagacggtgaatccctatcatcggtgctccgtcgctctttatacccagtcacactactagcaacattcttaatactctttaaccaactccctctccttctatgtttagtcaccctgcttccactaacattagtatccaaatccacagagtctttacaaacatcttcaacattttgcctcctcatcaactcaagcacaatcggtgacgtaccaacacaaatctcaaactcctccagagtcaattgccgatcagtacctacttccttcaacctctccaacatcccatcttctcgaacttcattcaccacaaactctctcccagtatctaaattcctaatagtacacatttgctcctctaaaacaacatctctaccattctctttctctacaatgtccctaagagatctttccattggctctttgcttataaaatcaacaccatcgtttcgcatacgagatccagtatactctcgatcgacattgtcagtacctgatacatctgatctcaacacacatttaccatgatgattcgaagtcaaaacatcagaaggaaccgatctagagaaatgagaactgtttctccgacttctagaacgtaactgactcgccggaggtagatccggctcattactaagtcccaaaccacgcaataacctgattcgtctctccgacacagattcaggctcagatttccacagctcgaacccagaggtaaacataggaacaggaaacggagtcggatcgtggatcgaatcggaaacattcgggtcagagtcgtaatcagagtttgaagttgaacaagagcaagacgatagtacacgatctagagactcatagaaacaatcgtcattgttatcttcttcttctactttgtcttctttcttagcttcaaatctaacgacgttgcttcgtcttcgattcatcatcatcatcttcatcatgactgaagcaaaagtattatcatctgaaaatgactttgtctctctctgctacagtctttggttggagaaatttttgactgtgagaggttcgagaagaggaattagggattacgagaatcaaaaacgaagttcgccaatggaggttgagtaagagaggagtca

SEQ ID NO: 896 - DNA, 78596 bp, Arabidopsis thaliana
gatcggagattaatggagagaggaaagagaaaaatagaaataaactgttttagtgtttaatgtccagactccagagagaggaaggaggagggagagagagctcgcaacgattttaattcaattcaatatgtttttttttgttcatttttttttaaatcaataatctattatttctgttaattattaatctaaatcgtcatttagttaaataaatttgattatcaattaaagcgaaaatttagaatcgaaatgtagttacaaaattttatgtaagtaatagtataatttgagtaaagtaaatgaaattgatatatatgtagttagggcttttaatgaatgcaacaaagttatcaacataatttattactaagtttattctcataaaatggatatgttagtgtgcaacaaattattttaattttttataccgatacaaaaatcaaaatttaagaatagtaaaatgaatatatgttctacggattaaattatgaattaaattaaagaaattggttctacaacttttcaaaagaaaaaaaactaataatgtatttttattattttttcaaggacaatgctatagtttaatggaagaactaggatgatactttggtgtataatatatgctttattagtctaaattattgcagaaatcgtgcctagtaaactataatggaaagcataagcacatgctgctagacagtattaatttcttttttatataagaaatagaaagaaaaaaaaagctattgttcatacgtagagaggcatagagctttcaattgggtgtacgctgaagaagaaaacgatatatcaaaatcttaccaataaatttcgacataaattattgaaattaatacgactgatgccaaaatgaaataatgaaatgattcaaataattttaaaaagttgaattaggaacggttcatttgtgtatggattagattaaacatgttttgttgtatcattttgaacctttcgtctaaaaagccattgatcttgtttcactataattaacattttttattttgttatcaaatagtaaagggtgagcaaacaaaggctaagaacaaaactgttccaaatacacaaatttagaaaaccaacaatctagtatttgaaagtttacagagaaacatgaccgaaagaaacgaaaatttcggttcagataaatgaagatgggatggtttctttttagttaaagcagcttcatattgtaattttgatattttttagcacatagctttatagctactcatttttttcttcaaatatgttgttcttttggatatgagaaacaacatattttcctcaagcttttttcctacataactacttgaaaatatattggaaaaatcatggtaactaagaaatatactaacaaatttttcttggctaatactgattacaagaaatctatttaaacggttgcaaatacaacaattttttctttgataaaatacaagaattgtatttaattgcaccacgcattattaatgcacgttcgaagcatatagggacaaagctttttttttaatttttgtcatcgaaggaataaaaagaacgaaaataatcatgaaaaatgtatatatattttaaagggtatataccaaaactcgtcaaaaatgaagtaattatgtgaccgatgaaatagacgtaccgtgactaaagactctctcatcttaatattacacgtacgggagatgataaaaatagtgtgttattattcgtttctttctctatactaccactaaaataggaatacagaaatatgagaaattaaattgtagtatttatttgttttcgagtccttagacttcgaggcaagagatagctataactcatctctcaagcagcgaacgaccatattaaatgtgattctctacctcttcaattcaaacattaaattcaaacattaaattcaaaatctattaaggttgtatatttgttagcactcactagtatacgtagtagataatttatgatcttgttaaactcttaaaaaactatattaaaaagtaatcgagaggtttatattaacattattataactgtatcataatcatatacccatgtacatagattgttttattatatagtagcaaatgaccaatatttggtttcgcagtgaaaaagttctacaattttattcatattttaaaaactaagatttttttttgtcaacattaatttggaatgaattacaccaaaagaagttttctagtctcacgaaagaacatgagaaataatcacaattggtagagatcgatggttctaaggaagatgtttgctcgattaagaatacgagtactatactgaagagtataaataattggtaagaatgaccaaaatctactaagttcccaaacataagatgtcgaacggtagttagaataacttattggatgagaatgcaagttaaaatgagttccgatgccaacaattgtagttgaatcatattttaaagttggaagccttaattgtgtctaatgctatgtcaaatccaaaaacagagcatatcttcaaaactacgagtttgaatgctaggtggaattatattagctaacttcatgttactatccaccatttgttgatcacaaccataattatcctaaattcaaatacccaaagaacaaagtttcaatatacaaaatttgcattagagagttgaatatatgtgtatatatataattagacgaccaaatcttaataagaatccaattatatatagcaattatgattcttataaaaactttaatagagaaaaggagaaaattagaaccagaagacataagtaattaacgacaggctaataatagaaagaactacatgtagagcaggtttcaatataataatcacagacataccacatgggttgattcttataacacagctgtttagttaattaagcctatgaagacgattactgtcctaagccactggatatatcaaaattatatatatgtatgtgaggtgcttatgatgattgtttaattttatttcaattaaattctaattttgccttaacagctcccaacactactgtcatgggccattttcaaattaaaatttgtttatcatatcttcattctcttttatttacttagtttcttatactaattagtgaaaacgctactagttactagttagtcaaactaaacaattttaactgccagatttgcattatcaatgataaaaatactttttggttcgtgttgttattgatgaaccagtgatttcgtaacaatgttgatttattcgtggttcaagtttcattatcgatgttgttaattattttccttatcaattacgaaacgaacaaaactattaacaaaaacttttcgaaaatacatattcaaatgtagcaagttgatgaattcgttctccttttatggtgattttaaacaattttaaatctagctaactagtaggcatctatctatatcagtactttcaaaggcttaaaattttatcaggtgcatgtgtaggcatgcatgtatgtgttaatcagttggtatatgtagatctagcgataatttgaatcatgatatgtcataatttacgattcatgtcacaataaaactaccaaagaatgctcttacatttctatactaatggccaattcgttaaatatggagtaatcaaaaatgttttcttataaattaattagggatttgtgttagtgacagtgttgtcttgcatcactattcaaaatgaaacctgcgaaaacatgttattgtgtttttgaatgagaagtgtttttgacacatatggacattatattagtcaaaacgccttatcaaaagtcatattcatacacaaagtagtgcatggataggtctaattgctttattgactaaaatgtatataaatgtgtgttccatatcataaaacattttcaaataaaccaacacacctatatgaattcattaggtaacgtgtataaaacaagaaatattaattaatatattgatttgctcttgaataagtaggcaaaaggatttgtatgctaagtagatactacgctaaataaagccgaacaaagagacattgggccctatttctttataaatgaaataaaaacaaagaaaaacatcacaaaactgtacatattaaaccttttttatatattgatactagtaaataaatcttttaactaaaaaatttgtatttcagtatttggtatcgtatatactttagatagtggattcgaaattctgatctccatgagtgaatttaatgaaaccaaataacacaatattatatatataaggttactcattgatataatttacagagattttatatagatggaagacattattgttaaatggacccaatgaaacagtattaatctgttaatggaaatgaaaaccatccgacttcttttaacttccacttcattatgttcccctctgaaaacatctgaaaataactgccaaatgtcatatgctctataaatgattcacatggttaatttcagaatttattattgtttgttttacctacaatgtcatttgttttccaattaaaaacagttgaaaaaaaaatagcaacacttacacttatgggcttgatactcaatgggctttatgcacaaaaccatattgggcctatcaacttgttattgctttgtttcttcttttttttttttcttgtgtgtattttctttcatatttcaggggaactcaaaaaagtgagactttgagataaattacagagacaacaagatcaaaagttttactctgccattgttactcaagagaatggagaaaacattctgagaaacttaagacaagatgtagtttggtttatgttgtcttatcttattaaagaggcgttaaaaccttacttatacaaagcaaaagatataacctaaagtgttacacaaaggaaatgactaaacaggatatatattgttgactaagctaactaaaatattgaccagcaatagcttcaacatcctccctcaagttggagcatgcacatcgagaatgcccaacttgcgcagaaagtaacgaacttccttttcacccaaagccttagttagaatatctgcaagctgcttgtgagagggaacaaacgaagtcgcaattataccatcaagaatagcatcgcggataaaatgacaatccacctcaacatgtttggtgcgctcatgctgaactggattgacactgagagcaattgcagatttactgtcagagaagatgcgcatagcctgaacgtgagagacaccaagatcataaagcacccgcttgagccacatgagttcttgagtaaggaatgccatagctctatattcagcctccgcggaagagcgactgacagtgggctgctttttcgttttccaagatatgggagtatcaccaagctgtacaaagtatcctgtgagagagcgacgagtgagagggcaagcagcatagtcactatcacaccaaccattaatctgcagagtagaggtgctagagagtaaaatcccttgtcctgggttagatttcaaatagcgaacaacacgaatggcggcgttccaatggtcctgacgcggattctgcataaactgtgcaagagtgtgaacagaatatgatagctcaggacgtgttacagccaagtaaatgagtctcccaactagacgacgataccgtgaagagtctgaaagcagaggagatgtagacaacgagagcttatgattctgttcaagcggaaacgcagacggcctagcccccaaaagtcccatttcagaaataatatcaagaacatacttcctttgggataggtagaatccttgagcattgcggctcacttcaatgccaagaaaatatttgagcaagccaaggtctttcatgtgaaaacatgattctagataggatttaaattgagcaacagcatcagggcagctacccgaaatgatcaggtcatcgacatatacgaggacatgaacaaagacaccatcattgttgtaactgaacagagagtaatccgacaaagattgtgtgaacccatattgttttaaagcagaagagagcttggaaaaccaacaccttggagcttgtttcaaaccatacagagatttatgaagacgacataccttgctaggatcatcacattgaaatccctgaggcaatttcatatacacttcctcctttaagtcaccgtgaaggaaagcgttatgcacatccatttgatgtacatgccaatcacgggccgcagccactcccaaaaacaaacgcaccgtgctcatttttgcaaccggagcaaaagtttcatcataatccacgccttctttttgacaattacccaagactaccaaacgagctttatatcgctctatcgccccatccgatcgatacttgattttgtatacccatttgttgccaagagcccgctttcctggaggcaaatttacaatcgagaaggtttgattaactcgcagagattcaatctcagcagacatagcctctctccaagctttgtcaaccatagcctcgttgtaagttgttggttccattccagcagtaacagctgcgagaaaagccttgtgcgacgaagtgaatcgatggcaatccacgtatttctcaattggatacagagaggagcaagaagcctcaggggaaatcgattcaacacagtattggtgacaaaattcttcaacttcatcggtttttgtgtttggcgagaactacgtctaagttgtattggcgccggtgttgtagatgacagtggaagatctgctgtctgtacggtgcttgatactaaaaaaggatcgagagagaagagagagacaaactcacttggacttgaagattcttgattgatttcaggtattattgggccagttgcaacattcggcccaactgtagcttcaccaatatttcgtctaataatagttcttggcccaatagcttcttcaataaaaggtggccaaacacaatccaccaatacacgttcatcttcctcattgcacgacatcttggagtatggaaactctgtttcctggaaaatcacatctctagacacgaagaatttttgttcttctaaatcaaacagcctccaccctttttgtccatgtggatacccaacaaatacacatcgtcttgatcgtgccacaaacttatctcctttgtgattttggttatgtgcataacacaaggaaccaaatacacgaagatgagagtaattcggagccgttttatataacatctcatatggagatttaccttgaagaagcatcgagggagtgcggttgataaggtaagccgcagataagatacactctccccagaactgaattggcaaatacgattgaaatcgcaaggctctcgcgatattcaaaatatgtcgatgcttcctctcaacccttccattttgatgcggagtcccaacacatgaagtttcatgagtaatgcctttgtgtagaaagtactcacgcatacatagaaactcagtcccattatcacttcttactgttttgatctcagtgtcaaattgtcgttcaactaaagcaatgaaatctttcaaatgtttctgagtttcacttttatcagtcatcaaataaacccacacaccacgagaataatcgtcaacgattgtcaagaaatatcgagcaccggagtaagaaggtgttcgataaggcccccacacatcacaatgaattagctgaaaactatccatacttctattatcacttagaggaaaagtatcacgggtttgcttagctcgcatacatgtatcacatacattctccaaaatctctttaccactagacaaaagttctctaggcaacaaattaactatcttgtctgatgcgtgtcccaaacgcctatgccatagatcaaaaggggccttcacactcgtgtgcacagcagcagcattctccattccccgaaaacaaaaacttccattctctcttttaccaattccagtcaccatcctcgtagtgcggtcctgtatcacaaggaagtgatcagcaagttgaaccacacaatgattctcatccatcatttgcccaacagagattaaatctgattccaactccttgacatagaaaactgattttaatatcagatgcgagcctaatctaactgttccctcactgacagcaactctcttatttccatcagctaagataattaaaacaggagacatggatcgcatatcactcaacaattccaggtttccagtcatatggtgtgaagcacctgtgtcgagtatccaagaagtgaaaagagaacatgtacctgattgagtttcatgagcattggacttgttatcgcttcttccagaattgagaagcttaacaactccacgccattgctcatcagtaagcccactgactgcatcacgatcgctatcagtgataacccggttcacatgttcagaagatggaaacggtccagtcatgacgacattcacatacgttggacgaggttgtcctccattaaaaccaggcccaaatcttcctctgccacgacttgttgagccatttgaatttgattttcctcttgggcgatctccccaccactctggatatccaatcaacacaaagcaattttccggcgaatgacctccacggttacaatgagtacaaagtttcttgttttgaagcttctctgaatttgcaaacttctttgagattacctcagaacgtggccgcatttgaacagcaaaagcagtgacatcggttctctcttcattagacgatctgttgttcaacatatcttcttcttgtcgcacaatgttgtaaacctcttccagcccggggagaggaacacgagacgtcaaacttgaccgtatggtgtgaaatttagtttcattcagtccataaagaaattgatgaaccatgtcatcttctcgatctttttcttggtctgttccaagattggagatacacctaccacatttacatatccgaagagggcgatagctgttgatattatcccaaatcttgttgagttttccataatatccttccattgtcataccctcttgcttgcaagtcgcgagatccgccttcatcttctgattctttggcccattagaaacaaaaaaacgcttccgaatctgttcccacaagtctctcgccacatcacggtgggagatatttgtcagcagctctgagtcaatagtcatcttcatccaagagaccaacaaagcattaatcgttaaccaatcttctagatctggagaaccatctagtggttgaggaatggttccatcaaggaaaccaaactttttcctagaccgcaacgccgtcttgaaaccacatgcccactcttcatagttatttgtcttcagtatcggatgggagatcacagctcccgaattgtcagctgccgtcaagtcgtacggcgaaattgtgcgtcggacctcaattacagatggaggtggtggtggagcatcagccatagcttcagagaaaactcacttgaaatactcaattcgaaaaacccagattgcgctctgataccatgagaaacttaagacaagatgtagtttggtttatgttgtcttatcttattaaagaggcgttaaaaccttacttatacaaagcaaaagatataacctaaagtgttgcacaaaggaaataactaaacaggatatatattattgactaagctaactaaaatattgaccagcaatagcttcaacacattcacttcagaaaccaaacagagtattcctctcttgaatccgtataagatgggagaatttcaatctttctcataggtacttgctctgttttagtcttgattttttttaatgccttccatgtgttcgatgaaattcttagctgaaaactcttgacccttgcaataatagtatattaaccttttgtttcttccttgcacaccaacaactttttgctctggaagtacgaagtttgacgatttttgtaaccttatgattcagggttgttcttgcaccattgacgaggcagagatcgtatggtgttatatattattcagaaagaatgactccaggagggtttctcattactgaagctactaatgtttcagatacagctcaagggttatgctcgttttgacttaaagtatacgtttttattaatgggttttgattaaagctagctttttgctcatctcccacatatctgacttgtttcaggaagctatgaatacactcctggaatatggactaaacagcaagtgaaagcttggaagccaatcgtagatgctgttcatgacaaaggcaatatcttcttctgtcaaatctggcatgttggagtttctaatcgaggttttgcctaaacttaccatctttaacctggttaaatccttaatcaaacatggtcaaccagatggggaagctcctatttcttgtaccgacaaggcaatgatgcacaccaaagatctgtttacgcctccaagacgactaagtaccgaggaatttcccggcattgtcaatgaaatgctatggaagatggtaaagcataacacattcaattgaaagaagctattcaagactctcttctttaaagtttcattgaatggttttgcaggctttggtgaagtggagcttcatggttacttgatcgatcagttcattgaaagacggtgttaacgatataactgaccaatacagtggatcatcattccaaaaccgttgcagattcgctctacatgtagtggaagcagtggctaacgaaatcggaccaggtctctctccgtttgctgatctcatggaatcttgagactctaatccacaagcattagggctttacatggcggaatctctaaacaaagacgaaattctctattgccatgtgaatgaaccaagatcacataaactttcaccaatgagaaaggcttttcaaagaacgttcatagtcactggaggttacacaagagaagacggtgatgacacggtggcaaatggattctggtggcttatggtcggtggtttctgacgaatccgcaacgttttataccgattacttttgtttatattctaaaccctaaatattttgtgtaaatcatcaacccacaacaaactctgacgaccaaaataaaatacagaattgagcacaacaattacaaaacaatcatcaatttatgtcaactttttgtcaaaaataccaatttcaatttccttttatgctttattgtcaaatccttaatcaaaaataaattaaaacaagatacgatagatatctaaaaagatacacgcgcttcgaaaaaaggaaatactcatgaaaaggtttcctatttgttttttgaactctatcctctatctctgtctctcctctatataataagatcccaagagcattactcatcacaaaagcaattgtaaaaattctctagggtttcatcgctaatctctctgtaatatttgatcaagagaaaatcaacaaatatgtctgtaatgcaacaaaatctttcagttgaaccaaaatctaaaaaacgaaagatcgattcagagattaataattcatcttcttctacgaattgtgatcactttttcgttcgttacggaatctgttgtaattgtagatcaaacgtagagagacatagaggacgatcattcgattacctagttgatggattacagttaagcgacatagcagtcacggttacaaagcgagtcacaacacaaatcacttgctttaacgacaagaagcttcacttggtacttgacttggaccacacgcttcttcacaccgttatgatttcgaatcttactaaagaagagacgtatctaatcgaagaagaagattcaagggaagatctacggaggttaaacggaggatactcaagcgagttcttgataaagcttagaccttttgttcacgagtttcttaaagaagctaacaagatgttttccatgtatgtttacacgatgggagatcgtgattacgcaatgaatgtgttgaacctgattgatccggaaaaagtatactttggagatcgagtgataactagaaacgagagtccttatattaagacgcttgatcttgttttagctgatgagtgtggtgttgtgattgtggatgatactcctcatgtttggcctgatcacaagaggaatttgctagagatcaccaaatacaattattttagtgacaagacaagacacgatgtgaagtacacgaaatcttatgcagaggagaagagagacgagagtcgaaacgatggatctttggcgaatgttttgaaagttatcaagcaagtttatgaaggattcttcagtggaggagttgagaaagacttagatattgattcaaaggatgtgaggttgttgcttcatgatgcacgtagaccaaagttctactgctaatttcactatatagtcgatggattacagttaacagacatagccgtcacggttacatagcgagtgatcttgtttttttttttgtgtgtgtgtaataatttgtatacagatagtgaagaatctgtaacaatgtttgctatcttgaaacaaatgagttgatctttgaaaagaaattaatccaataatttttcctttgctttaaatactcaatttgctaatgttgatcttataaatttgcagtgctcttatcactagatcttttttcttttaaatgatttaaattttgaccaaacaaatgatttacttatcttttatgattatttagtttggtcaaagatatagatttgtagtaaaaaatctacatttattatattaacaatattaaagaggaaaagaacttggatatagttaaaaaaattggacagaatcggaagttacgattatgaaccttttttaatgtaattgtaaatagattattcaatcaatgtaaatgaaactctatcttagaaatacacaataattggtttgttaaaatgggttcctccagattgatgattacattcattgttgttgctatgctggccatttcctctgaccttttctctggtatatgttattttctctggtatatatatgttgtttttaatatagattcagctatgtatatacaaattcgtaattttttcgtttaatgactgatagttcaaataggaatcagcgtgcaagctgcgcctcccacttgtggacgagactgtactgagaaattcttgacacaagactgcgataaatattgtgtaggtttgtcttataaaaaaggtgtttgcattctatccgaaggacttcctccgaaaacttctacatatcgttgttgttgttcgtaaatgaaatagataattcttcatccgctttgatcaaacatgttcatgttttttatcctttaactataataaagagttttatatttcaatgggaagaccatacatatatgaaattccattacaaacaatagaactcttttaatgattaattttaattaacgcataaacatatatatatatatatatatgtatgtattttctttcacggtttctaacttttatataatatacagattattttcaaacaattatgtaatttttatgttagtaaaaacagttagttgtaaaaattatgtgatgttaatatatatatatatatatatatatatatatataacaaatagttgtaattcaagaggaaaagtatctcatcagaattaaagggaagatgagatctacaaaggtttaattaacacatactgaaagagtatgtagataaaccttagacattttcgatgtggttcattggccctctattatatgcacaatagcgaaaccaatacaaattggaatttaaaacgttcgatgaaacaattaattgaaatttcatttacaacttacgaaaagtcaatgtaaaaataagaatttgttaatgtttattatgtgtctttaaaatttgtagtgctattatcactagatctttctcttaacatgatttaacattgactaagcaaatgatttaccataaccttttattttttggtaaaagatttaaatttttaattaaaaatctacatttattatattaacaaaactaaataggtgaagaacttgaatatagtttgaacttgtacagactcacaaaagttatgcttatcatgaacttcttatttttttataaatagatcatttcatactcaactaatgtacatcaaacaatattgttgggccttcttttaatataagcattaagcaaattgagtgtccgagagaatttgaaaatgggttcttctaaattgttggttgcattcactctcatcgtcatgatgaccatttcctatgacctcttcaccggtatgtctctttacataatacagattttgtttttttttacttatttcatactgattttttttttctttttctttctggtatatttaatttctaattacttcttatgatgatcgtaggaataggaatagatgcgagaactgtgcctccgacatgctatgaaagttgtaacgcgacatttcaaaatccagaatgtaacaaaatgtgtgtaggattggcttataaagatggtagctgcatttatcctcctcctgaggttgatggtcttcctcctaaacgaccttactttcctcgttgttgttgtaatcctataattctttcacctccttctccttgatcaatatattcctttttcaataaaaccttaatttctattcttattttatttcttccttctttagtgaaaaagaaaacaaaaacttatgttccaatagggaaataaaactaaatatatttgaacaaatccgaatttgtccgaacaaattgaaccaaaccagacattcaatttggtttaattcggaaacatgttttgaaaactgaacacaccaaatttacgaagttcataaccagatcaaaccaaaaaaattcaaatgttgaggcatattttaaattttaagttaagttttgcctatctaactctatatcaatgtccataatccatggtaaataaaacacgtgaagaaaaaaggacaacttgatgttaaacagtaaagaaaatatctcagcattatgactacaacaaataatttgctctaagataaataattttaaataaatagttaattatccacttaagttaacaaaaccttaaaacagaaacagaaataacttggaagaagtgaaggttatgacttatgaccattataatttatatcaaatcacaataggccttcttttttatttttgaaaccttttaaataatagacccttttctttgcttttttttttttaattattggaagaagataataataatatagcatatttcctttcttctttctataattggaataatcatattataatatacccttttcaaagaaatttatgtttctaatctttttatgtttattttcacatcaaaccattttcttaagaaactggaagaaatttatgaccactttagctaataataatggacccttttctttgctatttttattaattagattttctattgtttatttttacattaaaccataactatagtagaaatttctagctctttttatattaaaccataattattgttagtaatgtggtcataatagatatatcttttgttttataaattgtccccttcacatcaaaccatatcttaaactatattttgttttagaaaaagaaattgagtgctagagtcagagatagatcaagtttaaaatgagttcttccaagttgttagttgcattctccctcgtggttatggtggccatttcctatgatcttttttgtggtgtgtttctttatagttttgaatatattatcaatgtatcgtaatttcccccatagataataataattcttttatgatggattgtagagatgaaaataaacactacaacgcagacgtgctttgaccattgtaacgagacttgcgagagtaaggagagtaggaattgcaacaaacggtgtttggaaattgctttcacgggtggtacttggctagttatattgaacaacatgaacttcttcacaaaccttttattcatcgttcttgttctcgtaaacattatgtataaagattattcttttagtgggaggatgatataatacagaatttcttatgacaggcgacgctagttgcgaggttcttcttgttatttttattttgtaagtctgtttatttgctttcttttaacataatcgcattttatttattgattaacgaaatacaagatcggtagcggtaaaccaacaaaaaacagaaatgctaaagaaagaaaaaataatgctgcgctctctagcattctgtgttagcaaattcgcccttgacgttgctaagaagtttgttcagcatttcatgtggttgattataatgttattaatgtccatttttgccataataattgatcgaaaattcatctttttttatattataaatcatagtaacgtactacatttgaatgcagggtagaagtagaatttcttttctttgtatttcatttgttttgttagtaatttgctgtggcatagctgttctcttacacagatggtataagaacagctataccacagcaattggtcatactatatattaatatgcaagtaagtatgtatggtaaaagaattaaaaaacgaatttatggttatgaataagtattgaccaatgaccatttcttgtaattataaatagacttaatatgtacatgcctgcaaattgataagcaagaaaaaacaatagtaaatataacaagatttagttaaaggatttgaaagtgtgtaagaaattgaattgtatgaagatggaatcctcaaaaatgttggttgtattcaccctcatggttctcatcgcagtctcctccgatctagtctccggtatctaaaagctcatttaaaattttcagcattatttaccaaaatacctcttcaagtttttaaaagtatttttaaaacagaaaagtattctttaaattattattattgtaacatttgtggttttattttaggagtgggttttacttatttgtgtgtcttaaatacattttgtcaatgaatttgatttccgaataggtaattttgcatccggggaggcttcgagtcaactgtgcttcaatccttgcactcctcaacttggcaataacgagtgcaatacgatttgtatgaacaagaaatacaaagaaggttcttgtgttggttttggaattccccctacttccaaatattgttgctgtaaaacttaaatagttattaattagagtttgaacgataataatattgatatgttttttactagttgaataataatataagatttgatctaatgagattagcacattttattgattatgtatttatgttgatatattttgaatctgataacacgcttctagcgataggaagtggatctcgatgaccttggcacggctcgcgagtccggtcaatttagaagtgatttgcgtttctatgaagtttgggatgttataacaagttgcttcatggttcatgcaatttgtttttgtttttcatgcaatttgttagttttatcttagtttactttgttttgtatctttggtgtgtaacaagttactcctcgtagattcgattacaatcgtgctacaaaggcatttcatcatgcatatgcgatataacgtagctgattggctttgcgaatttgagaaacttaaggcccagctcagtttaaacctgttgtaagaaacaaaattgttgtgtttgagatttattatctagtcttgtcatttggatcgacaaacgcagacccatatccaaattctattatatataataacacaacttgttgaagtcaaacttaggatagaaagaaatcaagatttttttatcttcctttgaaatgtgggcaggttactacattgccaaagactacacaataatggtcaattggcttgtatagttaaaaaaaaaacgaaaataatggaaataactatgagttaatagttaattagttatgactcgtatggccaaacgaccatgtcatgtaactacaaatagacttaatagcgtgcagagagatttgtgtgatgaagaaatacaaaggaggttcttgtgttccctatggaattctctttgttttccaaaattgttgttgtaaaaactaactaattattacttataaattctctccccagtaatatacacattttttctcatacaatatctataagtacaagtatataatttatttatttcatatcattgcatgattttattgtatttttatggccgcaaggttcaatgaatggttaggcgtatgtatttttttttccaataatccaagagactagaatggaccacatatttataaaatactatgatgtgtatgtctctatacacatacataagtgtcattcagtcaattacagaatttcaaagtagcatctagctactacttaatttatgttatagttgatagtagctatttttgatatatctcatctcactgtatgaacagttttataacttgggtttggtgtttcgaacaacgttgactatatattttctattttaatctttcatacacattttctcatagtggataactatttaaatcttccttttaggtgtattactatttatttgtgctgatttcaaaccaatcataagggaaaacaagtcgattatttcttttttcttgtattatgaaattgaaaactcccctttatgagtctatgaccaattaaatataatcactattgtctcctgctccaccaaatgtgttcttaatcatcaaaatcaagatggtgcaaatagaataataaaactataacaccagaaaattttcgtacaagttgaagaccttttaggtataacgaatggaaagttcttcgaattggaaaataagaacaattagtggaagaaaatgcacaagaaatccaagattaagaatacacttaactcttaaaatactaagtatgtacgtaacacacttatcaaccatcttatgaccttttgagagtcgactaatgtaaagttcttcgaagcagaaaaaacaattagtagaagaacaaagtcaagataaaggtacactagctgttatcctcttaggttttataacttttttaagtgtaaacaaatagaaaccttttcggatcaaaaaaagtagaacaaaaaaaaaaaaaagagtcaacataataatagactaagctcttatattacaaagtatgtaacacaattacaaacccccattaaaaaaaagtaaaaataaaacaaataagatcaagaagcaaaataaataagacattatgatagattcaaagcattattattatgatcatgatgatgatgaaacatcaacatgtcgctaccaaaactctctctatcatcttcgcttccaccattgacataaaaagtcgaagacgaattcaacggtgtcgagctgctcgatgaagttcccgctagcattgatgaactgaaattccatccggccttaaaattctcaccatcattaatgtggtcggatacaaatgcggctgatgagtagtttccggcttgagggactttgttattagatggatcacctgtaccggtataactgtgataatctcccaagtattctccattgttttgccattgaacgggtggtgttgagttgagcaaaccggtgaaagtggtttggtcagtgtttaggtcgttttgaagctgttggtttggttggtatgattcggtctgaacgttgttgagagaggcagtgagatgattcaagatatcaggattaatatttgaagtagtgagatcaaatggagtattcatcggttgtgacatagatttaaacaatgatgaggtaagaaacgaagagagctggagaagattaatgcggggacaatgagtcaccggatcaatccccattcgtaagagtttctttttaatatgtgtgttccaatagtttttgatttcattatctgttcttcctggtaagtgaatagcaattgcggaccatctatagaagaaaaaatatcgtgttatagattttaagttaaaatcaaaaagagaagtataagttttaacttgttaagatattagctgcagcgagttgaagattgcatgcttagctttagacatttgaccttggtatagtgcttaactatgttcttgtcttttagttgaataaaataaaatatgcaagtaatattataacaaaaatgtaaagacatggaagtccaatgaagtaggtgtagtagtggaaaactaggtcattttttacttaatttaatcatacatgtaaacaattatacactaaatgaagaaatgaaaaattgcagatagactaacttgtttccaagaagacgatgaagttgaatgatggtttcttcctcttgaagagagaactctcctctcttgatatcgggtcttagataattcgtccatcgcaatctacaactcttcccgcatctttttaacccttttaagattcacaccaagaaaaacgaataagaaccatgattgttttaattttaattctaacgttgacatgatctagcatgataatcattattagtaaattttaaacataaacgtaaaacaaaacgcaggaaaacatattgtagctgataggatttagctatttgtatatatacatgcgttagggtaggaatttaccggcgttcttgggaagggtacgccatttgccgggaccgtgcgtttgaatatagcctacgagcttctcgtcttcctccggagtccatggccctttcttcacttcactttcctccgagcttgaagattttcccatctttttcaaatgttatatgtgagagaactagagagagaagctaataagctttgagaacttgattacagagaaaatttggtttcttcatgaattatgatttatgtatatacaaatatatatatggtacatgcaaagtcaagtcaaggagatttggtaccgcccttccatcatctatctaaatacgtgtcttttcttgatgaaatacggagacaaaatgaagtagaaaaaaactgcttattatgttgacaaaacaaaagagtaatttttactctctatctttaaagtccttactaacaaacaaaaagctctgaccaaagaaaaaaagtaataaacaaaaagcatgagactaaaccatctctattaaccctaaaaataattaatattgatggagtgagaacacatggcagaatatgggtggtgtatgaggacgtgtgatagatatgtgaagaaggttccatttgttttggtctctttgtctcaaatcatcaaacagttttcaagatagctatgttgcgtgtatgtttaatgtttactcatctgtcatcactatagcaatatcatatacataaatagacagattcaaaataagaattttattgaataaggtgtggttacagtgattatactgaataaatatgcttatttagccttctaagttttgtatacaaataatttctcttctaaggagaaaataaaaaggaaatatgtaaagaatgattacgatagtgtaaaaaagtaaaaacaataaaaatccaaacggatctccagtgtgcttcatcggttggaaatagatatatatcatcgtgtcatcaaatttcagtagcaaagctagattgtcctgcttgaattaagacatccgatcgaagtgactcagtttgagtaacgtcctgcatcgcaccagagtttctgtttacttcaataacaattacataacgacaagtttgaataactgataatctaagacatgtattttgtttttactaagttaggtaaattaacgacaaagcgttgttgcagtgcaacatacgtaaagaacaaggcatgttaacggtcaaaatacatgtgtgattaatgaaacaatactatataatatacatgtgtcattgaattgcagagactttggtctcagtccgaaacatggttgatttgacaagtcagggatttgaaattttttgatttgatatttgtaagaaattattactattttagttaaatttggttagtataagttttagattatttggaaaacaagttatcggccggtttaagagtgattatatagaaaggtttggtattagagaagaatgataaagtgactttttaaattaggagaatgaccaatttatcattgtttagtgcataggcgtatttgacaagtaaccccttgctcttgttacatgttaaatattattgtgtcatataaagaggtaaaattaattctacactttatgcggtatagccgtataaaacatgttaggttgataataaacaagttatcataacgttttcaacaagtgccaaaaatataaacttacactaacactaaaccgtatatatcgttttttttaatataatattatttctataacatcgatatatctagtaaatagttattttgcgtccatataattcatatttttcgttatataacaatgaaatgagtgtttttccacggtatagaatattttacatgtaaactttaaatcatatcattgtctcacagggaattgattcatgaaggtaaattttgtgatgcatgttttaaaaataaaagactgctttatcaaaaaaaaaagtagaccctttaacaaagaaaaaaagatcctgccaaaaatgaataatgataattagttattaagacgacaagaaaattcagataatgtggtcaaatatttaatttctcaactaaaaggaaatacaatacattgttattggtagattatgttattgcctggtttatctacaacaatcccaacaacccaatcgtcttagtaacattaaaataatcgctgtcacaggaaattttgatgaactcaagcctcgtttcagatttatcagttttcttataactttgcatctaccaattatgcaagtcttttcataaactaatctatcgattatgtaagtcttttcataaactaatctatcgattatgcaagtcttttcataaactaatctatcgattatttaagtcttccgcatgtaaattcgttaatcagctaccatcttcattttagtttggtataagaagttatttatactgtatgatctaaattacatttaaatattaagggttattttttcttttttccgaatgaagttctattattgtttaagactttcacgcctctaaggccgatggccgaccatagagacaaagacatggactgaaactaatgatcgaaatcaccttgctcatttatctttccaatttcttttatataaacaaattataaacaaacacacacaaaataaacagacgtaacttaacctttaattcttatttttaagaaacaatgacgtaacgatttagcaaaaaacacctaaccttagatttcatggtgtataatatatccacgacgccttgaacacgtacaagtgtggtagcaagcactagcaacatagtaaactaaaaaaaaattgccagcagcatagtaaactaattattctcttggatttttctcatattcggatatatagcatattttttaacttatcttaaaatcaaagttaggattaattaaaaaaaaaaaatcagtaacatcatctttattttagtttaacctcataatacgaataccttagcaaaaactattagtagttataaatgtcccaaaacaattttgtcataaatgtccaattatgtgtactggttttttgactctttaaaaaaaaaaaaattgttgtcttttgatttctgcccctttattgatgttatatcctatgcttatttttttttttttttttattttttttttattttttttttttttgtcacaaatcctatgctttgttttctttatctttcttggcatatattcaacaaacaaacaaaatagtctagagactatagactatagaccacagactatagagagacaccatatccaaattaattgaacgagtcatctatatatacatttttgcagccattttagcaaataaatcctagactttgatttatttacaatctaatgccattagcattaaatcttttttctaaaataattaattttactttaaatttttgatttaaattgtcaatcacattatcaatcaaatttaatcccaccaaacttcaaatcaatcccttaaaattagcataaacatatttgttaacaatattttaaaacaaaattttttgttaaataaatattattcttacttaacgttttttgtttaaataaataaattttgtatttgaacttatttacaatgtcatgtcactgacattaattaattattaatgaaaatatttaattaaagatttaaatcttttaaatccttgcttttagagttattatgtcattaccttataagcaaaaatattaactttttaaatattattatttatatatttaaaattgataaaacattattaatatttaaacttataaaaagtttgatatattacaaatttttaacatcattatataatatatagagtttaaaaaaatcttaattttttccatcatattgtatgattcaatatttttaaaatgaacatatattaaccaattagcaaaacaatgtgtgggttcaacgtcccgcatcgacaaaaatatttagacaatgatttataaacatatcataaataagatcaacattaatataaataattggtttttttacgggacggatttggcgggatgagtttggcaggacgttacttaacaacaattgtaaattataaaataaaaatatattatagatagatacaatttgcaaaaaaaaaaatatactaattttaaaaaggtaaattgtcaccgcggtgtaccgcaggataaaatctattttacatatatatatggttttgcatctagttgtaagacgtcttcgcatgactttaagaaaaaagaataatgaaacacataaataattttgcatctagttgtgagacatgcacactagtcgtcgcatggactttttagaaataaaatgtatataattatatatttacaaggatataaaaggaccaaatgaacttaaagtttataaggtgccaatttgttcgaatccgaaaacataatctagctctatttgccgacaaaaaaaaaaaaaatttctagctccatttttgaaagtaaaaaagaggaatggaaattgaaacaaaatgaaaccatgatttccttctctcaaaatcttaattaggggtaactattttgtgacatttttttggattagttagatatatgtcgctctataaaaactatttgcatagtcggatagacttttaattgagggtatcaagttactgaaatatgtagatttaatctttaactaattttttttttaaagtcatccgaaaaagaagaaaataagaactctcagactaagataccaaatagcataacacctaaatataaaccaatcttaaatttaaatttaggaatattgttaaaaaacacaaaaaaatgaaccggaacgagctatttcttaggagtttattaattttcaatagatcttaccagctgatgttgctatttaaaaactattaactatgtccatttcaaattcaattcaaaaaagtgtaattgttataaaaaaaaaatcaatttatatgcttagctgaaaagatattcaactatttcattagacactaaatttttaacctctttcacaaaaacacactaaacttttaacttggcgctaacttagcccaaatcaaatcaaatctaatgttagttaaaattttaactaaagtcaatgcaaaataaataatttatggctagaaatgtagttaagtaagtaattctttttggccaaacaaataagctcgaatttgttttatttgattgtttcccctaactttttttttttgtaatcaacttttttagacataaagaaaaggtccggtgacatgtctctgtggattaaatcagttgtgatgcgtggataatgttgtacgactcgtttcaataacttccatattaatgtttcaattattatcgtccttacaaaacttcacgaattaacacaagtcaacaaaacatttgtcaacctgcatcggatttaaacccacaaaatactaagtttggtttatatattaaaatcattatataatgctgtcctaaaagtggagtgggatggcataacttagaaagaaagaaaattgaaagggtttaaacaaagcaaatgcctataatgagagtgacaaatatccttctatacacacaaaagttccaataataaccaaatatgaacgaacacaaaagtgcaaaattcatttctataaaaaaaaaaaaaaatagattcagaaattttgttcctttgtcaaatctcatcaggcaattgaaaactctgcgtaccaaaaatttgaagagatgtgttctgtagaaaaacagcgactccacatttagagctgttgaatccatcccaaaccgtgaaatgagctgtccctgacaccgtcttttttcccgttaaatctttaacggtgcataacttttctagctttcttacaacgtagtcattggacaagactcttcctgagttctctcctcgagcgcaatcattcaccaaaccgttttcatatagcgccaccattatatcgatcccgctcgagtccactttcatcctcaaagctccggtgagagatacttgaagggtttctgatgttggtctttgaaatgtggcctattaaaacaaaccaataatagtttcactgattattatgtaatgaaacacagccaaataataacaagaacacattacatatacaaaagatgtaataatgccttcgacacatagtgttgtcttatgctacaaagcactcattgagtcttgaactattaacattcatgtttaatttgcttcatgttaataaaataacacattgtgtagtacgagatcaatcattgatttttgttagtgattccatcaacatcgaaaaatgtaagaaattactcacccgaaacgcaggagacggaaacctaggagcttcaacaatagacttaagcaaggactcttcttcattcccaagtaattgaacacgaccttgaacaacaaactgtggagtaaacattgtatcttgattcaaagcctcgatataggccttttgtctcacggtccactgactcgatccataaggatctttccatccaagataatcccaataatcaacgtgaaaaaccaaaaccatcgccggagaaccactagatccaccgtctcgacggatctttccatcgaaatcaccacgtccaagacgtgatacaagcatctccgcctcaggcgaagttttacatccttgagatgagaaaagctgaacaagaataggtccatcacctaccggaacatcagcagctacattagccgcgttatgaccggaaataccttttccggtggtggtggaagttgaagatcctttgacgccaaaacatgtgaaaagacgaggcgccattggagggagaaacaaatcagaagatcagaaatgtttccccaagaaaaaaagtttaaaaaaatgttcagagaaacatttaattattgggaggaggaggaagaaacaattttgtaggctaatggtgatgagagaaaggcggcaacaagtgtctttagccaattttttcttctcttttaaaaatatttcttttttggcttttgggtggcaaaagctgtaattttttttattttggtagacagagcaaaagctgtaatttgtttgaggttttgttgctttaggaacgaataaagtgttaggtgacacgtcgtcatattcttttagcaagatttgtttccacttcacaactaaaaattcgtgaatatccaagaaaagaaaaacaacaacgattatgtaaaaagacaaaaacttggtgggcaagttcattaattggggaacaaataattcggaataatttatattaagaaaaatgaaaatttgggtccgaccaaaaaacgtggtgagaccaaaaatgaaaaaccaattcttccattaataacagagggttttaggtggagagaattaccaaatttaggatttttctctaaaagaccatatttactaaactctcggcccctttccacattccacctcaagtaatttcgaattgagaatgagttatgcgttcacaatataattatgaatcatcaaagccttgagttgactcactgatgatggagtgtgaaaagcacaagctattgacttaaaatgttgtttcgttacattttgcttctatttgcctttgtgcagttgttattgttcctgattaagatgattagtataaggttcgtgaaaaatatgctttactattagggagtcaagcaattcatcaccaagctgagagactatcctctagttgtgaattagaaaataattaaaggtttgattatatgagtgctgctagaatttgcagcagtgtgaagtgaacttggaaaaaaattaccttcattcgaaccaatgggagcttgatctcttatctgttaacagtatttttactggctttctctattagacttgtgacctaacaattttgtagatattagtagaggcattaatgacttgttaaacctaaataaaaaggcggcaggagaaaaaaatatccacatgaactatgagaagaggaaatagttaccacttaagtgttccagaattgaggtatatcaaacgtaacaaaaaaatagttcaatcaataatcatcaaaatcgtcgggattgggtttaggagaggttaatattgctgcatagagcctcaatttgtcttctcctaaggacgcacatcttgacaatggtcttctcggccttatgaacgacagtgatgtcaacgttagcctatgcttgtacctgtcatgttgattataattaataactatttacataatcaagaaatgcatatgatatatgaagagaacataattatgaattttaaacaaatttaaaagaaaatttccatatgatatattcaggaggaatgtgtgaaacaagattattcttctatccattaaacaactttttttttcttcttctataaactgatatcaatgagtgagattaaaagtcaataaatgagacgtaccttcgccaagctagctgaaccgcaaccgcggcccaagtccgccatccgggagaataatagcgagcactacgtttgactttctcgttaacaaaagtgtaacgaaaatgctgcgtcacgtacttaacgtcttcggcgtcgaggccaaacgcttcggtggtctcgagtgttacaagcgttgaagaagaaggcggtagcctctccacgaagggtcgtcggagacaccacgagagaagctcgtcgccgctgaaatttcccggacctaacatgcaacagctcttgacaccgtctcttagtaactgactgctttgaagatgacctctcactacgaataacattctctgtactgcatctccttctttctgaatctgcattttcaaagatttcattactttgccttcattgttgacgttaacagtttcttggatctcacgctaacaatcaaaggctttatgatggttttgaaaccggttacaattttttattttgtatatgaagaagcatactttacaaacgaattgtaatttcagtttttaataagattttggtatatatattaatttgtttacgtcccctaaattggtttgaagatacttactgtttctcctttggtgaaaatgagagacttcacacggtcgcatatattctcaagcaccaaatcatccatatgctgaaacaatggaacctgtagtactcatccactttaatcaccattaactaatttcatcgttataattaatcttccttttttctttaatcgataataaatcatgacgatcaatctgacctgccggactaagtctagacagaggtggtacttgatgtctctcctaagaccttctggaaggttctgaaccatttcacactcgtctacaccgcgcatagcagcccatctttgccgctcatagttgcggactcgctgtctaaaccctattggcaaatgtctcttcttcatccaccactctatgttcctcattttcaagtgcattgcttgcttctttgaagttgtagcgtgcagaaataccttcgttttagaaacaaattagaaatctttaacttgattatcatgttatttatcaaaattatgaaaatgtaagatctatataccttgatgttaccaatcaacatggtaacgagaagaagaccacttgttagaactatgatattgaagacaacctccgaccattctgttgtgctctccaaattcccaaatgtgctgattaattatacagataagaaaagattatgcaaacttttcttttttacattaatcattttattggtgaaattatgtatatacacatatatgtaaatgatgaactaaagcataatttatttgatttgatttctttagttttgtctcatggggtgaattggtatgatcacatataaactcgcaccaagcctgattgaaaaatcaaataattatagtgattaggatgtgagatacctgagagtcatgagaccccaaaagataggaaaaaggattttctccaaccgactctcactgctcacaagttgaatggtccattgataagcaccatatgtgtaattggtgttaatatctaagcaaacagatcgagcttgatggttttgtgcccaagcaagtctagctctgtcaaggaccatcacggtcgttccatagtacaccggttccttacatgacaacatccttaagtcgcatcctatcgtgttttcacattgttccttaagacatttcgctgacctttgaactcctaacaagtaccaacacgctcctgccgcctgtagttcataattaatagctagtaacacataattttggcagattaatagattttggatttgtattataaatttataattgattgcatttgttgtacggttaatgattgattaaattctcgtatgatgttaagtcaaagttgatgagtcattgagggaaaataaaaatgaaccgttaaatttatagtatttgaaaacaagaagctaatgattgcatatttaataattacaacttaagactttcgtaaattaatcatacgtaaaaccaaggcacgttgtgtttagtttcatcaaataatttgattgcgactttgtgatggaaagaatcataccttcctcctaacaaatctattcttattttggcattttctgatgtattcttttcttttaaaagactcccacagcaatggaaaaggtccatgtgaaaatattttaggtatgatatcttaaataatcttacaatcaaaaccttataaaatataattatttggcacctgaaaatcaacactttctcattgaattaacttttctaaaactttccacacaagaaatgaagcattaaaagcatctaactagagtttttttacagtagctattgacatagctattgaaattttgtatttaccaatatgttaagcaatacaaaacagtttatcaaataacttacatgagccgcgacgaaataagcgatcatgttgagtgcaatgccccaccaaacggtgccgaagatgtaacccgagagagtagcattgcggcggagatggcggattgagtgatatattttcggtagatattggaagaggaatgttacaagcaaaactgacaccactaaagtcacagagcctctctttagaagagaaggtatcactacccacaacaccacctgctcacaatatttattcataacttttaattaaataattgtaacaagaaaacaaaaatgtacaatacgaatagataactgaaaacgaatgaactgtattatttttggtccacacacgaacatgattaggtcagactaagtgagagttctttcagaccatataattatttagttataattttttttctagattactcaattttagatttgtactaagatttgattactatgattatgcctttaaacagtattagtagttgtaatcttatttgaagtttagtcactatctaaatgatagtaaactttggaacatttaaatgtgttatgtgtgcatataaaatgaaaaatctgcctcgactaatataatggaaccatctcagtacaaccacttgatctacatctaattttggcatattataactatataataagtaagcaatattttaactaatccaaaacttcacatagttttgcacgatgagtttctttttttggtataaattttgaaattttctccatggattgttctgtagtctaggaagaaattaagatagaagctcatacgaatgattacatctaatataaaagacacttcaaaacaattaaatcagttttctttaaaataggaatattaaaatattggttaattactaacctgaggtaatggtaatatgacgaagagatcgaagaagaacccattcttcttaacgtaaggtggagcaaccctcgtagagccacgtgtccctcctcctttgttggtatcgccgtcgctatctccgccgggataaggccaccggcgagcaatcttgaactgaatccaaatgttccaaaggtgcaaaagatcggtcatggagcgtaaggcagtgacggtaagagcaagccaaccgtcgacgaggagacacatacacgtgtcgctcactgatagggtatagagaaaaagtgggtctacgaatagacccgttgcgcatacaaggagaaagactttgttccattctcgaacccatttggatctcgggtcaagtattcgacccaacatcatccatttgttgttattacttgacccgtttcttcttcctccgcacgtgagccctatacgtgggtcttcttcttcctcttcttcctcctcttcttcgatttcttccatctcttcttcttcttcatcttcctcctccgtgttatcttcttctgagtaatatccaacgctgcttgagtcacgtgagaagcgtgatgcgcgtgtgaattcttgttctgtggccattgaaagtactaacgcatgcaacacagagagagatagttattttgtgaaggtcgacaatggagagaaatcttggagatgaacgttgtcttaattatgaagaagaattttctaaaaatgtaaaagaaatgacatagtgctattcaaattaccattatacccttgcgagtttttgttatactaataagaaactatataattaggagtttagtatgttgaagaagaattattatacgattgaaagtaattgattagtagcaacgaccagcaattataagcacaaacatgtaacattcatgtaccaaacatggaaagtgaaggatcattctaagttatgaatacaaaagaaatgtaaagacaaagaacagttgtagtctttctatatgttaggaaatgcctaaaacactatctttaatatagagtttgcaagggaaaaaagaacacctagctaaaaacaaaatgaacactaatgccagtagtatttgattaaacactaaaaacaacttcttgaaatacaaatgagtccttttgtttcttctataatcatttctacaaataatgaaagttaaaagtcagtgtttagtttttttttggtatcccagtcaaaacttgaggctaaggggtgttcatgtaatttgacaaacgtaaaagcataatgagtttgaatagtttggtctcattcgtagaatcgtagatacgttcgaagcaaataaatagagagagagtctttttttaagaaaaaaaaggaaacaagttttggtacttttgtttttcttgataatacgttttgttattttctttcgccatcgaaggaatttttttccttaaggattttgaactcttttttcttcttattttttttttcagagctttttgtaccatatatataatataagaagcaaacaaacatctagatgttgaatgtgatccttgtcgattcaataatgtatgatatcatcattattgatcccgttaaattagtaaaaaaaaaaacagctgaaacaaaaatactaacagaaaactgaaattgtaccatataagctaattgtatctaagagatgtgcaatatttattaattgaagaataaaccactatatacatgtgtatatatacttttaccgatacattaacttgaatagaataacggtttcaacagtgaacataacactgttaaaacaaaacactagacattgtattcattagatagacgcaattttttcgagaagaaataggtgctcatataatataatcaaatgagaaagcgataaatttaggactggtttttaccaactcgtagacaacaagaccaaatagggttaatctgtatgcatgcttgatttggattcatgcatgataatttggatatgtgagtgacgtaatgaattttagcgacacacaaaaacttcagtaaacagtatacttatttcatatattcttaagcacatggagtttattaattcagcatataaaaacgaattatataatagaaaaaagtggaagatagaagatatgtgtttggcatgagtcacatgaaatgttcatttttgttgggttgttatgtaataaaagtattttgagcttctttgttcactaaactccaacatagtaatttgtcatttcttagaataagtacatctcttacatatggcaattctaaccatcactctctctaacctctccccacctcatattccatcttctcactcttttatctctctttcattattattatatcaaattgtttttagaccgtttctctatacatattcgctgttattctctttggcatatttcctgaattattttagttattttccctctatttatcatgatattaataatatataaaagcaaaataaaataaaatgggccgaggccttaagcccatttttaagattgggtgaagcatttatagtggcctcgagttggaaaaaaccagaaccaaaccaattatgaaccgtttgattttcatgaataatcaaaccgtataacattttaaagtttgggtatattaagacaaaacgaaactaaaagagggaccatacatgtaaatatatattcctttagaactttcgtctccctaaatttttggtcattcactctctctctgtcgcctctcgctttgaaattccccgcgcctgtctctcctaatcatagtctcgcttacctccgtcggattctctctatttccggtcaccggagctccgtcggttcactttaatccgtttgaataccaggttagggttctattttccacacagctgagaaaatgcgagaactaaagaaatttctcgaaacagtcctagtgattaaatttggttagtggctttcggatttaggagaaatcctttagtggagcttcattttatagtattgaaactgtttaatttctaattttctagccaactttgaagtacattttcgctttcaaatccgagtgattttgatcctcgggttttgattttgttacttaggttttctattcatagaatcaatttcagacctgatttctgttgtttttaggaactaaatgacgattttggtttatcaaatccacattctttagggttttagctttttttcagtatgttttagtaataaaggctgaatggattcaatcaaagatatgtgcttgattcttatctgagattacttttcttagtatgagatcatgtaaatttttcgttttggtctttttcaggtttacttactgagctgcaaacacttggcatcatgtctaggtcagcttttggatttgtctttacactctttcatggatatatttatacatgtttaactctgatatatatgctgcgccagctgtgtattaatggatactgactataggaaaactagatgtctaaagctttattgaaatgaacaatttttttttttcattttgttttttgaaaaacttatgagtgtcagtgtatgattgtaaaacttgacagggaggattttagtgatacacttcgagtacttgttgcaactgattgccacttgggctacatggagaaggatgaaattaggcggcatgattcatttaaggctttcgaagagatatgttctatagctgaggagaaacaggtctggtattcagtatctatcccttgccagtattatcttgcgtttgaatcatctaacatattatcttaaataaaaatcttctcccaatattatgagtagtaaacagtgttctacctaattttaacaaaaattcaaccaattgcgaggaagaattctcagaaagtttcatatcttcttttttcactcttttgaaacaggtggacttcttactcctcggaggtgatctttttcatgagaataaaccctctagaactacgttagttaaagccattgaaattcttcgtcgccactgtctgaatgataaaccagtgcagtttcaagtagtcagcgaccagacagtaaattttcagaatgcgtgagactctatcctttctgctattaatctaatcataacaggaaataatttcaactgaactaattaattggcaaattggctcaaattcgtgtatagatctacgtattcttattaatcccttgacattattttctggctacaggtttggtcaagtcaattacgaggatccacacttcaatgtaggcttgcccgtgttcagtattcatggaaaccatgatgatccagccggagtggtacatcacttacatctgcatgctcttgttatgcaaactcatttgaataggtatatagaactggattagttagtgaataggtattttattgtgtttttgttctatgtctcttatggctacaggacaatctttctgcaattgatattctttccgcatgcaaccttgtgaactattttggaaagatggttcttggtggttctggtgttggccagattactctctaccctatacttatgaagaaggttggtgtaaagaatttctaacctagacacctggctccccctgacttcttggactatcatttaatcaaattaatgtttagggctcaacaaccgtggctctctatggtttaggaaacatcagggatgaacgtctcaatagaatgtttcaggtaatccagaggaccctcaccttttgctatacaattgttaattgtgttaatatttattggtttcacagaccccacatgctgtccaatggatgaggcctgaagttcaagaaggatgtgatgtttctgactggttcaacattctggtgcttcatcaaaataggttgattccattgctataacatcttttagatcgttttcttactcattctgtatcagaaaatttgatactgtattcatatgacttgcagggtgaaatcaaaccccaaaaatgcaataagtgagcactttcttccacgtttcctcgacttcattgtgtggggccatgagcatgaatgcctaatcgacccccaggtccatgaaaaatttgatttttggagttattgcatttaaataagagtgagccacaatgttacttgcctctttgagctaaaagctattaaacttttgaaggaggtatctggaatgggcttccacatcacacaaccaggatcttctgtggcaacatcacttattgatggggaatcgaagccaaaacatgttcttctcttagaaatcaaggttcttcagcaaacaatctgaaatttcatcttcactttattcgtacttcattttctggtcttttttcctccttttcaatcaagcatgtaagcttgagtgacttaaaatatatgacttacagggaaatcaatatcgtcctacgaagatacctttgacatctgtgaggccttttgagtatacagaggtaaagtttacttttccttaatatgttatggtggtggcagacttctttgcttacatattttcaaagtgcagattgttttaaaggatgaaagtgatattgatcccaatgatcaaaactcaattctggaacacttggataaagtggtacctattccctcttctcatagttcatgtggatatcttttctcctgccctttttgaataaccagtcactgaatgtctctactaatatctacaaaattgttaggtcagaaatctaatagagaaagctagcaaaaaagctgttaacagatcagagatcaaactcccattggttcgaatcaaggtaacttgtttccaagttttcttcaaactgctgcaaattctagcaacactcatataattaaacctttattttctaacccaactctagaggctaggctttgccagtttgatgcatgcacacccatagccacaaacagataattgttattaagaatattaaatgactgacaaaagactaagatctgcttcatctttcaggtagattattctggatttatgacgataaatcctcaaagatttggacagaaatatgtgggaaaggtacctagaaattagttactgtaacatgatggtcaccatacttctttgaatgttggctaactaatgacaaagtcccaaacacttacaggttgcaaatccccaggacattttgatattttccaaggcttctaagaagggtcggagcgaaggtaagggcattggtgtactagtaatttatacaattttgtttggattagattgatgcacgtgcttttactctaacttgtaatagcttatctggcaaaaattacggttaagtagtgtatctgagatatagtaatgtagaacaatatgggcctatgataacctcctttgttgttttattgtcggtattataattctcgtcatatatatcatgactactaactttctgttgtgtggagcttgatattgatgtattgagtgttaattttctttctgttccacttttcttgttatagttcatgtttcttcgtgtgtaacctatagcatcaaaattttgcgaatcttatggattatctctagttagtatatattggaaatttgccattttgataatttttttgtctagtgaattgaatggcaatgatgcatgtcctgatggttgtccagtgatccagttatgatatatttcaatcttccatttcacagccaacatcgatgattctgagcggcttcgtccagaagaactgaaccagcagaatatagaagctttagtagctgaaagcaacctggtacatcctgcaaccttctttccttatgattgtgttattatcgtcaacccctgtagaactttgccacagaatgatatagacttgggtagttaccaaatgggcatgagtacactatgggatgatcattctattttcttccgcagaaaatggagatccttccagttaacgatctggatgttgctcttcacaattttgtgaacaaggatgataaactagccttctactcatgcgttcagtacaatcttcaagagactcgtgtatgtactattttttacttcaccattcaatacaaagttctgcataggatattatttttatttcgtagcacgtccttgttattgcttttatgatttatctcttccctctttttgtacagggtaaacttgcaaaggattcagatgccaagaaatttgaggaagatgacttgattcttaaagtgggagagtgcttagaggcaagaagatatagattcagttagttctgccgcagattatgagaaccagcagaatattgatctcacttgcattattgttcgtgcaggaacgcttgaaagataggtccactcgacccactggttcctcacagtttttatccactggattgacttcagaggtttaaattctcttttttagattttccttgcctctgtccttccgttggtttctcacagtgctattttctacctgagattggtacagaatttgacaaaaggaagcagtggcatcgcgaatgcttcgttcagtgatgatgaagacacaactcagatgtctggtttagctcctcccactagaggacgaagaggttcatccactgctaatacaactcgtggtagagctaaagccccaaccagaggacgaggccgtggtaaggcctcaagtgcgatgaagcaaaccactcttgatagttctcttggtttccgccagtctcaaaggtaactttttgacagcacatttaaccagtttagggtaggattcacggacgtgcaaggaaatgattggcatcactagctagctaatgttatgtccctaatttgtctttcatagatctgcttcggctgctgcttcagctgccttcaaaagtgcttccaccattggagaagatgatgtagattctccttcaagcgaagaagtcgagcctgaagattttaacaaacctgacagcagttcggtatggactattccttacactgttattcatttgttcactaccataagaaagcccatgtaaaaacttgacaacatataacttttggcattcttatttctctatttgaagtaaattttgcgtttttacttttcctgattcttgtttgatatccactaaaggaggacgatgagagcactaaaggcaaaggacgtaaaagaccagctactactaagagaggcagaggtagaggttctgggacttcaaaacgtggtagaaaaaacgaaagctcttcttcacttaataggctactcagtagcaaagacgatgacgaggacgaagatgatgaagacagagaaaagaagcttaacaaatctcagcctcgggtttgttaatcacatctattttcccttctttcgctgcttattagcaggttttagtaagttgttgttaaccatttgagatcaaagctcacttaatagtacaatttgaatatgcaggttacaaggaactatggagctctaagaagataaatacatatcaaaccccaatctctgacatcacaacgaagcttcatttttctgttattttctagcgacctctcaagcggaacaacttctgaagaagagaaattagtactaacaagagttctgtgagatgatgtacagagaattttgtagtgtttttttttcttgctctttttaaggttacgttgttgatgaatgaggcaatatgattaacgtcagtaagaagtctaaaactgtagtaaccaacaagttacttagccaataatttaatccctaattttacatttgaaattcaaataatttgggacaatctaattaatattggaaattcgaataatttaactaatattacattttacatctaaatcatagtttataggaaaaaaaataaaacattataaaataaagagtaaaaaacttaaatgggcaaccagaaaagaaatatggataaaaaagagatggaattagagatacttcaaatccaaagctgtttcctgattggctaatcccaacatctcactctctatctatatcccatctctgattctcccacctctcttctcatccacaaaatactaacataaaagtcaaagtccctgagaccaatactttcaccaaacagcaaaacaagaagaacaacaacactaagcaaaaaagaaaagctcaagccgagagagacaatggcatcaacattcacgagctcaagcagtgttcttaccccaacaacattccttggccagactaaagcctcaagctttaacccccttcgtgatgttgtctctctcggatctcccaagtacactatggtctgttttctttttggtcttaatctcgtcatattaaaggtgtttcatctttcttcttgagtttgtgtctgactttcacgtaaaatgtctatgtgaagggaaatgatctttggtatggacctgacagagtgaagtacttaggacccttttccgttcaaactccgtcttacctcaccggagaattccctggcgattatggttgggacaccgccggtttatccgcagaccctgaagcctttgccaaaaacagagctcttgaggttagtctctaaatctcactcactcaatgtaaaaacagagtaaataactaatcatcatttgcaggtgatccatgggagatgggcaatgttgggagcttttggttgcataacccctgaagttcttcaaaagtgggtccgtgtggacttcaaagaaccagtctggttcaaagccggttcacaaatcttctccgaaggcggtttggactacttaggcaacccaaacctagtccatgctcagagcattttagccgtccttggcttccaagtcatcctcatgggtttggttgaaggtttccgcatcaacggtcttgatggtgttggcgaaggcaacgacttgtaccccggtgggcaatactttgacccgttgggtctcgctgatgatccagttacttttgctgagcttaaggtgaaagagatcaagaacggaagattggctatgttctctatgtttggcttctttgttcaagccattgttactggaaaaggtcctttggagaatctccttgaccatcttgacaaccctgttgctaacaatgcgtgggctttcgcaactaagtttgcacctggagcttaaattttcaagtcttgatgtgattcttgtaatgatatgaacataacctttcttgttcctctcaaattacaaatcttctatttgctatgcacagaagaagtctcaaaaatacatgtctctcacagctaaatctacaatgctcttaatctaacattttgggatcgtgatactaatacaaagctaagtggatgaagattccacacacactaataagtaataagacccctagcctctttttccccaccatttccggtgacgacctttatcaccatctactctatggagtcttgctttagtatctcttaatctagctttgtaatctttcttccatgtctcaaatcttagcttcagtctcctaaattcatcttctggatgttgctgttgctgcccgtttggagttgcctgaggtccgagcttcacctccacaatagctcttgcatcttcatcgaaattgagtctcctttggtcaaactctcttgcaagatgattaaccgcattcaaacttccgttgagctctctgattctgagttcaggagtgtttccgtttgtgaacttattagtaggagttcttactcccggagttccagtagacatcgtgtcctctgagtcataaccgaaaggtgatatcgatgtgtcttgtcttcctcctgcttgacccgtaatgctctctgcagctagactctttctagcggcggcaagactcatctgcaaaaagacatgatgcaaaaacatttcagaaaactttgctgatgcagtaagtgaatggactttcataaccaggtaaacatttgacctgcaatgatgacatttgcttttgccatgtttcctccattgacttcatctttatatcatactctgaccatctctcctcaaattgcctcaactgctctctcaaagctgtgttttcttcttccttctgcgataaagctgcttcagatttcaaaatccgtttctggagatcagacatagatgttggttgaacttgtggctgctccagaggaatatcctgaattggaaaggagagaaagttaaaagtgtaataataatataattcagacatagacaatcttcatgttgatagcaagtaccttgtcttctgaaatcctcctgccagctttcctctttgattttgtcgccacattgcgtagttctttttgtctttgcatactattgaaatgtttgcgagccaaccatccacgaaccgctgcaacaaagaaaaatgatgatgagcctcaaaaacactatccaaaatctttagtttaccaaagaagatagtgcggcttaccagattgcaagtgtatgactgcactcaactcatctgtgcttgcttcagaaacagaatccgcatggaattttgcttcagtgtcaaacaatcttcgggcattttcacctcgtatatatgactgaagaaccaatgttactttccgcatattttggaagtatgcacgagacaagtgaccacggaaatgcttttgtaagcccactatgccttgaagaacctttttcctccgatcctcaaagatcccaatctatgaaaatttgaagaagagtacataagaattgtatcgacaacatcaggaaaaagcctctaaatctctgcttaaagaatcgcttacttgtccagttcggaggtacaattttgtgtaacccacttgatacatttcaggatgaacgtcatattgtttcagaacagcaattgatacgctcagaggatcctgagcgacctttttgtctgacaataagaaaccatatcttcctgcaaactcttgatgtgtcaaacgagtaggatatccagatcttgatattctaacaacttccaacacgccacaacatctaagctgttgtaagacaagatcctcttcataaactctgggaagctgctttgaattcggctttatgcatcgaatgaagtgaggacttgtgttctctaacttgttcatcaatttgaaaagttgaccctgtagagataatttaacatgagatatgcaatatgacacgcggaagattgcaacttattcaaaacagcaggattcaagcttctttaccttgaactttgttccaacagtttggttcgtggagtccgataacataagtggcttttgcgatttgccacgcattttagttgaaaacaatttcagcaactggcagtcgcatgatgataaaagattgataagatcagcaggtaacggatccctgttcttctccaaaaagccatttgtatcatagagaacctgtaaacaaaatcatcattccaacaaaaccgccataagtacacgaaaagttgcacaaaatcagttccgtataaaacctaatcagtatgcagagtctggcttttgagctaaaggaatcaactgacctctccagcataatgattaactctgaaggctcgacctctctctcctttgaagcaagagttggtcttcaaatgttgcttgagcttgttggcaaaggtcaaatcagttgcttttggaaaatttgattcctcgtctagtagagacaacaaaccaattggtttctgcacaagcaaacatatgcaagatattactttaaaataatgtcagaaggtccttataagacaacgaatacaaactgtggcaggccattaattaccttctcaattagatctaagcactcttgattgtctacaaattcgaccttagtccaatcaattccatcttcttcatattcctgagcagagaaaataatgtttaatgaagcagcaacgcaaaaagcacgcatttagtatttcatttacacaaagaaaaaccacctcttgttcaagtttaaataaatgccggttgaagtgttgctgcaatctttcatttgcgtagtttatacagaattgttcaaagctgttattctgaaaccaaggataaacaaatcatcatcgcaggattcaatgagaaaagagattagtaaaaatctagagcagatatgggtactactaaccttaaatgattcaaacccatatatatcaaggatgcttatagatcttcctgtacgtgatttaccgacttccaatgcaatgtttatttgctcaacaagccagtcaaataggtttgcataaataaattttgctattccatccctcatgtcagttgcctgtaagtgaaaacggttcagcaactcatacatcacctaatgatcgatgtatatgaaaacaagtagcaagaacgatgacactattaaacattacctgccgcaatgtcagttttttagcaatacaatccgtaccagcttgaagtttacgggtggacaaaaccaccataagctcttctgtgttgcagcccattaacatagcggcattggcgacagctgtaagaaataacagccaattggtaagcaaacatcacgacgttatagtttttgtaaaattaagacagtagattctaccttcatccgctaccacctccacatgattttcgttgtcagtaactcgaaaagatacatttcctagccacaacactgctgcaagcaatgcaaatgccctctcttgatgctctttagggatttgaacaatgtcaaaagcttcctgcatatatacagatatggttgtgagaaaaaaaaaaaaaaaaaaaagagagagaacaaaaatttgacaatggaaacagactggaaaagataaaacaattaccagtagtttgtgaaatttctgagcatcatcaacaccggcaatggtcaagcaatcactctggctcaggtaggtatactcacttgctgttttaagcttcaatctctctacaaataaaaccatagatatagtagttatccaaaatagaaactaatcaggattagatgtgtgactgtattctacttcagtaaggacacgtctaaagaatgttatatgtggccatacttaagaattgggtattaaagtttcgaatgttacctttaagaatcggtgaagcacctgcacacagctcataaaatatatgataggatctttcgccattgaacagctgaaccactcttgactggtcaaacaagactaccaatttaatcaccaatgctaagtagttaaagtcaaatgaaaaaagcttctcaatggaaacaaaagtaccttctctagcagaactatggggattcagcaagagtagttatgcaaaacatggggaagaagacaataaaaacaagtgagcttgcatactaaacaatatgacaaacaataatataaatgctcaaatcatacttacaagtttcaagtttggctccacatatctttcccattgcactaaaatgaatttctatgagtttaccctgtgccaattaagatattctgttaaattaaaatagaataacttctcagtctacaaaagtggtggtcaagctaatcaagtaacacattaataataacttgaaaagatatggaaggggaaaatggacaaacaagcttgtaaaaataactcacaaatcggctagagttagcatttcttgatgttttagcgtttccaaaagcttcgagtatgcaggttgtttttaggatttcatactctactccacagctacctccaccgagagctgccaagtactgcattgcaaattttgcagtctcagttttcccagctccactttctccactatagaacgataataatcaattcatcgttgatgttaataccagcgaattacatcaatgatcaatattcatatataaaagcattcagaagtctacaaaattcagaatgcaaagacccgtaccttattataagagactgattcttctcttctgcatgtagaaaggttcaacatgtaagtgcagatactcactggaagaccgattaggacttcccaaatcatggaaatacgaaaagcgtgaatataaatgcatctcctcacctctcatcatctcatcataagctgcatccgccacagcatagacatgtggagcatccataaccttcttctgataagctgagataacatcatttccataaatttctacattcttgaatggattgaccgcaatcaatacaggtcctgctttactctgtataagaaaaacatgaaagttctttaggaattaagcaccaaagagtgagaaactaatcggatgagccaaatgatgttcaataactcacataaatcacgtcttgcaaatatctgacacgaaggttataaagaacagatggttcatttagataactgagctgtataagatcttcaacaccttccaatatatctgggtttgcaggaaaaagctcttcagtagacactttcacaacctttgataacaccaaatcacagaaacctgaaagtcagactacagaaactcttcaatatcacagatggaaagtgcaacagtgttaagaaaactcacatttgcagtggacaacataacaagcgacgtatcagcggaagtagactgtatcttccccagttgccactgcccattagatacccgacaccaaactcgaagtttctgaaatacaatacaaacacagtaaccacaagttgtcaataaaaacgaaattccagagctcagtttttcatatctaatactacactaaacacaactgtgacacctccaagcaaagctatctaccaagtacaaacatattccatttcccatattctaatcaatctattaagcctcttccacagaacactcccaggttagacttttctcaccacaaagttcaaaaactcactgctcaagtcacctcttaaagactcattccgaatcccatcccttggaaataactcaacttcactaggaaataaagaattaccttcttgatgaagtactcaacgttattgttccactcagactcaggcttattatgctcctccgtgttctccaccaaactaactttagcgatactaatcttcacaccctcctcttccttctctgctgcatacggagactctgacctaagaccagtcctcattttcttgcttccaaaactattcctcttaacacccaaatccttctctttcctcttcaccccttcctctttcctttccgattcagcttccaccgcaggcgtcacagaaacaacacttccgttctgatcttccattacactagaaacattaaagttggccggaagcgaacgacgagcagaaggaagacgagctcttgaattaggccgagaaggaagcgccggaggcatatctttaggccgatcacactcatctttctgacgaagagactcaagcatctcctctaacgaacttttcgctagtgtgttcggcgatgccgataacatcattcctcaatcacagacctcaaaaactgaatcaaagttgaaaactttctaaaaacccaacaccagaaataaatcagaaatctcttgtgctgagtctttaattgagaagcatttcacgcaatccaagcttccataaaacctaatctctcaaatcacacgcctcgttaaccatgcattacttcctcggaaccagagaaagagcttcttgggaaagaaaaaaaaaaactaaaaatcagaaattcagcgaatcaacatttgtaaaacaatctcgaggctcctcatacatttctcatgaatggatttgaagaaggaaataaaaattgaaactttagaacaaacaaaaattctgacttaaacgagaaatcaacaaaaacctgatctttacacaaacccagaaacgaagaagagaaaatgaattgaaaaggaaagagggagagcgaaacttacgaggtcaatggaagagacaaagacagagagtctctgcttctcaggttagtttgtcagagggaaaacaggagaggaagaaagaaaaaaacagattttttcctggggaaattttaaaaccctaagattttcttcttctcctgaggagattaatgcggatttgttttctcgaaaagatgcaactttttgggaaagaagaagaagataaaagagtaatgaataatcctctctgttcttcttcccttctttctcttcgaccaacaacaaaaattcaaattttttgtctttttttttttctctttgttcagacaaaaaatgggtccgaatctgaattatattaatgactcaaattttcaaaattattttttatatatttgtgaaaataacgttggtcacaaaaataaaaggtgttattatatgcatcattaacgttctataatttgcccctgtgtttttagaaaattaccattaaggtggaatttcaaattattaactaggaagtaaatactcactttaatgttttttctttatacaagtcataaaatcttcaggtagtaaatcatcccattggttagtttttatatcatttcatttatctatatagcatgttaatctaactattttctaacactaaactcctgattttgctcaaaataatcaaatatgtgtgtctccacttactttaattaattttatattttaaaggtcgttatatcttttattttatttgggtcaacaaagttcaaactagctctaaggttatttaaaatttgagaataaaaacaaatgtactaatttagtgaacatgaatagacgttgcctcaatattaaaaaagatccacaaatggccaaagtcaaaaagtatttgttatagaacgtgacacgttggaggagggaagactggtcgttaaggggctttggttgatcgaaaatgacgataatatctctcaatcaaggcgctcacgttaatgtctcagttccaactacccccctttcaattcttttccacaaactctcaagtctcaccccttcctttgtagtagggtttggatatatacttttatccgtttatccgatatgttatgtagaagttgaccttgtagtttggtaaaaattgaaaatctttgttcttgcaagaatctattacatatgttctatatagattaacatgctatataattgtcacttaacagttatattttagtggctggtatagctatccacaaatccataacaagtcgatttatcatatataactcattaactatagcttatccacaaatccgatctttcttcgaaatagaactgctaactgccttatcattctttacttcgacgaccgaatagagaccttccaaaaaaaaaaactcaattcaaccgtaaatagattttttaaaaaatactatagataataggtgacggatacacgagttttttaatttgagttttatcatgaaattattggggagtaatggaaatagaaaatgaaaagagtaaacgtggcttccgctaatctagcaaataaaagagcacttaattagctaaaaagcgtaagagcgagtcaacaatacaacccggctgaacaaataaggtgtcgcagtttttttccatttggagcttaacaaagttaagagaccaatcgacaacaaaacaatactaatacattaactggtcaaccttttaatttgttcatgccacgaattgtttgttttgatgtgctcgacatttaaaatcagatatatgttagcctttatgaagaaagtagactctaattaatttgtagctatataatttcttacaatttagttagacataaaagatggaaaatgcatagtggaactgtgaatgttgtagctagagacatgattggaaaataaattagaatattaataattaaggtcggacactatattgacaataccaaatagtcacagtacttttaaagtattatgatcaattctcactatgtgttcttttaattgcaagcgacatagttttgtagctaattttgatgtgaggtcaagtagatccaactacaaaaattagagaagtttttaggtagagataatatgatcgttattattattatttaatcagggagcttcaacttcaagtcaaaatctagtaaataaccaaaagaaagaaaatatacgtctagtagaaaaaattaacaatgattaacaattaaaaatcaatttatgacctaaaaccacgtacgtgtaggatgatgacaactagagctacactagactagactaagattatttggttatttaaaaattcttgtagatgattggttatccaaaagttttaacttttcatgaatcagtataaactttgattccgctggcgagtcttatcactctatcaaacacattgttatgtagactatagttgattgttaatacataatttaatttcaatcaaaattaacaatgattagagtgtaaatcttttatcaagcaaaattaaaaatacaatgattagttcacgtcaatactcgccgatctcaagggtatgcaaatattgcgcaattaatataaaatgatcttggtgcgggtaataattctacacacacacacccgtaagtattttcataagatcatttcataaacacaatattgaatttttttaaaacatgtctacattcaatgtttacttttgatttggagtattattttcgttaagttaaagtagactacttttgatgtttgcggtccaattcattaaaaaagacaatgatgagatgtgtttgcttaaggtacgtgattatgaatgtacataataatgctcgtgatttttaatgtggcatgtacaaatttgcatcttcttattatcagccttcttacgtccaaacacattaaagatcactatattatgcttgtgttgtaatacattcaatagttgtctatttataacatcagcggctgtaaattgtaatcggcaattgagttactaccacttcgctaaagttattgttctgatcataacaatattttcatttttaatttcgattggtaattttttttttttttttttaacctgagtgaccaaaactcagattaaccttccaaacttcgttaaaaaaaaaaaaaaaaaaacttccaaaattcatagaaatttggatttttatttgaaaacattgactactagtctaaaatgtttgaattagcagtacaaaatgctctaaatttatttaaaaaggacattcaactttttttttttaaatcactggaccactactgattaatttccatcgctatatagatgccttttttattattactaagaaattttttaaactagaacattttcttaccaactaccgatgacaacaaatagatatgcatctttttataagcgcatttcgatatttatgcaaggcaagttaaactttaaaaaaaaatattttaacagaaaagtcaaactcctaatctttttttctactccttaacccctttaaaatttatatacccctacttaattaaatggccatatacaatacaaaatattacaccaaatcaaacttttttatatattcaaatttcaataatgtaagatttctctagttctaactatagacaattatatactttttgtttattttccttaaaaatgtagacatgcaatgcgaggagttaaatgctttgcatcattgagcatgatggaaagggtaatatcttaatttattaaaatttctgacatatccacaagggaatgtccccatttacactcatgtctcttcatgtctatcccaattcgtttgtcctaaagtctctgacattcttcttcttttaccttttctcttaaaaaaacatgcttctgtcttttttcttgttttgtggttgtagtggcgcttgtattcgaagtacgagagaaaacgtaattcgccagttcgcctaattatcaaatttatcagtttgggtttaaactttgaattgttctggacttgttgtaaccgcatatgtgatatatgtgcatagaggacacatcaacaggacttgaatcaacgtcttaaagattgatctactacgctaattaacagagaaaacgacgaaaaatgtttgaaattttagttttatcacacagttaaagttatcagtaatattcccaagcagaccaatcatttcaaagagtgaatggttccaaaataaaatcatattctaactggaattatggattaagttatatatacgcatcatcatatgctcattaaaattttggtaaagctattatcgcatgcgagttcaagattttagcgatagttacgttgctagctcaataaaaagaaattcgttggatctttatatcaaataaatcacgattattgaactttatgaattgaagcaacgtctgaataaggaagaaacatgtaattgtagtctataccgttccatttaaataatttaaatgttggataagatactttctttaaatccatatgcatatcttaaaattgtccccacgaaccggtgtcgaccacaacttttgattttaatacgtgtgagtgaatgttggctagaaagtataaaacctaaaagtgggccaaagtatcttttacaaaattgggtttgttgaaaagtttggtaaaatcaagctaaatataagatgacaactgagtttatgcttttaaaatttcacactactcattagcccactcaacattactcattgtgcgatgtgatattaattacaatcagtagtcaaatttaaccccccaaaaaaatatcaacgcattttctaatttcttcttatttttggtagtttaatgggcttgtaaacataagcttagtaccatgtaaacaaccacaattatgctaaagattgttgctgatcgattagccctactattctaaatctttgtatatacacaatttgttggttatcagattggatccatagtgactttgtacactccaatcattaatataagttaatgggcctttataggctttaaaaaatcagcccattagtatatatcattaaataataatggaaaattagaaaagactgtgaagcgagaggaccgttaagacgacggacgcttatctggaaggagagtcatgaatctgagtgtgaaccgatgcatcaccggtggtttcgtcggtggattctctagctgcagactcaatcatggtagtgatgatttgttcttctgattcaatttctagttttaaagagagtaattgagcaagatgaaacttttaatctctttgggaattttgattgaagatgatgatgtatcgttcgcatagcgcttggaattactgtgttttgaattcgggtgatgatcatgatatgaaattgaaactgggtcgcgttgtcgttttagctaccacatgtttagttatcttctttgtaacgttcattttgaaatggttagatttaggaagctgattagaacactgacgtttgggaatagattattttgagccattgggtcattattgatgagtttgatttctctccatggactacagagaaaaggtgggttcgtgctggcaagcactgtgagcttgagagggagagaagtttagtgtctgatgctgtttctttagagaggttagagagcaaaagcattaaacttgcgatgcttgctagtggtttaggaggtaatgttgtcactactctcttctcacctccttcattctgttattgttctgtggcatgtatcaaatcttttagtcttgaggtaaatgcttagtttatgaggatatgtgttttaagaagctagccaattatcgttaattatgtttccaaacatctgatcatgaacacttgaactttatcttggttttcccagtggcgaacttggtaactcttagctcagcaaaagccgcagacttgaagatgattgtcttggtaaggtttaatcatagattttgatattattgtttatatacttgtgtgctttcttcttttgtttctgttactgtagactagttcaattatgttccacatcttaacctgaatagtttattgagattatgtcaataagtgtttttttttccttttctccttagaccttggttagggattatatctcaatatttttgtttggaacgaatttgtgcctatgcttttctgccttgagatacgtccgattgcttgtaaaatcagaaactaatttccccttaagacaggatcaagccacttccatttacatcttggctgaaggaagccttggagattcggtcgggaacttcttgtattcagctaaccaacaggctaacgaagctgttcaagatcaactatcagcactcagtgtaacaaggtatgtttctcgggttctctctcaatgaacgcgtttctgagaccttgaccatcaggttatcctgctaatttatccctgttgtagtttggcagtaatatttggggcaggccttgtgacaagtctgtctccatgtacacttagtgttttgccgttgacacttggttatattggtatgataacttatctcaagattttacatttctcacaagttatttagaatcttagtttgatgttctaattctttcctcacctgtccttcatatggctgtaacatataggtgcatttgggtctggcaaaagcagaggtcaggttagtggctcttcagaacagatttttagataatagctgtcgccttaggagttggttggatcattgtcgttgcagattgacaaaatttaaaagaagttaaagttgagttcctgtaaacaaatcaaagctccgttaaaggaacaatagacccagtccaatcaaatgcatcatgttttcattcacaagtatagtagtttttagtgacctttcagttcttcatgcatttaggttattggagatacagttgctttcgcactgggattagcaactaccttagcccttcttgggatagtagcttcttttgccggaaaagcctatggacaaataggacaaggattaccagtagctgcatccggtctggctattgtaatgggtctcaatctccttgaggtaatttttgctacaatcactcttttttcatattgcatcaatcagaatggaaaaatgcattagataatggccatgtctaacatgacgtatttcctacagataatcgaacttcagcttccttctttctttaacaactttgatcctcgtgctgcagcagcaaacttcccatctagtaaacctcctagcacacaaaactttcatggttttttggtcattaaatcttgtttcttatacttggtaacaaaatgttctgtcaggtgtacaagcatatctagccggtctcacattcgcacttgctgcctcaccttgtagtactccagttctagccactcttcttggttacgtggctacttccagggtaactccatttcgtctccttccatttgaaatgtcattatctcaaatatgaacatgaaagctagttaactttccggctttgttttcaagcttttaagaaacggtttaagtttagcaaaaagctgatatggataaaatgtgaaaaacaggatccagtaattggtggaagcttactcttaacctatacaacaggttacgtcgctccacttatcgtcgctgcttcttttgccggagctttacaggtagtttcttttaaaaccaaatagcgaaatgcaaatttcttagttaagtttcttacagtaatgaaactaactgcgtatttactcgtcttaaaatttcttcagagcttactttcgttgcgaaaggtctctgcatggatcaatcccataaggtatgttaaagataaatgattataggctattgctttttcatattgttgatttactaaatctcggttccattttttcctatgttttggttcagtggtgctcttctacttggaggaggtttatatactttcttggataggctttttcctgctgctactatggtcatgtaaaaacttaacttacaaactcatttcggccaaaaacaaagtgtttgtaatagtaaataaataatattgtttataatgtaaaattacaaaagaaaacagattcgaacactagtcactactcactactgttaacatataatccttcacttgtaaccacacgattaacgtctcgaccccaaaagaaacataacaatcataaacacaatttttgcattattttgaaattttgttccccggaagaaggaaaaaaaaactcttttaagtggttgtaaaaaagagtcaagtcaacttttgcgactgtgccgtcatttttctccttcaccgacgcctaagcaaaaaccacgaaaatttacaaacgagtccctccatttaccatttcattgtatttagccaaagattctaatctttgcaatctcatctcttcgttaaacttctttataaacgcttcaacgcgccgattcaactcctcctgtcccggcgacggctcgcgtttcaacaccgtcttctcctccgtgggggtatttatgtcctttaaattctcggacttggtcatcttctccttattttctggtgagctttgcacgtgagctctttcttgccacgtgtcggatttagtcaagtgcttagttaacggcgttgaacgtccttccgttatcttcttccacgtcgtctccagcgtgtcttgtctcctcggtggcttcgtcactcccaacgccgtctttttatttccacctgtataaacagtgacaactcctccgtcattttacgattttgcccttctcagaaaattcgaatttcgagcaaaaaaaactaaattattttaccttctgaattagatttaagagatttttgctgattaaatcgcggcggttttctcgtactgtgcttcagaatcgaaatctccggcgaatcattcttcaattttggcttctccgtctccggttccggcgaatcgctactctctttcgacttctccgcctcctgaacttctggaaacttccggatagcctccaccgttggattaatcgacacgtcatcgattttctcaacaaatccggtataatcagaaaccacatgaaccacgtttaaataaccggaatcgatatcagaaggtaaatgaaccggtaccggtatcggtattggagtcactacttccgagatctcagagtcatcgacggaggacgatttatgagtgagtttagaagtagcgatgatgcagacgatgatagagttgatgactaagtaaagatacggtggttttaagaggaagacggtgttatcgtaaataatcggaaagcaagagactacgaaatgggaaacggaagggaccgtgagaatcatcgccgtggcaatagatgaaacgccggcgattacgacggtggccgtcgttttgaaggaagaggtagggagaagaagaggcattgagaattgaattgaatgatgtaatttgtttttgctttgggaatttcaaattttgttagttcggtggttcttatctacgaaaataaactaaagaagctttgagatgtgtggatttatatagatacggtgaaatttataaattcttaaaaatgtggtccgtgtttgtgtgggctttttacagaatcataagtgggccttatttattgagggtatggttatggaggcttatctgagtgacacgtgtcagttttgggttttgacgttttaagttataaacttataatataagcttgcctaacatttgcaacaagattttgacaatagaagtacaatattttatgcattgtgtgtgattagagaatttgagattcgagaatctgccacctacgtaccaagtcgtaccgttgatttttgttttttcacttggcaacaaaaaatttagtcgattgtgtcttcattttatttatttttttggggagaaatttcgagtcttcattagttcattttatgtatgttagtgttaatttgagtttagccgatctagaagatatttgtaaatggaaatattcttttttggttttgttattgtaaaattatataattgtaaaaaagttatggttgctagcaaaaaaaaacaaagtagttactgttgagctaggatttttaggtaatgtaggccatttttcattgacattgtaaaattaatagttgaaagtcatagtgagaatgcgaattatgatgcatgtgaatactgttttagataaggacatgcagattgtaacataaaataattgagatagatgcatacgtatatatcattctcaatgctaaacgttcaattttgttttcatattagtgcttatattaatagtagatttgatttgacaattcaaactcacgaaagatatatatcgcattacgggtcaacaagcacaacaaaattctaccgaccattttggatttttgtacttgatactgattgatcttcttatgcatcataaatattggctatatcctctacatagtataatagaacttaaactttaaacttctgccctaaggtcggtacaagtccgacatggtatttttgttataataaccaaatgagtaatgctaaagtccaacgtggtgttttagtttatgtttgcattagatcaaggacgatgtacgtgtaagagaaaaccaaaaaaaatgcaagaaaataatataattaaatacaatgtagtgcacaacttcatttgttgtgctttgtgatcaagcgaggatttgtagaaatggtatttacagatttacgttgtcatcattgattacagttttgcattttgtagctaataaaacatcttgtaacgaaaaaggtaaacaaaggttggctagtgggaggtacacaagcttgtggtgaagaaggaggatgagctttaagccatttgaccgaaagcccgacaatgccaaactcaaaactttataacgctaaaacagccgcccataacaagaaacaagttcaatatcaacacgtcgcctttattgatcttaccaataaaggtcgattaatttgttttctttcaaaggcttttcggaaccgtttctttgttttgcttagttccaaaaaattggtatgtcacaaacttcgtaccaaagcaaataaaagcagtaagtggaagagaacaatccacgttttgtggcggtctcaccgataaatcttttttttttttcctttcttagcaagaattacatctattaatttttcgacaatcgagtaaaatcataaatcaaagctcggctacaacacagttccaaagaaaagaaaatatatgtttaacagagaaaaactgtccagagatgattgtatatatattcttttggttcttcaaatttagaacaaagatgtaaaggcaaattcagaaaaagtctctctctcttgatcaatgttttgtgaacattccatccatcaaggaagagaaatcaaagtctttgcctgattgtgaagatggtgtggtgcttgttggttgggttgcggatgatgactgaggtttaccggttgagtttggggtcataccgttcacttgattagcttgacccattgtgtagaaactgcattattaataacaaccaaagatcatatgagagttagttaggttaagcacttttgataacgttatgatgttttcagaagaaacaaacaagatgcagttttgtgtgcatacctggatgatgggtattgtagagtgttctcttgcggttgtgcgggtctcgtgttcatgtttgcgttcatattcatgttctaaaattatggcgatgtaacagagagcaagaattagtgagaattttgcaagaactttggtcaatggtaatattgatcttgcttaaaaaaagtaaaggggagatcttacttgcataagtttctggagatcagcttgaccacctacggggttagtcattccggggatctggtagccgccggggtttgaccaatttgcagaagctacgttaagagcattagcaatagcttgttgattcacgccgtttggagtgcctccagcagctttcgctgcagccatgtaaagggcttgctgctgagcgagcatagcaacctgttgctgatgcatggcaaaaggcgatactatattcgtctgtaatcaaatagaacacacagagttatatcacttgaatctgctctggtgttccaaatgtcccgtgttgaagaaatcatagtaagtgataacaaaacacaaatcatatcattcgctatatttgtaaatgtaagttaaataatgatacaaaaacgaaacttggaaagctgaatatcaacaaagcagtgaaatctgagaagcgtatataattaactaataatttaccttctcaaacaggctcatgatatcgcctttcacatcttttggtgcttgttgagttgttaaattaggtgtgtccttaaacaaatcctcaaagtcagaagatgaagctggaggagaactgctctcagcaggcttggctgtgacaattttctctgccgtttgaccacttccagcagctacagttttaggattcagaaattaatctattactccaaagcattttcaaaagaagaacaattgacataaagttaacaaggataggaaaaatgtgccacgatgttagattatcacatgctagatagatacatacactgaaagccagcccatgagttatcatcggcaggagtatcgccaggagttgcctctgaggtatttgtagtcgaatcatccattgatagcatgttaaacagatcagtagcaaaatccacctttggaggatctgatgctggtgcaacatttactgcttgtttctccctctctactggagtagctgcagactccattttctgctgtggctttataacctgtcatttttagcatcatgtatcagaaaaaccagggtttggatactgtaagaaagacacgttgacagattatgaggctctaaaaacacagtgagtaaaataatgatctgacagctacagcatatgcattgacaaaaataatgatctcatagctgatatcctaagattattaaataagatcaaggaatacggatccttaatactgatgagtaactaaaggtatggctctttagttatacagatcttctgagaagtatgtttggtacctgactgggtccttggggaggcacgggaagatttattctcgttgcagcaacattatttcttgttctagatgctggaatagttttcctctcctcaaacaaatttacaggactactactatgtccatgctcatatcccggcccacttctctccacagatttccgccgttcctgctcgactctaggaggtgatctagccttttcccctctagaaacccatctcttctcttcatacctagaaaagtcatatgtcataagaatgatttcaacgtccatatgaatagcaagatagacaattcaatgaggtggaactaactgaaaagtttgtataatgaaaaagagagatacatactttgcacgtataaaattctcaattccaactctatcatagtttgggggtagctctgcttcccagtaactatttgctttatcatttcccattgctgcatgcaaataaaagattatatactttacattgcgtaacaacccatgaatcagccatagagcatttagtttaaaagacacttacactgtataaatgcaacctgctcggggagccatgtgtccagagtggcagatcgaacctgcactcattagcccagtcaggtgttttggtagaaaataaagtagcttatgctgctaaggttaacatctacttgacaaaaggacacggctcatacaaaaatcagagggcgaaatcaaatcatgtacttttgcacagagttgcttgaagttcgtgtgtaaactgtatcgacgacaatgggagtacaagaaggtggggagatttaatgcattcatgtcaaactttccagctcttgtgatggaaaatacaaaatgaaattgctaatacaaaaaccaaattgaaaatttgtgcagagaatttgagccaaatggaatgagttattcatcgaattaatatctgagctttcgtaaaaaaatgcagcatcaagaaaacaaatgtagaaaggaaagtgagagactaccttcgatatgtgtaccccgagactcctgtgaatcccagaacattgcatgcagataaagatacctaaattaacactagcccatcttggacctctgcaaagcaaatggaacagtattagcaaatacatacatgaaccagcataataatgctgaaaattcacatcaggtagaaaactatactttgttttgcagtcagcacattctctgttctctggatgtttaagaagcccttcaagaatctgcagataagtagcaccaaaatcaaatgaatattcaagcaatagactacataaacgaaaaaatcatacgtcgcaaaacataaagaagaatctacacatacaaaatatagagtatctcaagaaaacttcaaaattatcagaattgacatgtttaactaaccaaaatgaatcaaagttctcattgcagtatgagataagtttcgtcaatgaatgaacaccaaagttctcgaagactcgacatacaacatcattcctaatatcctatacatgtatgcatcaccaatcccacaaagctatcccaactacaactaatagtttcaacatggcaaataactcaaagactaccaagcacaaatgaaaatccctatgggacgctaagctccttggatccctgtgttcgattctttccaaaatcaaacaattgaatacgaatttctataggaaaacactagaattcaagctccatgaaactgtaacattcaataagccgacgttgaatataaaacaattcaaaaacccgatcgtgatcaactattgtcctagacaacaaatcgaaatagagaaactgattttcattgctgatgaataataattctagctcaatcgatcgaagaagataaggatcgacgatacaaatcctctcctaactagaggaaaccgaagaaaatgaaggaaggatagctgctaatgcacagatccaatcgaattaagatcgatcatatattgttggcaaccaaattcaaatatatgacgacaaatccacaaagctcggagaaaataaaataagagaatctgagattcgagattagagagagacctttctatggcgggcattaagctccttagagacgttggctttctcgttcatggcggatagataaaatcaaaagaaggagaatcggagaaagaggaagaagaagagctgaagaaaaatgatctacggagacgacgaggtcaaaatagtcttttccgccttcagcgctcttcaatatctctctcttcttcttcctctccgaaaattaaaaatccttttttctttgccctttgagaacgagcgaccaagagagagagatgggtcaatactttttggaccgttcagattatggtactggtttattaatccggttttagatttcattttcaaaattgaatatggttcggtttaatttcatttcggtttaaattttcaaaaataattcggtcactcgtgattgcagcacctgaaaattttcaaagaaatctacacatgaatatttgtgaaagtgtaatcatataaaattggttaatttgtgactaagtgggttttgatttatcaaaaataaggtcggtttatttggcggtttaagtggtttttttgattggtcatatataagcattagagtgttgcgggtggaaaataaatcacatggccatctcatcacctgttatgtctgtatccactttggagtggttgttgtattgattccaatttctttgtttatttatgtgatgtttatgggacatattttatttgctaagatttttatttgatgtgacgatgagtcaacgaatgttccaaccaacacaaatttcaatttaaacccaaaaaaataattatattattatctcttagattcctaatttttcaaactgatatttgtttgtcaatacgaactataatcctaacattcgacaaactctaatttaataggtatacattaggaactataatacattgtgtgtgaataaacctaaaaaagttttgtagtctaatgagaagtggtctctcgctggctctaaacctcataatcggtttggtctaagtagcacctttacttatctgtatgtggaatatcatcgggagttatcacaaatataatcccaaagccttttgaaatttctaacttctctaacttcatccacatatatatactttccaattttgaaaatatatagatccacttagtatatttccattttaagtcgccattagaagagagttatgctaccaactttggcaattaatatgctttttaggggatgtgacgtcgcgattatgatgggatgagcttggaaatatatgatcatcatagccatctctctttgttatcagtgcgaggaccaacttttcaggaggatatttgcacatctagaaggaagatttttctcatatagtaaatagacgactgcttatttttgcttctcgaattactctccatagcctctcttcaagtattctcagatctcaaaccctctgacacgtatagagacttccccacattttgcaaactttaatttcttcttaatcagacttagcttcaagctttatctcaatcatgtacatctcacattgtttttctaaaatttgaggatattgattctggagtatgtattgttatgtaaataagtatttataattaaatcaagtatatggaaaatatattcgaagaaacaaacttcatataataaggtttgaacgtggttaattaaaatgatatccaattaagattgtatcggatcttggtggttatttatgtgaacatctcaacaactagggttttgttttgtttactctttcttatttgattctcttgcagcctcgctttcccctaaaacacttcttatcaatggcgctgcttctcaaccaacccttgaagctactatgctttcggaggaaacctgtgttggtgagatcatctcctcttctctctaatgatggcttatcatcttctttgctgcaaactcctccttgtttcgtcgtcagcgctaaacgttgtggaagacttgcgaaagagggaaaactcgtgattttgaatccttatgaagatgaatgcacttctttggataagaaggtgcctatggcgttgttgtatgataatgaacttgtaaccatcggttcatcccatggctggatagctactttgagtcaggacgacggactactgcgtctccaagacgatctaaacccggttgcatcggatactaacccgaaacgcattcccctgcctcctcttgtaactctccctcattgccaaactcaaatcgttaccaatgtgtcattgtccgcatcttctcctgaggatgaagactgtgttgtggctgtcaagtttttgggacctcagctcagcttttgcagaccggctcaaagtaactccgagtggatcaacatcagaatcgaaaacccttgtttctacttatctcgtgtcatgtactccaagaaagataacatgttttgcattcccggatctggaggacacctcattggaacatgggatctccgcacacacaagcataatttgcagagcttgcagtttcaaaaccttcccaagctgacaaagaccaaacagaagctactggattcatgttgcaagagcgagcacttggttgagtcaccagctggtgaaactttcttggttaagtggtacaagaagtcttcaagcaagatcatcaagggtattgcgcaaatgaaaacacaagctttaatggtgttcaagcttgacgaacaaggaaacgcggtttacactcaagatattggagatctctgcatttttctttcaaagtctgaacctttttgtgtccttgctagctcttttcccggactgtgccctaacaatgtcatactctttgactgtgacgaaggcggctttttcgatctggatgattccaccatcattactgatgtgatgcctacatcattcaaaagcaattaccttatgccaccccaaaaactagattagtaccgtagtttggaactgagtcttttcttttcttctcctatattattaccatggtcatcattggtaatggtcactagttttatcttggaacggaaccctttgtttagttccatcctaaatctctatttgcttagttacatcatgagtctgcttttggttttcaacaggttcttttctactacctttgtgtgtctctctatagcatatctagtaaccactcaacatccttcacaagcatcattctttcaggaaatatcagaaaatccccattattttgatgtctctgtttcatcatgtccctcacataacaatggcacatgcattgtaaaaaataatccagagcataacaaaaaaagaaaaactgagaaaaacaaaaatttaaatacttttttcttccttttgataaacgaagagaaaaatttacctaccggcccaaatcaatcggaaagagaattttaaaggtaatcagacccataataccctcacacagcagttaattgatacacataataacacatggacgtgattcactacccatggaggtgattcactacaaaatcagagatcatcaaagagaaattaagaacgaatcactcgggaaaaaaatatcaaattggtttgtgttttagtttctctctaagtttggagattttctataatgttttttatttttattattaacgagtcatttgaaagagtgttggattcctcaaagtcgttgctttggtcgttaatatcgcaacactcattatttgttgtgagttttagttagctactttaatattgcaacatttttttggaaatgaaatcatgggggaaaagaacaattactgaagggtttgatcgtaattaaaatgaaatctaattaagattgcgttggatctttatttatagagatagtgttgaatcaaatcatgtcaaatcacaactttaaacagaaccaaagcaaatcgagaaaatttcggttctactgaccgcataaacttatttattcttcaactagggtttgtataatactttcttaatctaatctaaatctcttgcagcctttgcatttcggtaacaacatctcttacgcatgtctctgcttctaaaccaacctttgaagctactatgctttcggaggaaacctgtactggtaagatcctctctgatgcaaacccctccttgttcaatcgtcggcgttcaaccttgtggagctgatcatctcgggagactcgatgttatgatgatgtctcgacgcacttgcttggaaaagaaggtgcctctagagttggtgcacagtgatcccatggtaacgatcgggtcatcccatggttgggtagctactttgaaggacgacggtatattgcgtctccaagatgattttaacccggctgcatcggatacgaaccctaaacgcattcccttgcctcctcttgtaactctgccccattgccaaactcaaatcgtcaccaatgtgtcaatgtcttcatcttctcccgaggatgaggactgtgtcgtggctgtcaagttcttaggacctcagctcagcttttgcagaccagctcaacgtaaacccgagtggatcaacgtcagaatcgcaaacccctgtttctactcctccagtgtcatgtattcggagaaagatgacatgtttcgcattcccggatctggaggccatctcattggatcatgggatctcggtacacacatgcacacacccaagattcagaagctgcgatttaaaaagtttcccaatcttgcaaagaccacacggaagcttctggattcttgctgtacaagcgagcacttggtggaatcacgatccactggtggtgaaatgttcttggttaagtggtacaagagaaccgctgagatcgtcaatggtgttgcgaaaatgggaaccgaagctttgatggtgttcaagcttgacgaacaaggaaacgcggtttacacccaagacattggagatctctgcatgtacctctcaaaatctgaaccattttgtgtccctgctagttcctttccaggtctcccctctaaccaggttataatctatgatttcgacgaagcaggatttttctttctggataatttacgcttcattggtggtaattctacatttaaggctcctttccatattccacctccaaatatgaacaactagcactttacatagtttggaatattctttcctgtttcaattattcaaagatcagattaatatgtttttttttaataataaattatttgtgagattgatatgcatatctcatcagtactctttcatgcacttgtgtttaagcagcaatcattcatatgtgtgtgcctttcaaaatcgttttgttgctttcgagtaagttacttgagatcaggggatatgaactgtattatttcacaatgttatatttttggtttgaatcctccaccaattgtttttgttatttttgagtgttttaactttgtattttgagtgactcaacccttagcttgggagactctctgactgcttcagtcatttttaaatgagtagataaatttcagattatacaaagccaactggtacatgtatcacacaaaactattattttggaagacaaaatgagtaaaatcaacatggttagagaaataaccatatttttttaaaatttatatattcaaacactcgtgcaaatataagatatttaaattttgattgaactataacttaaattggtgtattttgacacgtacgtgaaatagcactttagagaagagaaagactaaaactctgtggtttcaattaatttgtttttgcctttggagatttcataccttaaattagtgaaacacaataattaatagtttactcaataaatagcataaatctaacaaaaaagagataagacataacttctaactctcagcaaattaagttttacaaaacaaattgtaatggagaaccaatctatgtcttcatcaagctcctccacacacaaacatgatcaaaaactcaaaagttccgttgtggccatggaggtcctggaggagaaggagacagtgaacaatccgccccagtattataataagatctacatctgttacttgtgcaagagagcgttcccaacccctcatgcccttggcggtcacggaaccacccacaaggaggaccgagaattggagaggcaacagatcgagtcaaggctttctaacaaagacaagtctaacttgctctttggtgggtcttcacaagatgttttatcaaatgataatcaccttggactctctcttggtccattgaagtccatagaaggtagcagcagcagcaacaacgttaacccattgcttaatgttggagtccctagaggaaccacagatatgaacatgaacaactatagctcacatgctttatcaactgatgatattaatcttgatcttactcttggtccatctaagtccataggagatagcaacaatatcattaataacaacactaactcatccttcgatgggaatctgatcattcccgttcgtcctcgtgtgtctagataccattttgttgctgggaacccccttgattcaatctctagaaacattcctccttctattacttttcctcatctaaacatcaatctttctcatgattcgttttctttacaagagaatggttcgggctctagtcactcataaagtctcatctcaaatgggaaagaacaaagtcatgggtgcctgaagatgatgataaacatcagctagaagaatattggggtcgtgattattatcaatgtatctttgttttttgttttttttcagttttctatgcattatttagtatttcgctttcagtttagaggtatcttatagctattgaagtttttgttctcatttttttcattcaattgtttttttttttctctttttgtttccttcttgtcttataaatgttctcttttcctatttgtcaatctttgattacttcatgaagccttttatttttcaatgcctaaatctcatgatttttgtaaagatttctgcaagtttctggtctaattatttgtaagcgaatttgatctttcataatttaaagagattctgagttttgcttgaaatcctttgttaacgagacattatatctattcaacttataatatattagtctttccgatcttattattagtgttgtaatctcccaaatttgtttaacacatgtcatcatctttcaggattttttaaccaaaaagataattatcttttttatatatatcaatgttaatgaatatcgtctagttattgaacctatatacataatatgtaatttaagaaaccatatttagaaaaatggaatataatctagagtcttgtataataaaaggttgtcctactcacaacttacagtttccagtttgtgataagagaaggttttgtttaaaaaaaaagaagagaaggttaacatacttagaaaaattgggtaacaaaagatttgcaaaactggaattttaaatatttcggaaagtatctgagtgatgcagaattgaaaatttcgggttctctatccttgcaacgactatcgtctgtatctagaaatgaatggatttcacttcatggcctagggttacatttcccagcgttattttgatttgggtttgtgagatgtctcatataaaatatgatggaacattaattattaaaaaattgttttgtgcaaataaaactttaaagtcgtttttacaatggataaatacctagctagtaaaccgtattatgtgtggtgaactggtgataagtcattcgttatggataaataatgtatgttgaaaatatatttgtccaatagtttcatagactaattaaagaaaaatgtggcgttatagacttatagtcaactattcatgttatatcatctaaatatatatgactgaaaatgcatttttaagaatatcaaaactggtattctgtaaagttcatgcaccatcagtatttaaaattgtattcattttgggtatttcctagtaattagtaagtatatcgaaagtaaataaaaaggaaaataaacaaaagaaaacatagaaagtaagaaactgaaaacaacataattaaggaaacaaaacacaatttctatctatcattaagtcaggataagaaaaaacaagaataagtagtaaagctgactaagacatagctggagtttgtatgtacaatgactcaaaatttaacattctatatacaatggtgtgtttccctttctttgtatttgcaattatcatatatatatatattagagaaaataagtgaaaaataacatcattccatataatagaaaatataatcttgtattacttagcttattaatacatttttttacatatcaattaatattttttacatattaattgctatatgaaataacatgaagttaccagtttgcaacggtcgatataacgaactgaagcgtaacatttttaaaaaaattgaaatgagttagtgttttttttaatttacttttacacataatgacgtatactataacaattatagatatattttagctaagtagataaattttagattatacaaagccagttggtatgcacacaaaattattattttggaagacaaaatgtataagatcaccatggttagaaaaacaaccatattttctatctttcattggagttatatataacacatcatgtaaacaaaatctagtcaaatttgaaatatattaattaaattggtgtatttttaacatatgaagtatcattttagaaaacagaaagaacaaagtcaagataactagagacacacgtacttgaaatcatgagtaaataaatattagattatacaaagccagttggtacataatgcacaccaaattttaatttggaagacaatgtataaatcaacatggttagaaaaacaaccataacttttaaaactatggataattattcatagtagttatataacacataacttcatataaacaaaatctagtcaaatttgaaatatattaattaaattggtgtatatttaagaaagaaaaaaaaaagtcaagattgttaagaggcacaactatttcttttaaacaaaaaacaatgaattcaaagtagatttactgttacaattaatgctatttgctcttggagattttataccttagcgagtgcaacacagtaattaaatctctcaatatataccatacgtctccggagagaagaaatcactcacttctaattctcatcaaagttttacaaaaaaaatggagaaccaatctgtgtcttcttcaagctcctccaccaccccaaaaaaacctgatcaaaaactcaaaagtgccgttgtgaccgtggaagagaaggagacaatgaacaatccggaacaaaggccccctcaagaggttgtgtttgaaaacacgatccctgaccctgagttgcctgttttcacattagaagttgtccgaacggaaagagataacgagctaaaatatcctccaaaggataaaaatctcgactcggtgctttctggtggtacttctcttccgcctttccaaagctttccagtgccctctttcggcctctttggtccagcgtatggcggtagcagctcaactaatgatattaatctggatctcactcttggtccatcttcttggtctaacactaacccatcttcttggtctaacactgacccatcgttctatcgaaaattgttcactcccgtgctaccttgtgtgcctagaaacaattttgttgctggaaacccggttggttcaaacactaggtatattcctccgaatggaaacaacaatgtttgtcatgattttttttttttacaggggaatagttcggcctctactcactcgaaaagtctcttctcaatgggaaagaaccaagccatggtgcgtcattttgctttatcttatccaaccacctattattgttatgatttgttttctttacaagggaatggttcgggaaactggccactcaagtctcatctcaaagtgggaaaaaaagtcagggtgcctcctttggctcctccctattgaaacaacaatcatgattttttttctttacaggagaatggttcgggatctagtcactcgaaaagtctcttctcaatggaaaagaacaaagccgtggagcctcctgttgctcctcctaatggaaccaccgatcttctgtttccttcacccgagaatggttcgggctctagtcacttaaaaagtctcatctcaaagggggaaaacaaagtcgtggtgcctgaaaatgatgatgatgatgatgattatactgatactactatcgggaggataaggtggttgaacaagaaaaaaagatcaagaccagagtagtaatttatctatgtccctttgatttttcagttttctattgaggcttatgttcacctctcttttttttttcatgcaattgtttcttcgtttcgtttcaaataatctctgttgtttcgattaattcatcagtcccttttgttcaattcctatatctcatgattgctctaaaattcctgcaattttcagaattcatggcccaattattcgtaagcaaacgttattttttcaaaaggttaaagaggttaaagagacattaaagagacaaaatgtataaaatcaccatagttagaaaaacaaccatatttttaagaatatagataactcatagtagtcatacgtaacgcatatgaagaatattgattatattgttgtgtttttatcttatgaagtatcattttctagaaagaaattaaagaataaagtgaatgacagttgtagtcttggagaaacaattattgcttttaaacaaaattaagtagttttacggtatcaattaatatttgttacccttggagattatataccttaacgagttaaatacaataattactatcctctcaataaatatcgcctctaagcaaagagataagacatcactcacttctaactgtcagcaaagttttacaaaacaaattatgaacaaccaatctatgtcttcttcaagctcctcctccccacacaaacatgatcaaaaactcaaaagtgcccttgtggccgtggaggagaaggagacaataaacaatccgaaacaaaggtctcctcaagagattgtgtctgaaaggacaaaccttgagatgcctagtttcagattaagttttttccgaaagaaaagagataccgtgctaatacatcctcccaaggataacaagatcagccacacctgtcgtttctgcaagaggaatttcaaaagctgttttgccctaggcggtcacatgaagtgccacaaaaaggaacgagaattggagaagcagcgaaagataatcgaggatgcgatgctttgtgatagtactcctttcaccttgcaaaggcttcctgttggcccttgtaagtatggccaaggtggtagctcacatgctttatcaactgatggtattaatcttgatctaactcttggtccatccaagtccacaggaggcagcaacaatagcactaataacaacactaactcatcgttccatgggaatctaatgactcccgtgggtccttgtgtgcctagatacagtttggttgctggaaaccaggttgattcaagcaatatacatgttcctgcttatccaaccaccgatctttgttatgatttttttgctttacaagagcatggttcgggctctagtcactcaaaaagtctcatctcaaaggggaaaaacaaagtcatggtgcctgaagatgatgaggatatcgggatgataaggtggttgcccaagaaaaaaagatcaagaggagagtagtaatttatctatgtccctttgtgtttttcagttttctgttttctattgaggcctatgttcacctcttctttttttcatgcaattgtttttctctttttgtttctttgttgtctttttgatgattttgatgtttcgattaattcatcaaatccctttttcaattcctacatttcatgattgttcttaaatttttgagattttcagaagtcattttcgtaagcgaacttaattttttcaaaggttagagagaatctgcaatttgcttaaaaacattagttaaagagacattatctcttcattgacaatttgttagccttggaaaattgaaaaaaaaaaataagaggcagaaagaaggtctatctgatcttctattgttgtaattgtaacctcacaaaaaaaaaaaaaaaaaaaaaaaaaaaaaaaaaaaaaagaggcagtggtttccttttgacgattagggtttcgctggttccagtttgcccggttttcttccttgacccagatccgatttactagattgtattacaaatgtaatcatctttcaggatatttgtaacaaaaagatacaactgttatccaataaaactgttattttttttatgtattaatataatcttgtaatcctagtaagaatttataaaacttaaaaacctgtaaggctgtaactgatgtttgcatctccattctccaaagatcttttctattgaacaaaaatcaaaactatttttgtttctcttgttcaagagaaatctccttttaaagataatttcctgaagacatttattccatagtatgaagatcgaggtctagaagttgatagtattgaaaattgtctattggatcaactggattgttttctcaaacaaatgaaagtcaatattgaaaaacacaagtgctttttcttccaagcaggagattgataattttgcatttggagcttgtgcagatcatttatatattaatttaagttcgtgaagatttaggtttatggttgtagatacctcacacaaagcttacatagtagttacataggaataataccgaacatcgtcgcttcatttgagatgttgggttgatagacccaacaataaaatcatcctaaaagaagtaagctacgtacttattatttataaaggcttgtcctcctcccttccttaaagccaaagccaactctttaagtctcgctctcactgcttctggcgaaagctcaagttgaggatgacctctcagaaaatcatcgcttccatttccatattcctcagattcaatcttcttaaagcacatatacaatagcaaaacggaatctagaattttatattataaaaatgttgccacgatttttaccaatatcttattcaatgtcgaccaaattaactattgaaaccctaatatcactgcttttatggaagtttgtttttcttgttcaatcatcgtggtctagaagttgatagcattgagagttgctatatgatgaaactttatagtttttgctagacaatgagagtcaatattgaatacatgaggaatatgaatacttctcaacttgcaaatttgtatttttacttcgcaaattaacaatcttttatgaaattttaaacaagttttttgaaaacatcaacatagatggaaaatctgactaggaatttcacagaaatatgtaaaatcgatttctaagttcttgttgttagttttagatgttatatattaatgttcaggagataacgtcatcaagcggggatagctcagttgggagagcgtcagactgaagatctgaaggtcgcgtgttcgatccacgctcaccgcatttttctttttgtttttgaaattttatttctcgttgcaaaaccaaacgacgccgtataaatataaaagaacaaattgacttggagcgacgttgcttcgttagaacgttaggtcgcacgtgtaattgacttctctaagaatcaaattcattgggtttcagaaaaaaaaagttataaactttccatagagaataatacaaggtcgaaaaatgacaaattcttaattctttacatgaaatttaatatttctgaaattataatacttggttcacgtataaaatcatccatagataagtaataacaccgtccatgcatgaaccaatattataagattctaacaggtaacagattacatataacacatgctcaacaaaatggcatagtcatatttatgaggaccgagaaatgtggatcactctgctttctttgtaacaatttagaacttcgttcatacatgatacatatcgaaatctacaatgtctataattttttttttcttgacatatatatgtatttaccgttgtataaaacattaaatatctggatttatgatacagtttgttgtcattacaaaattaatcttaaaacgataccttaaactggagaaatagtcatactttaattttactttgaaacgaagtcaacgaaggttaagtaaaattgttaatggtgtcaccgcgaagttcgtccaaaggcacacagtctccaacatgtatctcaataattaattaacataatagcccctttattaagcaaggatttgacttttcaccactataaattcacaatcaacaattctcattatcatcaaaacaaaccaactttccttctctaatcaaaacaagaaagacacaaagatggagatctcaaaaacccttttgctagtgatttctctggtggctgcaacttgtttcttgcaagccaaggcagctggagtttattgtagtaacccttacactcgatgttaccgcaagtacattaggtgtccagaggaatgtccaagcaaaaccgctatgaactccaagaacaaagtgtgctacgccgattgcgatagacccacttgcaaatcccaatgccgcagtaagaattttttcgattcctataatcataaagctttcacatatgttttgtgcattttcaagtaaagatgatgttattgtacagtgaggaaaccaaactgcaacagacctggatcagcttgttatgacccgaggttcattggaggagacggcattgtgttctacttccatggaaagagcaatgaagagtttagcctcgtctctgactctgaccttcagatcaatggtaggttcattggtcacagacccgctggtcgtgccagagacttcacatggatc

SEQ ID NO: 897 - DNA, 7717 bp, Arabidopsis thaliana
caagctctaggattccttttcaactccaacaaattctccctcgaagccgcgaaaaccgcctcatgggacaacgaaatcgaccatctcaaattcagttacgatggccaagatttatctgttccagaagaaactctctccacctggtaagtatttaatctctatgtcaacaacatgtgagcttgaatccggatgacactaaaacaatccattagactacatgtcatggttgatattttcgtctgttttcttgaaacgtatatatgtttgttttataaacaggtactcaccaaacaaggacatcaagatcgagagagtgagtatgagaaacagcgtgatcgtgacaatcaaagacaaagccgagatcatgatcaatgtggttccagtgacaaaagaagacgacagaatccatagctacaaagtaccatcagatgattgttttgcacatcttgaggttcaattcagattctttaacctttcacctaaggttgatggaatcttgggacgaacctacaggcccgatttccaaaatccggctaagcctggagtcgcaatgccagttgttggtggtgaagacagcttcaagacttcttctctactctccaatgactgtaaaacttgcattttctctgagtcacaagcagagattgattctgttaagtcagagattgaatatgcaactttggattgtacccgtggagcgtcttctggttacggtatcgtgtgcaggaagtaaaaaaagaatcatataaacttggcttaaaagaagaataatgccagagagctttagcttctactggagattttccaaagtataatataagtgaaggaataatatgtaaacttgcaatgtatttgtattgtatcatccaccatgtattctaatttgtattaacctaatcattgttattgatatataataccaataaacactgcttaatctaccaatccaaaatcaacaagtttatgaacaaaagcagaagaaaaacacctctgtactttaaatattttttctgaatgtatatcaaaagcggggatagctcagttgggagagcgtcagactgaagatctgaaggtcgcgtgttcgatccacgctcaccgcattttgaaatttttagttttaatctttttgcaaaaacacttaaacgacgtcgtaatcactaaagtctgcaaatgcaagcaaaagaatgagtttcttaatctggaatcaacattttaacaaaacaaatgtacataaagaattttaagaacttgaagcagttaagatatataatcacattctgattcatgatttgctttaaaacatcagtactcactatattacaaaacaaatacaccgtaaaaaatcgaaaataaatgctgaatgaatcattttgttgtttgttcccaaaagtcttcaataaataactttctttctataaatttttcaaaaacaaacaatgtctgtctctgctgttgttttcaccaaatgtgttcttcttctaccttccacgaggatgaacaagctgcgaaaacaccgcactagtagtcgcgtcttccgcatcatcatcagtcccggtccccgaatttactcctcctctatcgattatactcatactgttatcaaacggttccattggcgccattggaatccctggaatgtggtttgtactattgtcatcaggctccatcaaagccgaagatgtttcttctagctgtaacgcgtactccaaattccacaatacatctcccatagaaggccggtccacaccgtattccgctaaacatttctctgcggtttctccaaatttcttcaacgaggcagggttcaccttcccggttaagttactgtccatgatttgatctagcagaccctttttctgccacgccattgcccattccgctatgttcacttgttctctaggtaataccgggtttaaagccggtctacaacagagtacttccattagtacaacaccaaacgaataaacgtctgatttctctgttaactgctgtctcctgaagtattccgggtctagataaccaaagcttcctttaaccgccgtgctcacgtgtgtttgatcgagcgaagggccggttttggatagtccaaagtctgcaactttggcgactagattctcgtcgagtaagatattcgtggttttaacatcacggtgtataatgctctgcgatgcaccggtgtgtagataatgtaatcctctcgctgcaccgatgcaaatctcgagtctttgtttccaagacaatggaggaagatcagctccatatagatgactcctcaacggtccattcgccatgtactcatagaccagtatcatttcagacctctcgtcgcagtaaccgataagagagacgagatgtcgatgtctgagttttgacagcatttcaatctctgttctgaactcagccataccttgttctgatctcgggttacctcttttaaccgcgactttagtcccgtcttctaaagttcctttataaacgcggccaaatccaccaaccccaagcaacgaactctcatcgaacttattagtagcgtccatgatttcttgaaacataaagcaacgtccaagatgagtagaagctaatgaaatgcaactagctgtggcactcttgtgagaagcggttgatttagtaagagtctgagagagtccatataaaggtaatggcaaccacggatgtccattaccgccttcttgaggactcgtcgacctctgcttccttgaagcaaccaaacagcaatagcaacaaacagcaatcagcagaatcaatgtaaccgcaccaaccaaagaaccaatgatcactgccttcttcttgctcttagaacctgatcctcccggaagtaacgacttaaccgaagaaacaccacttaagctcttagcttcgttactaatcttcaaaacctctaacccattcatagtcgcattagtgatatcagcttgtgaatcaggtccaacgctaacggttaaaacaccggaagattcaacagaaccattggagataaaatccttaaagtaaggaactttaagaccattagtcaacgtagagagatcaagacttccaagagcaagatcatcattcacataaagattgaaaacaagcgtgttcaaagcttgactcacaatatcacagaaatgaacacgaacaaagtacctgaagtctggatcaacaggaagaacccaagtaacattaaaacttggactcgcaacattagcatcacccattgtatcagcagttgcataaaccatgttaggagctgtttcttgagtcacagaaggagagtacttaatcgaagaaggattcgccgttacaacaagaacagagctgttcacatgaagatactctgcatcattatcccattgtctccccaatgtatcgttttgagaagtcaacaatggtcctcccatatttaatctgtagactgtttcaaatgcaagcagagagagaccactaaatggtgttgaagggtttaacgccaaagcttgatcagggataagattatccggaacagagacaacttcaatagcgttgacaaagaccaccgaattgtttgaaggaatgaaacttaaagtcaagaactctgaagtgacattgactgtgtactctttgaagatgtaagaaccgttgaagttgttgaaggagaagttgttcaagagcacgaagtcttctgttacgacagtgattgaagcagaggttaagttccaagtagagttgttgataggtgagaaatgaagacggatccaatgtcgacctaaagaagtgattttgaatctgtaagaagctaaactggagaaaacacgagcggtttggtagatggaattggttgaattgttggaagtagttgatgttgcaacagaagagtttccgattttgagtacaagagaagagtggagtgaatctggaacaaagattctgttttggaaagttatgttttgtgatgagccacaagagatcaagtaattgtctggcggattaaacaaagctgatgaagtagtagtagtgtaacaagagaggaaccaaagaagaacaagtaatgattttgtgaacaccattttggatttttagtaagaaccctaaaacccaaattggaaaacgaagaaaacccaaaagctcaatgctaaaaaggattaaacttttgtgttttggagattgttcttgaagatggttgaagaaagaatggggatgttgagtttggtgtagagaagaggaaagtttgaagcttttgggtttggattcacatggcgagaagaggaagacccaattggagaagaatgtgtgtgtttttgggaagaacaaagaatcaatcaaagacaagaggagagcaaaggaagaaggagaaaaggtagagactttttgaagtgttactttctgcaaaacttgtttgctttagatagatagctctttccaggctggtttgattaggctgtcatattattacagaggagaagcaactcaatggaagccttcacaaaggccctacacaaagagaaagagagagagaaagagagagagaaagagagagagaaagaaaataggattaaagaataataataagattagtttaatttaattagttttaagtgtttaatttgtctcttgtactaatgaggatgcataaaattagcggcgggtattagctgttaatttgagtatgtttgtaaggtctttttcaaaaggataagaagaataagaaaacgtttatgtcttttggctattgttgtaatattgtgggtcactgtttatcaataaccttttgtttcaataacattttgtgtgtctctatggaactatcttaatcaattcattttgttcatttggatttctctactaataaatttctacatactgtatgtatatactatgtagtgaaatttgagatgcatcaaatattattattgtaaaggttcacatatttatgatgtatttttaacaaaaacaacttagaatattactagacctaacaacaataaatatgcgaaaaaaattactgtgataaagcatgtacatctgatagtaactggctcatggtcataattaaaatgaagataaaatgacaaaacaaggatcttaaagtgagaaaaataaccagttgatttctgtagacacttgttatagtatcatatagtcataattctttgatatcaatcaagtagggaatattattagtaagatggatttcgtagaccaaaaatatgatttcaatgtttttttgtcaataaagtggtagccggtggaaacctaacaaatattgtgatcgtgttgcattaatggtgaaaagaagttgtctcttaattaaatatgtttcaaccactaagtttaattgcatttgttagcatatactaaaacaatactacaagagtttttgattatttggtagcaagaggtacatcgatgtataacttataataactgttgaaaaataggttaaaccagccaagttcccaactaatttattatgggatgagtgaatcaattaattcaactcatctatttatggtttcggatttttaattccaaaccaatctagctacattagttttggcatagaaaaattaaatcgatatttaccaagtggaacttttcgagcaccactgcgtcaacgtccgacttctcatgtctcttgcgaagaaaacacatgaaaagatgatccgcagtgatttttacataattcattaggtgaatgatgataagaaaattggtttaagttctaaattatattatcggtagacttagatgctctaaataatgttaatctatgttattttatttttagtaaagtattatgctaatgtataatacagtgaaacatctaggacttatatgaaactcgaaattgaatattatttcccaaaaactcgaaaaataaagaaatagtggtgaatcaatttcaggtggaacctacaaacgcggcttttggaagacgggtgtggtggacaaagatgacggcgccgtaacagacggtgcttcgtttgcattttctgcttacgcatgatacgaaaccaaaactgtgacgttgtcttaacggaaaacacacacacaaacacacacatagaagagagcaaatatacaacgtaacaacacgatttaatttgtcatacattcatagattgttattataaaaggttatcatgttcatgtcaattcgaaaaaaagttaagaaaacctcatttttaaaaaaaattagactattgaaatatctcttctttttttgtgttaaagaaaaaaatctctgttagacttaaatcttacaaaccgaaacttatatttttcatcggttatcctttggaacggtgaaatcatattgacgattgtagaattttcatcaacaacacaatttatcttagattgttctatcatatatagtataagaataatgttaattatatagtagtttgcagctaaataaggttttattatggttatgtttatgattttcgttctttcacaaaaaaatgcttcttatttcgttagtatagttttctatttttagcttttaatttgtatataatagaaaacaacaatttttttataaaaatgtgtatatttatggtgaggtaagctttttgtttgattacgtagtattttgttagacctcatatatatttcaaacatgaaataaactatggtatttaacgtgttaatatatgttctcgttacatggtggattaaataaggtctatatagataggggaatttgtcaatcataaaacgacaggaaattttcatttcgttcccgtaagcaaaaacataattttagagcagcaaaaaagagaggaaaatgcaatattctaagaaaaatagtggaggatgaagtcgttaggtcacaccatgtgcttgcacatgtgttcgtatatcaaatcacatgattcctacagctgaacctttatcatttactttaaaaaatttaactcattaattattattcgaatgctggaattagaagacgagtacgtactaacttataagactttttagatttgttacttaaattaatcatttatgggaccttaaaggcacaaaaaagttcatatcaaattcagattaacgcgttgaaattattttagggtctgattaaaataatccatcttttataatattcgctaattatgtatcaactcgataatcaaacaatggtccaacgacttctcgtaggatagattgattgaaattttctgtgacacatttcttgcttttagtgtaactcgtagataatttagtatttatataaacactattctgtatcaactaaaaataaatttgttatggactacaactttctatgatatgttctatctcttttatgtggttgttagattttataaaacagtactagctattgacaaattaacatcataatgtgtcattttcagggaaaagacattacataacatatccaaattgtttaattaacaataattcgcttactcacctaagattagaacatgttggacccactaccaaatatcattaacctcatctaatctttgttctaaatgtcagtatgatataaatcagtttgtcttgttcttccaaacaaataactgttgaaacgtgagaaaaaaaaaattaccaacgaactattcgtaatcgtggaaataattattatcgcgttgataatgttatcttgatagcatgcatatttaacatattatatattatacaaataatatattcgatgtatagattggaatacatatatctacagttgtatacacataaattg

SEQ ID NO: 898 - DNA, 50524 bp, Arabidopsis thaliana
gaattcatatacagcacagtgataaacataaacacacacacataaatatgcagaatcatgatttaattgattgtgcaaggaactattcacataggagtcggagttattgtgtcaatttaaaaataattggtgttttatcaggtgatagataaaacattttgagaagttaattatatgtaagttttttgcgtaaaggggctgttattggaggatttttcttaaagctattttaaatataagtttctcttacaaatttgtgactcttaaatgtggatgagattcgagaaaaagagagattattccacttacagaaatgaaatgaaaaacgttggtcacgacgagaccgtcaatcacgtcgacgccgtgaatccagccgagagacgcgtttcgttctttagcctttttctgtctttcttgttttggtaaataataagacgaaaaatatgaaaccaaaaaaatgaagaaatttatatgtctaacgactcttttctttgactataatcatcttttctttttaggtcccaaccatttcttcttgtattatctatcacatatcatcagatccaaaatcaacttgattaacttccttactgaattagatgtaatcaacgaacaacttggaattatcttaatcaattcgtgttgttagtttgcatttctctactaataattgtctacatagatactaacttaccaagtatcaaaggatcctaagaagtccaaaatgatatctcattagaagtcaattaatccatataattaagatttttagtaagaaatacatagatgaacaatgatgttaacatgtaaagttgcctcaaaaaacattctcctccaataccttatatgaaatcaaattaagaatcatttgagagcttggttacacaatttaagttttttctttactttgctttagaataaaaacagtctcatccagctcctgataagaggttttaatatgcctctatgttattaaccagcgtaagtccacaactgatttcagtggcttatcatgattcatggatagagtttgagggagattttgggacttaggagactgctatacgcataagttgtagcacatatggctcagtctctcatcatccgtgttgaaaacatacaatggtcagcacctattatggatcgggcctatatgaaaaaaaaaaaaaaaaaaaaaagcaacagttctggagagtttccatcattcaatgtgtaaactaattttcttaaacatcttgttaattttcctaagatctgaagcattaatgggatttcatataggcttcaaaggctatataaattttcctatagcccaactaaatatattatcatattgggctcacttacttggagtcttggacggtttaacaagtttgtactattgtttattattcacagcctattaacataatttaatcctaatgctatattaattaaatagattatattcaattaattagttatacagcaaacacaggagctttctgtccacatgcacgaccaccatgcatagtcccttctttacggtctatattcatttgacctcttcatctatataatttcatttattcccctaagattattataccaaagtgaatagaaaaaaaaagaaaccgtctatgcgtttagtttttccccaaattgctataacttaaatcatatagatttgtagagaaaatatcagaagaatacgaaaattaaaagtatgagtaatttttttattagctgaaaaacgagaatgcgagaatttttataaagacaactttttgtttcgaccttttttttcttcttccgcacgtgttccctaattcacctaactacaagtctacaaagtacaaaacccactcaccatccacacgttacgattttgtcgtaaagtatatacgattattcattttctttttctatttgtcaaacgtgaatattgtttttattgtattaaaaagaattatttagttttcaatttttggttgcttcaagaaaatactcactaacaataacataccaaaaatattatcttccaatatcgttttattagaaaagcgtcgaaattgataccttaattttgtatgatatcaagtagtgaatcacatttcttaatacacaaattagcataacgttgcaaaagaaaaaaaaaattaggaaggagaaaaagaaaatgtattcttacaaaaacattaacgttgttatactacaacaaagaaaataattatttttctagtttgaaatacttttgaaaatcaacgttgttattaacttttatatatttatttattattaattttcacaaaaagttgttattaaggagaaaagtgtgttgttgttttattttattttattttttaatccagggaataaataatttaactataaccactttaagaaaatgtgacagagccaccaaaaagagcataaaaagtaaaattaaaataataattatgattttgtattaaaagaaagaaagaaaaaaaaaggagaggagaagaagcagtggagagagagcatgtgaataaaaagcgtgaagctttttgatatctctttctcttcctcttcctttctcctccgatagatttcgccggcgatggcggtggactccttagaaacggagattgacacggcggtgcgtgttgtccacctcgcttcttctctctgtgttaaagttcaagagaagcttcatcttcctaacggtggtcacgttaagtctaaagacgatgattcccctgtcaccgtcgctggttcgatttctctgtttctctgttttgtgttctgtttttttctaattgtaattttgagatctgtttgtgttaaataaaaaaaaaacgaatttttgatgttggattgtgtaatcgaataatcatgttctttaattcgttgatagatgaaacaaaatgtgtattaaaatacaaaagtttgcaacttttcatcacttccaatgattctctgtattagtagttcaatagtgtatcaaagttttaaacttttgttgattcacttgacagattttggtgtacaagcaattgtgagctgggttttagctgaagtgtttggtgatcaaaacctttcaattgttgctgaagaagacactgagacactctctgaggctgattctttaggtcttttaggagctgtgtcgaatgcggttaatgaagcattgtccgaagctcagaactacgggcttccgaagccagttaagccattggggtctagtgaaattcttaaggctattagtagatgtaactctgttggaggacctaaaggaaggcattgggttcttgatcctgttgatggaacgttagggtttgttcgtggggatcagtatgctgttgctttagctttgatagagaatggtaaagttcttttgggtgtactaggatgtcctaattatccggttaagaaagaatgtttaagtaatggttgtaaccaagctatgaagacgaaagctgttgctggttcagtatcgaaaggatgtgttatgtatgcaaagagaggtagtggtcaagcttggatgcaacctttgatcgttggaggaataccagaatctgcaacacttcttaaggtttcttcagttgatgatccggttttagctacagtttgtgagccagtagagagagcaaactcaaaccacttgttcactgcaggacttgccaatagcatgggagttaggtaaatgttgtttattcactctcttattcaaatgttacgttattgaccaaaagttttttgctctgcagaaagcagcctatgcgagtgtatagcatggtgaaatatgcagcgattgcacgtggagacgctgaagtgtttatgaagtttgcacagtcaagttacaaagagaagatatgggatcacgcagctggagttgttattgtggaagaagctggtggtgtggtgactgatgcgggagggagaaacttagacttctcgaaaggtgtttacttggaaggtcttgaccgtggaatcatcgcatgttctggtcaagttttacatgagaagattataggtgctgtttatgctagttgggaatcttccagtctctgaaaaagcttatccacaatccgtagtttggtgcagcatcatcgagccaaagcaaaggtaaagaagataacaaattgtcctcttcaagattgtaatcatatttgtagattactgcataagctagtggtttttaatcggtttatttgttccggtttaggaggaacaagggccattacggtttaggatgagcaagggccagtttcaatgaatgtgaatggcggagaagtaaatatagtcgaggaagcagcggtaaaagtaagaatctagtttatttacctatctaagagtaataaagctgctgcatttcacgaacccttatgttctatgatctttaatggatgatatcatttttaatcttcgtcctgtaataattcaccttcaaaacgcggattatacatgtcgttttcctgacaaaagacaaaaattagtaaattactgaataggctctaacttactccatgctatttcaatggttaacgacccaaattgtctctcaaatttaaagattcaactagaaattgccgataatattggtccagttttgggctaataaattttgtttattgggccgactcgatgaccattttaaagaggactcaatagatttttattgatacgaaaatattattaaatcagaccgaattaaaatgccttgaactccggtttagccgacatgtttggcaccctaatgagaatagcttagttagttttgtgttagtctaaagattaaaagtaaaaagtttgattctgccgacaatttcttagatttggtgctatttaaaagatttccctcttcaattttatcgaattccaaccttcaaataggcttttccatacatttattgaagaatttatcattatcagtcacaattatgtgtcttcatctttatacgtacataattactagtaataattaaattctactactaatagaggacggccaaagtgtcagtaatgatgcatgaatggttagttgataaacatctctttcttatgaattcaatttttcaattttttttttttttttttatatttatttcgtatacttgtattttgttgaatattattaatacatagctacataaaatgtgataaaagattaggtaaagtaacaattggtaagaaaatatcacaaagaagcaaatgacaaggatagtctcataagtcataatcaatacagtttacctatgtcaaaaaaagagtctcatatacagtacctataatgttaaaaaattaaaatacttaaaccttttctctctttttttttggtcaacaaaaatagtaaaactttcatatgaacatttgtctgccaaattctattatctagttgaagtaaacatatccaaaatattaaactgagtaggcgcatcatattaacgtttgtaaaaaaaacaactatacatggtgtatctctaaattctaaaactacatatatgattggttatgttgacagtaaacatgtaatttgcttaccgacgagaaatcatgataatatataattgcacatgtacatctatatctctatatttaataattttgaaaaattggacgtacctcaccagatacatgtttaattgataataaataaaaatttgacatgtgtcttcccagatttttgaacatccaactaatagcacatgtgcatgtaaccttcatcacaaacgaaatcgtgataattaaattcagaattcgaattaaactatactaaaccatagttaattagtaaatacttcaattattacacgatattttcatatataactcttgacatttctccagtttatttatcagcgactagtcgattacatcattagaatgcaaacataaaagatagcttgacaaaacgaatttcgacatccaatttacagttacaaatgatgtactgtatgttaatttcttaagaaagcaaaaaaaaaaaaatgataataaattccatgtgcctaatcaagtgtaggagtcagattccgacctatatgaaagaccttagcatgtgctacttcattcactagcaccacaaattcaactctctctttttttatccctttctaataaaggagaatagttctagtattatagacatgaaagttcataaaagttaaatcacataattgaacttgtgtgatatatcaaggttttagtagtgacatataagtgaaaactctccattattgttagattatatatgtactgcacctagctataatttccactattggagaaaaatataaagatataaaaagtgtctacctgaattcagatatataaaccaatgaaacatttaagagttgaatgtctactcgaattatattagtataagttgttttcattgaaatcaggacatatatatatatatatataataggggtaaaagaacaataataattttgtaatatgaataaatatcaatattaacgaataagaatataaaataggtacatttaatgattaaaggagagatattaattgttgaaaatatgaatcctatgttttgttttctaaacgatattgttaaaaagtctaatcatcatgagtcatgattaagtgaaccaaaacaagtttaaaatcttctgaaaacgacaaaacaacacaaaggaaaaaaagaagagaaagttaatttcaagggacttttaatttcaacttctttatatagcaaatatgaaagagtgataactcaccaaacaaacaaatttaaattttatttcatctttacacgaaaaaaaaaaagagaaataaaaacatgaaagagtggtcactcaccaaacaaacaacctaaatttagataaaataccattaatgcttaaaaataataattaaattaggaacggttacacattcaaatatgtgttttgactgtagaatacaaaaacaaatacatacaaatatcattatctaatgttatgcatgagacactatatatgtatgctccacataagaatcatacaaagcttcactgtgattgctcaacggtctagattctgtcagagcctctctcttcttattctcatgttacattaatctttgaaccaaagtctttttgtaaccgtctctgtttcttcttcactctgctcgtaaaaaaacattgaaatcttcgcatcaatggggaagacaacgaatggaacaagagactgggctcagatctacgcaatctacgggatcgagcaaaaacacacactcatcttcctgatactcaacgcgattgctttctctatactctccaccgtctttgtcatctactttaacccgatctgcgtcttctttcaatcgtttctcttctctaacgccgcggcagctagattctcggctggattctttggagctgttacggcgctttccgccgtgtgtttgtttttcgcggcggcgaattttttttactctgctgtgccgcttaggtatgagatggcgcagaggatggttggatctgttggagattggtcgagtgtgaagaccgctcttgacttaggttgtggtcgtgggattttgcttaatgccgttgcgacgcagctcaagaaaactggtagctcgggtcgggtcgttgggttggatcggtccatgactactactctctctactctacgtacagctcacatcgaaggttcgttagttctttttttttacgttgacttttttgacttatttcaaagtcgtttctcgttgaccaacatattattttgtagatttccgactatattgcgtgattaacgggttttaaaagtaattatttcagatatatataattattatcagcagatttatctagtggaaatttggcttagaggtaattttattatagttgagcattctaagaaatcaagaaaaactggaataaaaatataatcaaaactgatattgttaagttttttaaaactgtcgatttagtgtttatacatgtcattatttttatatggagaaccgaattttgtaggatttttgtattagattcacgacatgtatcttttgttttctttttttctttttcttgtcattattattcattgattttttttagttgagatgtgtttaatttgtctataggagtacaagagtacgtgacatgccgtgaaggagacgtaagaaggcttccgtttagtgataactactttgacgtggtggtttctgcagtgtttctccataccattgggaaagaatacggtcagaagacggtggaggcggcggcagagaggatgagagtacttggagaagcggtgagagtgttgaaaccaggaggagttggagtggtttgggacttagtgcacgtgccggagtatgtgcggcggttacaggagctgaggatggaggagattagagtttcgaaacgagtcactgcgtttatggttaagagccatatggtctcgtttaagaaacctagtcagcattttgtgggatctggtgaagtacgtttagattggagatgttaaggttttcttaaaaactaatgtaatttcatacccctttttttattttagtgaatcctagagattttcatcgatcgaaagaatgtgtaaacttttatcagtttatatacttatggagtgtttttgtttttaaaaaagttttattcaattaaatcagtcttgcatttgactgcgacattagttattgtagtttgattgaaatatcaccagccgtttaaaagagtctttttttttttcatatttatacaaagggttgtagagtacgcaggacgatgtgatgcaagccagattagaaaaattaggttggatattaatactgtatttagctataccaaatagagacaattgattatgtggaagctttatatatgtttccttaaaaagaaagtgatagtttctttgttagtacttagtgtcagtgtcactctcactatgtattagattggttcccattcaattaatgtacaagtaaactttggaatagatatgggtctgtataacaacactattagtaatagtagttgattttgttaaaaatatacaataacctgaccctatatactaacaatctcttgatagatccttcatttattagtactactctctttgtcacatctctcttttaaatcataactttacatctaaaagtaaaaatatattctataatatgaaaagatttatatatccatctatattgtttgaaagtactcgaaatcctttatcatgcaagtattcgctccatcgttagctcttcattaatatcaatgatataacgtgccactagaattatgtagcctgctttgtatttttcttaatatcaatggtaaagttaagaaaaaataaagctaacgcagaacttttgatatagtgctatatgtaaatttaagaattctgaaaaaaattagaccctagtaaaaaactggtggtacgtaatttgtaatatagtactataggttataacagcatacgatgtgatatgttagagcaatcccaatagtacaagaccattaggggctcttcatattcttttaatcataaattttaaaattgtagagtttaaggaattctgttggttccttaatttttttgttcattcaatggtaaatttttaagtggatttctttaaaaacaaaaaaaatattattaaattaaaaattataattattttatttcatagaatttaataattaatctaaataattaaagtttaaacacatatgatagaaatattgaaaatcaaaataacgattagtttttagcttgattcccgtcaaatttatgtcataaatgctcgactaaatcatttttcaattgttgatgtatagcccgatcacgaactcgggctcgagacaccataatattaccgagatttgaagggtagaaaagttgaaatccacttgtgaaaaagtggttaattctggttgtgtgaatttggatgcatcaaactgagtatactcatctcgttcatcctctactattatattgttaagtattataaatgttcgcatgaaaatcgccgtcgtcgccgatgaagagagaaacgaaaactcgcgaaaaataaaaccaaacatataatatttttctttgtcttcacttcaaggaccaatgaaaattgaccacgtatgagtcctttaatatcaaaaaatctcttgcttatggagctgccctgatccatttatttatttttgggccggttggaagggccttttaatttgctctaagagcctgatgaggaacgcccattgtggctgcttttatctcctctaaaagccttcttagaaaacaacaacaacaacagctccaacttcctccgtaccaaattcttttaaaataaaataaaattttcaaatgattactttctttgccactctacttttttatacgttcagtcgttttacgttttcttttaaaaattaaaggcgagtacataacgttaaagctgctaatgatgatttttggattaacctatagaaattcatgtaaaaagtggttgacgaaaactaaaaaaggacatttttaatggaaaattgtaaacttaagctaaaatgcaaatttagcaagattagagtatcatttgctaatgctggtatccctaaaatgcaaaactacgaacggaaaaaaagatgagaaaccctaaaatgcaaaatacaaacaaacataaactaaaatgcaaaatcaaactgaaaagacgtacgatttgcgttcaagaaagcgttaggcgttaaacggacggtgatctaataccttgtgcctagaatgttggttcgcctgatttagtataaaggagtatatcacgtgatactagatgagacgactttaggaggtgtaacaaattaaactgtcctataaaggtaacacgagaattacaacacttgttgtagttatcatgaagacaaaatctcgcatcattcgatattcttttaatctctaactcctcttcctcagccggatccttctttttttcttcagtcggatccttcttcttttcctcagccggttccttcttcttttcctcagtaggatccttctcctcttcctcagtcggatctttcttcttttcctcagtcaaatccttctcctcttcctcagctcgatccttctctggttgtgtcttcttcagcttattttccacctttgtcttatacgttagatccttgagatccttcgcatccttcaatgcctgcttcctcttctcattttctaaccttttttgctcattagtttttcttcggaaagtttccatagcatcgttagcttcttcgttactctgcagggtttcctcccttagcttcttatttgcagcatcaatggcttcggccaaagcctgaacaatcttatcatcagcacttgaattagatggatgtttccctagacctagaacacggaacagattggagaaacaagttttcatatatttttagatctttttagagaaatgagaaagatagagagaaattgttttattttagagagacaagaaatatagagataaataatcgtatacagtaagtgtgtatttatgggagtatgtcacgtgatactagatgagacgactttgggaggtgtaacaaattagactgtcctataaaggtaacgcgagaattacaacacttgttgtagttatcatgatgacaatatctcccatcagtcgatattcttttaatctctaaatattcagatgatgctctgtctctgtttcgaattccatataaacaaacaaataattaagaatcaataaaacaatcaacttcagtcttcagcctatgaagtattttttctgtttcttgtttcttttatgatatatgactatcttatatatatagtaacattaatgtccttgatgacatatttgctaattttgaattatacagtaattatagtccttttatttatttatacaatattagagtatagtttaaaattcttacatttaatttgaaaaattctcataaggtctctctattcacatttaaagttatagtctttcacaacttttatccagatttcacatttattttatgctgttaaaatatttattttcaattataatcaatccacaatattcttttatcacaacatgttataatacgttgggtttgtattaaatcgttaaagaaacgttaagtgtcaacgaaccacatccttaattgagaagattgactgagacgtagaagcgtgttgtctagcattcctctgtttagcattcatctgtttccagtctctacaagggagtacaaattaaaatctcggaattttgtttccaacttgccccaagactatcactacaaaaccgttttggttaagtggtatggtgagaatgcaaacaaaagctgtaatggtgttcaaacttgatgaagaaggaaacgctttttacactcaagacattggggatctctacattttcatctcaaggtctgaacctttctgtgtcccggctagctcctttcccggcatgttctctaacttcgttgagctcttggatgttaacgaaaacgttactgtcgatctgtctgattactccatgaatggtggatttggttatttcggtgcaccagcccacatcccacctcaaaaactagactagttccatctcaatctcgccaagcaatagactagtagtagtacactatattccactgttacaacatgttaactatgtaccggttcttaaattaattagctaatgacgtgtatgctgtttatgcgtttgtttgttccctcatgtcaaaccattacattagctaatgacttgtatgctatttatgcgttttttttgttccctcatgtcaaaccattctcgttggtgttaacatctcaagccaattgtctcattgagtttgtcaagttcttgtattgtattttcccagccaatgcttggatttctaagaggctgtttcagctttctcttctagaatctatagttttcgcgacccagtggttttagttaaagtgctttgaagccaaaactaggtgttttcaagaatggggatactgaaatttggaccgtgtcatgttaggaagacttgctataagtacatagaggttagtgtgaccatttcacctcttggaatgtgagtttatctgactgtctagtgtttgtgatgtagaagtccattattcttgtctgtgtatcagtctaaactagatactcaaaggaacattacatttgcaagaatatagatttgtaccaaagagcattaggattaatcaaaataggactactgagaactgaagggacagatttgatgtccattgtttgatccgtgcctctcacagttgaacttgtttgtcaaatcaagttaaattgtttgtgaatttagcgttgtattatatgtgagatctataggtatatttgtcatatggttttccgtatattcatgccctgtttctgattaaacaaacactgaatccaaaaaaaaaaaaatgatgtaaaaggaagaaatttcttgtacatatccgccgcgtgaaaagatgtaaaatccgataattatagtcatctactctaaatttgcaaaagaaattagacctaataaccaaacaagttttacgaattaccaaacatttttgtttctttggttgtttcatttttctttttcttttggagaaatccatctttcataacttcaatccttagatttacctaaattccaacaagtcaaaccaaaaccataaatcaaccaaatctttatttgatgttaccatgtaactaaattctaaaataccagtctttattaaagaaacgtataatccttcttcttcctaaaaggggttcattaatcatacaactccttcatgtttaatgcagaaaccactcaacactcattcatattacataacccaaagaaattcatcaacattgtcatagctaaagaaagaacacacattcaacactcctctgaacattccgctaacacccctacttgctttgtgtaccttattaattccaaaaacatgaagaagataatcaagagacaggtagaccatataagcttacagatatcgttgatgtgagttttatattacctagaagagaagagggtgatatattacttagatcccacgaatcatcactcatctgtgacagaaatacaggaacaaaaaaggaataagacattgtcatttggtcagatcatagatatatctactggaataacactttattcacaacacacatttcactgttcgaagatacacagagagggatcacttaaaatatcatgcagattatacattgctagtcgtgatgcagtatggtggagataacaaatgtaacctatagataatagcctttttaccttatcagtgtacattcagatctttttacaaattcactaggtagctccgatcttgtaacgtataccaaatgctccagaactaacaccagtgactatcttacagaagaagcaatctacgaaactcagtaactttatttgacaagttttcatctgaacttgtcataaaagtaagaaggtagtgcctacatctcagttagatttgatatctaaacattacccaagagtatagataaaaaaaattttggcatgttaaccagattcttcctacatattcccattctttcctaaattttcctctgttaacattgtaacctttcctagtctggaccaaagcaaacaacaacaaaaagtataattgaagcttcctttttagaactactgcactatttgattttcaatgtttcatacaacaacaagtatacagtcaccaacttacgaaatgaggggttatagaagacataatttcttatctgccttttcccaagtcaagaatcataatacttggatgctaatgatacttaatgttgcctcaaactaaaccgaacagaggaaaaataaatcaaacaaactcacttagaaaagtttatcttcaagggtcaaaagaaactttcctctggactagagtacttttaatctaaagtctaaacgcaatcaatgggtagtgtaaacaatgcaagaaatagaacgatgtcggcgcttctttgtcccatgtgtaggggaacaataatcttctaacatatattacagcaaattagccataaccaccaaaaattatgatatatactatacaactaacttcagtaaatagaaacagtttcggcagatgaagaagatatatacaaattcatagaacgaatacactaaagctaggaaatcatctatgtacatgaccatcatcctcaattttcgggtaagcaaggcaatgaacatggacagcatttctcactaaatcgacaaaatcatcttagttcagctataaaaggatctcattttcctgtgctaccatctatggcaatctttttcacaacatattcacgtgatcacaaaattcacaacactcactacactactgaatctaaatctgacacatcaacagaaacatccatgaaaaaaataacaacgaaagcagcttatctaatcaatcactgaatcacatagagatagagataattgatccctgacctttgatgtgttcatgatgagcagaagcagaagcagcaacaacatctccatcatcatctccaccagacttgacagtaacaataggcacaggtccatcacgatcatcaggatatctaaccacaacaacaggacaaacacagtgatgaacacagtaatcactaacagagccaagcttgccatcacttcctctttttttctcagcaccaaaacctctacttcccataatcacagcactaagaccaagcctctcaatctcaagacataatctctctctcatatcatgatctttcactatatggatcttataaggaaaccctaactccttcaacggtttagctagatccgcaacttttgttgaagtaaaagcatcaaaatcctcttgactaggttgaggttgagcgtttggatcttcaatttgagttttcagagggagaggtccccaatcggcaccgaagaggacggaggttggagaaacgtggagaagaacaacggcgtctccgggacggatgtagtgatctacagcccaacgaacggcgaaagagctttcttcggagagatcaactgcgactccgattttacgacgagctccggcggttggtgttggagttgcggcggaggagggagtagatgaggagtggtgatggtgagagtgacgtggagatggagggtgatggatcttgatgtttggaagctgtggatgatcggaatctgctggattcatgatttttttcagatgttgtttttgttcgtcggaaagtgggagtgagggaggtttctcttaacggagaagaaagaagcgttgtttttgtttttttaatagaacattagactgcatgccgttatttatatacaaagacgacaagcattctaatatagatgtagttaatagaaggagtgatccaacggtcaggatcaaatctgagcgccatagttttgaagaagacgattcactagatctccggcgtcggtgatttcctccacttccttttctggcagctagaagacgaaacctcactcaaattctgatctctttgtataattcgatcgagttattcgtatgattcgtatagatcggtgactcagatggcgaactacttggctcagttccagacgattaagaattcctgcgatcgtctcgtcgccgccggtgaatttctccccaatttttttcaaatgtgtacatttctaggggttttgtttctctacgattgctgcattcgattaggatcttatttctccttttttttttctgccacattttgcgatgtcatagctatatattagtggaaagtttctcaatgtaggtgaaggatcaaatcagatgatatgaatctgttaggttgttggttggtcaggttatactcatgaatgaagctaaaagtgcttagaaatgagcatccattcctgaagggaactgatcatgatgatttcttttgtttctgatcttaaactctacttgttcgttagtattaagatgtcttctctttatattgttcccgttgctcgttgtaatagtggttgcttgcatattcttttacagtggaagatgtgtgtgatctgtggcctacagtgaaaggtttatttgaagaacatcagccattaaaaagagcattcttgactaacaagactcgaaatccggtttttgttgagaacttgccggttgaattcatattaactacagacgcgaggcttcgtagtcgattcccgcaggagcagtatttgttctggtttcgagaaccatacgcaactatagttcttgtcacatgtgaggtacttgcttgttgatatgatgatatgtgttttttttttctgtatcaatcttggcagtggagagtagtcacgtgccaaaatatgaaacaaagatgatgtgcttgatgatattcgtttctgttttccttttctataagagataagaacctatgtttagatagtaggtaccgtttctaatgtatatggtttctggattaggttagatttatcacttatgtggttcgacaatttttgttcttctagcttttctgagtatacctttgaccttgcaggatcttgatgagtttaaaaacattctcaaaccacgtctgaaattaattgttcagaatgatgagagggaatggtttattgtatttgtatctaaagctcatccaagtaatgatcaagcaactaaaaatgtcaagaaagtatatgcgaagcttgaagttgacttcagttcaaaaaagagagaaaggtaagctatgcagattggactgtgtttatgtttttttgctctgatacaagcaggcacgaaccgaaaaaataccatgccagattcctaatgagacttgattgctcctactatagttctaacataaatagattaggttaaacagtttgcacgattgcaatcactcatatttttgctagatgcataaactaaacccatttagcagtaatcactcatttaaaggaagttatctttaagttatatacttatggaaatgcagacgggataaacgctaaaacacctttttatttacttgatcagttttacttcatttatgcatgccatacatagtcttcatatgataatttttgcaatgcttttaaggtgctgtaagctggatgtacatggccctgaaggaaatttttgggaggaccttgaattaaagattaccgagtgcatcaggaataccttggataggcgcgcacaattctacgaggatgagatacgcaagctcagtgagcagcggtttatgccaatatggaacttttgtaactttttcatcctgaaggttagctctcttctcaatttgtgaatggaaagtgacatgtgacttctacgcaaatgaataaaatggtttaaaatcctgtttcttcctttttgtagttagattttatacttttttaataaagtctctgatggagatttatgtgccccttttgtttcttccatagaagtatgaaaataatccccaagcttagaaatcaacattggtccttgcagtcacatttgatgaaacttttctcattttcttaaaggtcataatgttctatgctgtctcaggaaagtttggctttcatatttgagatggctcatcttcatgaagatgcattacgtgaatatgatgaactagagctctgctatttggaaacaggttcttttcctacctctatatctctctcttgcagatccgtggcagcaaaaatttcatgttttgtctatttgttatattttatattcttaggttttgacaaacctgacatgtatctttatctcttaaagcatttgggatcagtattcatccaacaaactgatttcttttttcaagttttttttttctgaacaaataatctatcatgcatcaccttcaatgcagttaatatgcctgggaaacagagggattttggaggattcgacggtgaagatgaccaagctgtgctgctgaaaccaggaagcaaaccattgacacagattgtgcaagatgattcttttagagaattcgagtttagacagtatctctttgcctgtcaatctagggttggtgcacacaagagacatcatatcgatcacagtgtccttttctcctttcaaaactgtagctttacttttacaaccttttcattagcttacctctatgtggttctttgcagctgttgttcaagttgaatcgtccatttgaagttgcatctaggggatattcttttgttattagttttgcaaaggccttgacccttcatgaggtagcctatactgttactaaagaaacgcttatcttacttttggttagttgatttgaccgaccttatttcctctcttcttttgatatttttgtagagtgtactgcccttctgtatgcgagaagtttgggtaattactgcatgtttagcgctgatcgaagcaactgcttctcatcaccatgatggcgttgttgcacctgatattgagaaggaatttttccgtcttcagggtgatctctattcactttcacgggttaaggtagaaatctgcttgctttcaaaatatgtacaatgaacaaaacttcctatttgctgacatcctctttcaattattgactggaatttgaaccgaggtctctgttgagtaatttcttttgagttgatattgcatttgtctgtgtcatagttcggtaattgtcttatgtgatgtctactagtttcttcatgtccaatcacttaaaaagtttttttgttggttgcatataactacaatatgaaaattattttcaagtgcttatacccattgaaatgcctttatgtcatggcagttcatgagacttggatatctgataggatatggaacagacatcgaaaagagtccactgaacaggtacgggtctatttttgttatagcatgtgcgttacctgttatatagaagtattaattctccaatgacttcccgtagagaaaggattacgcaattagtgaggaattatatgtgtcactttaaataaacagagcaagtctttctttgctgaaaaaagcatgtcgatttttctttctctttgggaggctatgctgatgatgtttagtagtaactcctacccattttatggacagtgcttgtctcagtatgctgccttggccaaaaccggctgtctggccatctcttccacaagatgcttcctcggaggtgcttgaaaaagaaaaggtataatatacatatgctgcgtgaatgtgttatctatctgatagcattgttattgaagccaatcatgcttttagattcgagctaagagttagctgtacttgcatggcctctagtggacactgacataataccagggtattgtttgtaaatgtattatatgcgagatttagggctgcgtaactatatttaccatctgtttcgtttttcttttataatacttatctcctttttttggtaaaagactattcttcaagcaacttcaaggaccaagcactttggtattcaacggaaagccttacctcttgaaccatctgtccttctacgtgtggctaacagaagaagggcttctctttcaaccggaaatattcctgaaatgtttgatgggcgcccaagttttactgaagggtaatgaaatttgtaaaattcttttctttagcccttcttgttttcaaatttgttagtactttaatctcatatatcttcgaagtttccaggaagtattgcaaatcatcaccttctgttataaggaactaaaatgatatctttataaatttcgacagatcaggtttagaagcgtctccgagaacaccttcatcacttaaagtacaagcacctcccatgtcaagaacaaattcttcaccaggaaattttgagagtcccctagataggcctatgaggcttgctgaaatttttgttgcagctgagcacgctctacgacttaccatttcagatcatgatttgttgaagacattgtcatctattcaggatttcgaggtagcctgctaataccatttacataaggacaatgaagcttctgattttatgctgctctttattctagcttctcatgtatataaattttgttgtggcagaataaatatcttaacctaaccaaaggtgctgccgaaaactatcaccgttcctggtggaagagacatggagtcgttctcgatggggaaattgcagctgtctgcttcaagcacggaaaatatgatttggctgcaaactcttatgaaaaagtttgtgccctttatgcgggtgaaggatggcaagatttactggcagaagtcttgcctaatttagcacagtgtcaaaagattcttgatgatcaagctgggtacatgtcatcttgtgttagactactttcgttggataaaggattattctcgtccaaggagcggcaagcttttcagtccgaggttgttactcttgcacacagtgaaatgaagaacccagttcccttagatgtgtcatcattgatcacattttctggaaatactggccctccacttcagttgtgtgatggagaccctgggaatctatctgttactgtgtggagtggctttcctgatgatatcacccttgattcgcttagtcttaccttggtagccaccaacaacactgacgaaggcggccaggtttgcctccattagacatgacttttctcgttcttttcttcaattaatttcacgttcttaagaactttgtatatggactggctttcaggctttaaagagttccgctgcaactgtgctaaaccccggaaggaatactatcacttttgctctgcctccacaaaaacccggttcctatgtcttgggagttgttactggccagattgggcgcttgagattcaggtctcatagcttttcgaagggtggtcctgcagatagtgacgacttcatgagttatgagaagccaaccagacctatcctgaaggtagaaaatcattaattacatgcatgagtagtgatactcttgtggacacttgtttccttcgttgatacggtatacattttgttcttaggtttccaaaccaagagctctggttgatcttgctgcagctgtatcttctgctctgctaataaatgaagcccagtggattggtatcatagtacgtcctattgcttactcacttaaaggcgcgatcttgcacattgatactggtccagggctaaagattgaagactcgtatggaattgagatggagagatacatggacgcagattgtgatactggtgcatcaaaagctgaggtttttgttgaagatagtcctgtctcttcaaaacgggattcagaggtgcttaatctttgcgatggtaaaatagtgttctcagattgggctagcaatgtgagttctattctttgggtccctgttcgtgccttgagtgagaagcttgctagagggtcatcatcaggtttgcagcaaacaatgattttttgattattatgacatgtttgtgtcacatccactggccaatgatcatatttcttttgcgttaacagtcactccgctgaaacaagatattttagagggaatgagaactgtagctttgaaacttgaatttggggttcatcataaccagatatttgagaggtatttcttccttgttgtggcaaatcttgattatcgtttttccacatcaatcagaggtttgacctgactcaaacagttcttttcctaatcatatgtctcctgattttgttatgtgagcagaaccatagctgcacattttaccgatccctttgatgtgaccacaagggtggcaaacaaatgcaatgatggcactttggtcttgcaggtaatcaactttagctcctaaaaatttaagaatcttatccttaacctctctgttccctcaatcttattcacatccacccaagattgtcaatgaactcatttctatctacaggttatgttacactccctcgtcaaggcgaacttgatagttcttgatgtttggcttgatcttcaagatggatttattcatggacaaaatgatggaagaccgacttcaacgttctttccgcttgtcgtgtctccaggatctagagcagcagtcgtgttcagtatatgcctagacaagagtatgtcatcaggtattcctatccaacggttaatatgactcagatttttactttatatcttactttcagccatctgaagctatttattatttcagaacaaaacctattctagtatagatttggccagaaagctcgataggcttaggaagatccacttgatataaagtgtcaaacccctgaaccctgtcttgttctattcttccatacctcgtttcggtaggcttatctagtttgctcaaatcttagtttctgtgaactataaactataaagcatacaagtatcagtatcaggatgcgttatgtcgaattatgcaagtatttgggtgattgccttttacgtgtggctataaagcatacaatgcatatgaaaacagagaaatagaagttttattaactacaaactaactaattgttcgtacgacagaagggaaagatttgcagctaccagaaagcattctgaatatcaaatatggaatccatggggatagagcagctggagcacacaggccagtggatgcagatcactctgaaactgatactgaagggagagatttggtgttcaagagtgctattgttttgcagcgtccagtacttgatccttgcctcacagttggattcctcccacttccttctgatgggcttagggtcgggaaacttatcaccatgcagtggagagtggaaaggcttaaagaactcaaagaaagtgaagccgtggaacaacaacatgtaagtgatgtccatatcgagctactcgatatagcttcttcctatctattgaaactatatattactttaaaatatcggcatgttcatcaaaatttgttgttttatttacacaaggatgaggtgttatatgaagtcaatgcaaattcggagaattggatgatcgctggtaggaagagaggccatgtctctctctcagaggagcaaggtaagtaatcttttcttcttctcatttgttttagtgcaagaaacaacaaatgatgataatgttcttaattttgttggctggttccaataaatactacaggttcaagagtagtaatctcgatactatgtgtcccgttagttgcgggttatgtccgtcctcctcaactcgggttgccaaacgtagaagaagcaaatgtaagcagcaatccatcgggtcctcacttagtatgtgtcttgcctccacttctcagttcttcctactgcttacctgtcaagtaatagaatctcactctatattttttccaagaaaacattttttctgtatttttattttgtttgcgatcaaagaaatatcagagtatgggatcatcaatgatgagagtgatttttcttttgtgacgattttatttccgacttatggatctcatctcgcaaacctagactaactcgaagtcgactacactgactaaacacgcaagtgaagcggcttaccaacataaacgtactacaaatgtatttccttcttccaaaaagcattgctggcaatataaacgtactacagatgtattaccaatataaatactctctgcgtaattaagctatcagtagacaattggcttaagatgtaggccaattgtaacagtggaatctaactgcaatcgtggaaaatggaaactgatcgacaccaatgagaatagtttcacatgagggaacaaacaaatgcatacacagcatacaggtcattagctaatgtaaaagaacccacgtacatagttaacatgttgtaacaatggaatatagttgtactactacaagtctattgcttggcgagattgagatggaactaggcaaaccactagtctagtttttggggtggaatactgtaaggtgcaccaaaacgagcatttccaccggtcatggagtaatcagacagatcgacaacaacgttttcgttgacatccaagatctcgacgcggttagaggacatgccgggaaaagagctagcagggacacagaaaggttcagactttgagaggaaaatgtagagatccccaatgtcttgactgtatacagcgtttcctttttcatcaagtttgaacaccatcacagtttttgtttgcattttcaccataccattgatagtcttgcgtgcgggtgcagttttcctgtaccacttaaccaagaatgtttcaccagctggggactccactaagtgttcggtgatgcagcaaaaatccaaaagctcccgtttggtcttgggaagctcggggagttttcggaatcgcaatctctgcaatacgggatcgtgcttgtgtctgcggagatcccatgatccgatgatgtggcctccagatccaggaatgcgaaacatgtcgtatttcttggaaaacatgacacgggaggagaagaagcaggggttttcgattctgatgttggtccaatcggagtgacttcgagcgggtctgcaaaagctgagctgaggtcccaagaacttgacagcaacaacacagtcttcatcctcgggagaagaacatgacatggccacgttggtgatgatttgggtttgacaatgaggcagagtaacaagaggaggcaggcgaatgcttctcggatctgtatacgatgcatatgggtttagatcatctcgaagacgcagaatgccgtcgtccttgttcacagtagctacccatccatgagatgcccctattgttacagttgcatcattatacaccaccagctccataggcaccttcttttccaaataagtggagtcatcttcattagcgttaaaaatgatgagtgttccaaaatacggtccacaacgacgagcgccgattatgttacaaggagggctttgcaacaaagacgatgatgagaagccattagagagaagtagagaagacctaacggacgcaggtttcgaaaggcagagcttcgacagccgtctgagaagcagagacattgaattgttcacagaaaagtaaaaccctaatttgaagaaatggttattttcagctaaagttaaaaaccctaaaaccattacataattaatataggggaaattgccttgtccgccaagtttttggattacaaattttgcttatcttagaaaagcctaaagagaaaagagtcgagaaacacacccgtacatcggccctacaattaatccactaccaatatccaacggtcacgattgcttaccctccctccctcactgctttactactaatgttatttacttcattaaaatctcaaccaccgatccaaagtccctactaacaaccagtggtatcgattaaaccacgtgtcttttgctatatatttaattttcactaacttccaattttccaaaacgcttaataaaatctcggaattttgttttcaataaattgatcatttgatgggggagaacaaaaagggttttggttttgtctgaacaaagttttagggtgcgcaaaatctggttttataatttaaattaactaatcaatctcgattccagcaaaagaagtttataaattgggaccaaacaacatgttccattctcgtcttctctgtttcatctgacttgttatctcagcttcatggaatccgtaattagattggtttacctgattactctccatcttgggccacccgttttcattgttgggctatttgattccaaattggttctccttttgatgtgtgttgggctgcttagttattgggccgttattggctatgtgtaaaacattactgaatttgtgatccttgttgagaatgtgaaactaataaaacatgaaccttaagcatgattagacaaaacacaagtgaagagaaaaagtgtaactagttaaactgaaactcaaattccagaagtaacataagaaacaaagattctgaaacattgttttgcgacttgttgctgaaatgttgcataaaccatgctctagaacattgatacatgactcaaagtctcaaattagacaaaatagcgtttaaatccttttcacccttatcctctcctacttcgtctctgtcgcctcctcctcttcctcctcattttcagtcccctgctcctccttctccttctcctccttcactggctccgccccttcctccttcaccggcgatttcgattgatttctcttattctttctttcccacttctttttctccttcttgagtcttgttgcccccttgtatttctctcttcccttttgtagatcaagctcaaattgacgatccacttcagtttgggtgagacgactgctaggtgatcccacctccaaattttaaaattcttttttaagatcagagaagttcttgtaagagtgttttatcttaccgtagaaattacgtatgtaatgaaattttgtggtctcggcaatgaaacgatgacccagaacttcacactctcctcctttgctcaccacatctggtgaaaccaacatcttctcctcatgttgcaaatggttagcaacaccttgagctccagatttgacaagtgtacttattttgtacacgacacaccaaatgcatttcatcattcaaactcttaatgcgtttagttaagaacttgagactcaaactttggcattatgatatagaaaaattgttcatttcctctagaaacctaagatctcccaaggtaatacatttaacctaatcaacattctcatctcctaattatttattcatgtaatacaaactaacttaaaaaatctccacactatttttcgtattttgaagccggcttaaatgatcggtctttgaaaagagatacaattataatagcattgctcattataatatcatttcactcagtgctaaaagtaaacaagtactatttagtcaaacgtttggatcttcttcctaatagacacttacaagaaccttttcaggtaaataaagcatagtcaaatagtacaagaatttgaacccaaaaaaaagacacaagaattagatgcaaagagtgaggcagtgagcaatacagaaactaaaagagtcaaagcataagtaacacaaacagcggattaaacagaggattcattacatacactaaactgagtacaaaagtggaagtaaagaaactgagtcaaaaatttagatattttgtgtcgatttttacacaaataaattcgaacttgtaaggtaaataaagaggatgatacagtgaaaagaaaatacccccacacctgaactttagtccccctcatagcatgcatttaattttaattaactcttttcatttcctattgattcgtcactctcttacgaaaaacaatagtattacacgtttaaacagtagtactaattggttaggatctattatctataaaaacatttttaacagggtccggttattatatttggaaaaaagtactaatgttaatcgaattagcggaaatatctaatctaaagttttatcaataaactaaatgaacgagaacaaataaatacacattgacagtgacactatgtactaactaaagtaacttcacttcgtttccacacacacaaaaaaaaaaaaagtaacttcacttcgttttcaagcaaacaaaaaggcttccacataatcaactgtttatatttggtatagctaaatagtgcattaatatccaatgtaattttctaagctatcgtttaactattctccaacaattaataaatatactaccaccgttacttaaaatatgaaatatatatatgttaaatctcttttgaacggttagtgttatttcaatcatagttttgcagtaaaatataatgttggaaaagagaaatctagatactagttcaagttgtttgcacctagctaagctaagtttcgtaataataatcctgaaattaaacatataatcgatcttttggtatatcgtttttatatcaatatgagatatgtatctatactctctgccgatctttgacatggccgcttggattcactattttcatttttcaaagtatgaaatgaaattattattgtattttgtaattccacgtcattcaccagaacccgctgactagatttcttaaacgagaccatatggctcttaaccataaacgtagagactcacttcatatttttcttgttgttgtccactaattttacgaacaaacaaattaaacaatagtgatttataactttactaactggcaaaaaaaaaaaaaacattacccggcgtccaataactcctctgtcaatttaaagcttaagatgaagaatagaacaaaatgacacatggaaacttactttgagtattttgtcttgcacaaaataataacacaacgtgtaccatctcaaacaaccagacaagaaaagaaccacacgacttaatttgagaaaaaaaattctcactaatagcaaaattttatattatgaaatgagattatagtaaacttacgactttataatcaccataatctgaaatataagatacaaatggcattgctcattattagtcattcactcagtgtttaaataaactactactattgagtcaaacatttggactttactaaagcatataaactaaaactaaaagggtcaaagcttgtttgacaaaaaaaaaagggtcaaagcttaagatgaagaaaatacagccctgaaactaaggccgaagaaaagcctaactgggtatatgcctatatgatacgtacaacatagagtccaaatattaatgggcttctacaaagattagatcccaatgcgtggggccaactggaatcgacaacataagagagatgttgaaggataatcttcacccaacgttggaagcttagaacatgataagaagatcacgtgttgcaccaaaacaataggtcatcgaccaccaacctcggccacctgatactccaattctgatgaaagaaaatcgtcatcgcgaaacaatatccggccaacgattcttttgtttttcatcatttatgtaaatatggctaaaaagacatataaaacagatcgaacaaactcaatcggttgctaaatgatttgggatttaacgaacaaagtccaacactttgataatgaagtgtttatatgcattaaacatgaatgttaaactctaataatgaaataaagagactcgtggattaatgcttggggttgactttttgtatttctgacttcgaaaggaagtttaactcaaaggtgatgtcatcgtatccgcaagtatttatccaagtgtaaaccttaaattaaaattatgatctctaattattatattcatattttagtattttgaagacggcttaaatgatcggtctttgcaaagagatgcaatgagaaccacatgttttcactactttcattcaatttaaataaataaaatatctggtagacattcgccgtccaattctctaactaccatgaattgaattactgtatactgtatttatcatatacgatcaagaaaccaaaaacttggatcttctcatttctcacaaaacaaatagattcaaaattagaaataaaaccaatttatttagttacatataaatcatgagagcatcattttttatttttttggagcttcgaacacggtttagatacaaaagacacgatgggttcaaagcgtttgacaaataaattttttttaaaaaaactttaaaggaggaccccatggtactaaatatcttcttttttctaagtcttgacaacttttttgtttgattctttttagtggtcgtagttacaatttacaaagctaacggacattcatacgttatgtactcttcagttgtaacatcacaatgacacagacacttctagttctgggaaggcaaataaaattgacatcataataaattttggttttggctggtaatccttctcacgttataaatttataataatatctcttgtttcactaattaattttcttaatcattttcgttaaaaaataaataaatagaaaacagcttcattttcttaatcattttctgaacaactttgcttcattttattttttatgttatatgattttatactagacatatgaacatatatattctaggtaacacagaaaaaaaaacacaaaaaaaaatcattatattgaaatgtttttaaactaactcaactcactaaaagtattgttgttagtaaatgaacgatgaggattaatctaatcaaccaaacaaaagaatcatcaacggctacaatctctactttccttggcgatttcaataaaacgaagacgacgatgatgtatcacatccctctgcttttctcctccctccgtgtaatttcacgattgagctattcatcacaacagttgatcttgacaaaccttcgtctctcgataatcttttcaatggtctagattggttctcctcctgcatttcaaaaagaattgtttcagatttcttaatcatttcctaataataaaagaagataaagaaaaagattcatattcatacatcggagaggttaagatccaaatcaagtctcgtccttttcaccacctgatctccttcaccactactaaccgaagacgacgaactcaccaccggaagttcttgctccaccgcagccggaacaacctgattctccacttcttcttcttcttcatcctcatcgctttcctcatcataagactcagctccgtcgttacaaccaatgatctcttcttcttggttaagattctgatccctcccggcgagggagctgttgttattcttcttacgagctaaacaagactcacagatagaaacagttgggccaagattcagcccagaagctttccaaggcgtgtgtgactgacacgcgctacatagaagacaacgcatgtgtttcgccaccagaaaattagctccgtgaactttaccgtcacaatcccaacataaactcgcttgatctgactcacaatacattctcgctacaccacaacataactcgcacttcttcttccccatctctagatattatctcgcacaaccacaaccacaagctctctctctatgtctatctctgtctctagatgtttgtgtgttataaatattcttggtaaggtcttttgcttctctctcttctctcgtttcttctgcggacacgaataagagacagcgtaatagagaattgtaaaatgagaatttcgtggcgacttttatgtgatttaattcttttcgaggatattgtcgtctttttgatattaacgaaacgatttttcacgtaattttttaatgaaatgcaaagaagcttcctaattttaaattagaataagattaaaggattcgttcaaactttaatttttatggtggataatttgtggataattttgtattagtagttctaaatctgtgtttgaaattgattaaggtttccgcggctgagtattattctcgaattcttaaatttaggagagatgataataataataaaaattaaaggaaatgttgttatttacttggtcctgaaaccatgtactgggacaaggctctcctatgggcgaagtcttacgtgtcgagatattattcgttttatgtttcatcagatatttttatgcggttagatttttagttaatgacgtggcgagatattagcctcgtatagaggagagggaagattctgagttatcctacgtggacgaatcaggttctgtaatagacttagaaccacgtgatccgcacctgggatttgtctggtcctcaatacacgtctaatgggtccactcttttttctttcattttttacttttttcagtattcctctctcgttccggtccaagcgttttgttttcgaaaatgaaaagtgaattaaatatcatttatatcgttggtattacggtaggataataatgatgatcggatttttaatatcgcattttgggttcggaaattttggtgtccatgaatcaacatggttactaggagaagaacctaattttatgattttatcaaccacttttagcgttccatattttacataattcgagttaaatgtctttttctctaaataaaaataaataaataaatccaaccactaattttacatttttacttcacatcattggcaattcgatatattacttgttatttgctaatggtaattaaaaagaatatagaatatatatttgaaaaattattaaacctggattaaaaaaatgaaaggtattacgaatttttatctaaaaaacaggatagatagatagctaagaagcttgtagttagacaaatattttttgtcatttcaaatgtttacagttgtgagtttttaaaagaaaatcacaacgatttttgtatgatagagtttgatctgtggttttgatccatagaacaaactaattcatctatgatcaaagatgaattaatttgattatttgtattcatttgatcaaaggaattaatttgtatcacgaaatcgagattaagactagcaaagatggattgaaagtcattttaggataacaaataatacgtaaaatatatataagaacaaaaaaaatggtaaagttgggcctacgtaacatgcttgagaaatttttacgtggcgaagattagtggtgtaaagggtgaagtgtgaattgtgaagaatcaaaggaacacgagatgtcttcatttgagagccacatgcattaaaaaagcgctgatgagtggaggtgttttgagttttatggttttttgtttttttacttttaaatgtttgtggatgacaactttagaacaacttagaagaagcctcgaatcaatacacatctatcttacgaattactccttattttttgttagttcttttccatttatgttttcttttgcaagtttctttaaagatttattaaaaagagaagtggattacaaatttacaatagaaattgttaaatttgttcagtatgggtgatcaacccaattataataattttaaatttttttgttgataaaaatacatattatttacattttcaacataaattctatcaaattatatgatttatatatatgtacactaagattttattcattcggaccattccacgtttgattctttttatcagggataccgatgactctatgagaggtgcatcattttatttgtcaaactggtcaaccaaattccataatgaaaattcaagatctcgatactacaagatacaagtatcaaaacatcaactttgtactgtaagaaaataacttcatatatatttgttttttggtaaggaattgcgaaaatatatttgtagtgtcaatgaaatttaatttacacactccatcattagctgatcttaatatcaattatataacgtgcccccatacattaattacatgtaacttattgtttttaatcttcttatttactgtgagattttttccatttagctacaaatttccttttcatctaattccttttcttaaaattatatactaaccttaaccaaaaaaaaggaaatcaaacacggtttaacttcagcgtcgctctacaaaataaatcgaatttgtttctaattagggttcatcatcaagtcgtacttctgccaaacaaggtttttactttttagtgatgtcgtcaaaaggtacaacaactcaatcaatccacgaaatatcaattgttaaagcgaggaaatcaaattagggtttaaccgatttcgagagatcattcaagagggtttaatgggtatcgttgcttccaagggagatagtaatactccattgttgaatctatgtaaggagaggaaggaattgatcaaagcagctagagatgctcgttatcacttagcgagatctcatcttctttactttaaatctcttttagatttcagcaaagctcttaaacagtttcttcataaggatttggttgtgattccgtattccgatgatgattcgtctagtagtgatataatttgttctggatcagattcagactcggatacggattctgattcagattctgattctgattgtatagtctgtgatcaacctcaaacagctccgttgagcaataatgacgatcagagtcagcgaaaacccgtggttggtgatggaacttgcggtgcaagtaacaatggtcaagagggtatggagaagtcaagagaaggtttagggtttgaggggacacagttcgttagtgatccaagtgaagacgagatgaaaagttcgcaacacccttatgatatactcggtttctacaaatccgtgtataacatgcagcagtgcgaaattatcgaactggatcatagagatgatgaggttgagagtgatggatttagagaaattagggagagagaagggattcctgatttggaacctgaaagtgattataatagtctgataaggaagaataaaaagaagaataaaaagaagaagaagaagaagaatgttagagaaagctcttctgttgcaagtgaaattgataagcgagatgttgaagcgaatacttgtaatggtcaagttgcagatgagactgataattctaatgaagcttgtgcgcaagagacagaaaacactccagagattgttacggaagaagtgacgagatcagatgaggaagttgaagtagtggcaagatcagatgaggaagtttctgatgaagcgtatgagtcttcttcttcttgtttttcggaatcttctggttcgggtttgacggatctaaggaaggtagtggaaaggatcaatagtatatgcgggaaagctgcgggtaatagtgaagtctctgagttgcttgaagtaagcagagttgtttatcatcaacctttaggatctcaattcaagggatttgcttcaagagtaattggtagttccgggactacgactcgtgatttggttttaaagcgccgttttcgcttagatgatctcgctgtttcactctctatgacattagagaagctttatatgtgggaaaagaagcttcacgcagaagttacagctgaagaaaagcttagggttgcttatgaaaaagcgtacaagattctgaacaatcttgatcaaaacggagcagaatctagtgagctttacgaggcggaaactttggttaaactccatttatctaaggttaatgtttcggttcgagcggttgaatcgatttcgatgagaattcataagataagagacgaagagctttcgtttcaagtgattgagatcattaacggattcaaaacaatgtggagattcttggcgaaatgtcaccataagcagtttcgagtgattgcgagaagcaagtcttgtgttcacattgttgaaaacggatcgagctccaggaaagccacgcagcaagtcgaaaaacagattagaagatacagagaatctttgaaaggttacattgatgcacacagaggtttcgttaagcttttaaacgaatggcttaaccgaatcatcatggaggacgatgaaaccgagactgaagctcctgagatatttagggtttgcagcgagtggttaagagagattgagaatgtggatacgattaaagtgttgagtgttgttgaagaaatgagattaagatttcaagggttagggtttaagcaagtagaggaagagaaacagaggatgagaacagagagattgtctaaggagttagagaagaagacgaaggagttggaggagattcggggaacgagaggttctagtccgacgtcgaatatggttgaaccggagttgttgtttttgagagagagtgtgacgcaagaaacagaaaaacatgagagattgataagagagttaaacgacgccgtatcgatgagtttgcaagagtgtatggttcctgtctttgaggctttgggagatttttgttttgctaattttaaagcatatcagaacattgtaatcgttaccacataaactctatgattgcgtcaatcataaaaataaatatgtataggaaattaaataaagaatttcatcagatttcgtatattattatatcaacatattagctttgaatgtttgcgaaagttcttcattttctggcgagattatcagattgtaagacttttactttgatcagtttatgcttcattgcttgcatctgcttaaaatttccggttattgatcatgaaccgggttttttttttgtatatgacaattatctaaattaagtgttcgaaacattttgaattttaaatatatgttcaatcggtcccgaaagatcttgatctaggtagagatatacttaattaaaatcgatgaatgaccatgtcaataaatcaagattcaatgttctttcgacgaattctgttcattttgcggttgggatcatgcattcatttaaaataaaccattattgaatacgttatggataatgatagtgattaattatccaatgaggaagagatttggttggattgttttggagagtaataataaaaaataaaggcatgcaatagaaggggcagaccaagtggaatattctgtctaccacaacgaagtttcaatcaaagatatcagaggttaatgtcttccaataagcgaccaaaaatcttgattaataattaattatatcgcccaaagtcactatgaacttgtacacgtgttattttggagacttttctcacctaaatacatcgagatcgccttgttagttggtacttggtaaacattatgctctaatggctttggttgttattgacgaacatacaatgtaatgaatattttctcaattgagttgtttcatttctaacaaaactagaaactaaaacaaggaaggcgatgtttctcacatgaaatttacatacacgcaatgaaaaccaaaccgactaaattttgtgtttttttcagggtgatttttaagaacattccttaatcaatgggatctaaaaaagtcacttgcctaagaaagtcaccgaaacttcacattcaaagtaactttatcctcttctcagcttttcacattatgaacctcccgtgggaacaaagacatttatacccttacgtgagcttccaagaagaaaccaacaatttttaagatttttccccattacatgtagattagttggcttcaagtttctatggatgttccttctcggaaatccataattctcttcctttatatataaaacttactcacaacacaaaacccatctctcaaaacaatcaatttctctcaaactgttttactttttcttcttttgtaatggcatctcctaaatcctcaacaagaccaaaccaagaaaaccaagaacctcagttccaagatttcttcccaacaatggcaggaaaactcggtggagaaggtctgatcgaagagatttgcaaagggttcgagcttcttatggacaaagacaaaggagtcatcacattcgagagcttacgaagaaacgcatcgacggttcttggactcggagatctaacggacgacgatgttcgatatatgatcaacgaaggagattttgatcgagacggtgcgttgaatcagatggagttttgtgtgctcatgtttagacttagtcctgaattgatggaagcgtcacggtgtgttgtgacggaggtgatcgaggaagagttttaccggcattgatagagaaaccttcttatgcgttagagactttgactgaattgtttacacaaaaaccaaaatataatttaataatttattaatgttatttttattctctctttgatttcccattattgttgaggtggtccataggattgttggattaatactgaattactgatatgcaaaatttgtcgagagtagcgaaggaaaatcttaactgattctattcttcttttattcaaactttttagtttaggcttcgtcatgtaaggatcgatagataagaatcattaaccaaaaaattattaaaaataaatataaatcttcagagtgaaaaagaatataagtgtcaaaaacattttggcgatttttgttttgaaaaaaaaaaaaccccactaaaacattaaaccaaactaaacttaagaaccaagatgtttttataccattaccaaaactttaacctaaatattgaaccaaactaaacctaaattggctgctcagttaaatcttacgacctgtttgattagcattttagaaagctatgagttgctggcaaacaaaaaaacccaactccaagtctaatatacatcataaataagatttaggctgaccatggacttggagttgtgtttttttttgttattggatagaaatagcattaataaaggaaaagcaaaaaaaaagaagagatttattttatttactggatggtaagctacaaaatctttataacaaacgtcttaacatatcattcatcaaagtccacatttaattattagaactcttgagtgtagtgtcatctttcaaccacctgatcatatttctacttttcattagttaatttctttataaagcaaatatggttgcacattgcgagtgattcatcatttaggctaatgcgtgtagccatgcagttcctgagatcctgcgaaaaagaccaaatcatgcatgtacgtatcttaagcgacactttggtcaataaagctataaaaagccgattactttgtttacacgaaataccagcagaattaggggtgaattgatcatcataaaaaaaatggggtgtaaaagcgaagcatccttgaaacgcaagccaactttggcatttttatcattatattttctttttatcttgaactgtttattggacatcatatattatatttttatatttttttgattaaattgttttattgtcttacaagtgaaacttttaaaagttactaaatcgaagactatgtgattggtccaagcctcctcttttggctgaaaattggaagcgactgtggattataatcatatttcacatagacttaagtaccaatgaacttaactcgtcgcaactcgcaacttgaaaccagcagaaactacaaaatgcagaattaacagaataacatgataacgatattaatccttctatctatgtcgacgttttcctagtagttagaaatgaaatactcgagtgctgacaccatgattatgcaaatgaagaaaaaataataatgcattatcggatgacacgtcaaaatcacgtcctaatttatctcgtttcataactatagtatagtatattatctatcgtcaaacaacgtatagttgtaattttatactagtgttattattattgaaaaattagatgcatggtcgtagttttatactttgatgtagaaaattaaaagtcaaaaaagtaacacaaaaaataataatgacgagagcgatgatgcaagagcttgaaatcagaatataaattggatcaagagccgtcgagaactacatccaatggctagattgtcatcttcggagatcggacggacaagacttgttgaccctaccctcggtcaatttaacacctacttggttgtcttcatcgagctctcggaccatattcgttgacttattcaatatttctcaactttaatccttcttcctaaatatcttatcgatagattcttatatatgaggaggttgagtgatttgtatggtacaaaatgttgttctgttctaaaacgattcaaagaatgagttagctaatttgaagtaaatttgtactgttctaaaacgattcaaagaattatttgtttttaatactgaaatatatatagtcttccatttatattacaaatatatttgtatgctctttcatttatagttattctcgttatctgaaacaggttagtcactaacattagtgttaagattgactaattgtttaatcatgtaatatttgaatagattaaacaccataattcatgttttgaaaaagacatcttctagagaaaacaagtaagcagagaaagctctgttttatgtaaaaattaaaaacaaattttgagagaaaacgaacatgatgatgatgagcgtgacagcaacatatcatcattattatgttattttaaaaattaatccaaagttttaattttcccgcaccaaccccacttttcttttgtatccgtccaataaccagaccaagtacccaacggcgtcgttttactttgaccacgtctaccccctatattatccaaacatttcaaatcgccccactagtttgttttttcctaaactgttacgaaacatcacattataattgagtggttaaatgttaaaatataagctctgggtgaaatttaagttgactaaatattcaaggggtttaagcaagagtttatggaaagaagaagaaaaaaaaagtaatggaaaaaggataaagagcacagatcatcttctacatctctataaatacgctttctacattttcggatcgttgaacaacatctctctctctctctctctctctctctaaacccattaaagtaatttagctcctcatagattctcgagaagaacacttccatggcgactaaagtatatatcgtgtatgtcaaagtttccatttttttattatattttttttgggtgattaaagttacgatttttttccaagctaatcgatgggtttcgctgtaaaaatcgtaactttttttctctctgattcacttcaatgacttgacttgatcagtgttgatcgaagaatttttctatggtttattgattttttatctgattttatgtaaatttacttactttgtgattgtttgattggtcttttgattaaagtttggatctttgatacttctgtttgtcaatatgagattgaatggattgtgatttagctacttggtggtgggtttgattccaattttgactttttaagttctttgacatttgtaggtactactctatgtatggtcatgttgagaaattggctgaagaaataaggaaaggagctgcttctgttgaaggtgttgaagctaaactatggcaggtcatattgcttactactttgtttttgttgcattgtctattttattagtcacaattggcttttatgtttcagtgagaaactatgttaatggatataagtggctatcaagtctttaatagtaggattgagtatatatagtagtttggttatcttgaggaagggataggaccttttaacattagtgtacagaactcttgggttgggtcattgccattgccatttccaagtttcttgattttggattcttggctgctgatttgctttgcaagttacttgactcatagagctccattacttttgtctgcgttgtttggttggtattactatggcattacatgctctgcttcactgatttgatttggctgaaaaggcatgtttctgttttggactctgctactcgagatttcgggtgtcttgcattttagtttctgtttgcttagcacaagatattccaaatcacacattaccattaggctttgctatagatatccatgtgaatcattgaacctgatgaatttgttatccacaggtaccagagacgcttcacgaagaggcactctctaagatgagcgcaccaccaaagagtgaatccccaatcataaccccgaatgagctagctgaagctgatgggtttgtctttggtttcccaacaagatttggtatgatggctgctcagttcaaagcctttttggatgcaaccggtggactctggagggctcaggcactcgccggtaaaccagctggtatcttctacagcactggctctcaaggtggtggccaagaaaccacagcgtaagttctcatcaggaacaaacacttcacatcatctcttgccactatatttacttattgaaaacattttgtgttaatctatagattgacggcaataactcagctggttcaccacgggatgttatttgtcccaatcggttacacatttggcgcgggaatgttcgaaatggagaatgtgaaaggtggaagcccatatggagctggaacatttgcaggagacggttcaaggcagccaacagagctggagctacagcaagcatttcaccaaggccagtacattgccagcatcaccaagaagctcaagggatctactgcttagagcttaaaaagattatggtatcaataagaaaaaaagaaaaaaacagtttggttctgcttttttttatattctttctctttgaatttgggggcttttgtgatttttcgggtttaattatcttaaaatacatgatattatttcacagcaataattcttatcttggttttacgtatagatgataatgtatgatttgtacttgtgttacactccaaacaaaagatgcgtcgtcattattcttgtagtttacttttgttaaagttgattgtttgctttctttaacctatttctcattttaccataataataatataatcaagatggagttagattggaaaattctaaatttgttttctaactaagagtttttatggtcatcatcataggtatcaatatttttctgtgaaaattagtgattttagttggtttatcatttactgcaaagtcaatgttatcatgagagattgttgtaagtgaaattatgttaaaactaacttgtaaaggttcaatgtgagaactgagacccaatagaataaataatactaggtaacaaattacacaacctggcaaggatttacttattggatcgtctaattaatttttatagcatgtgattaacataactaagagttagttctgaacttatgagtatttggaatatataaaccatttcaagttttaacgatttgaaagcagtcttcttagtttttagtgttagaattttagtagcagacctaacattggtttttgtttgggccacaaacatttgctacttgctagtaatagaacttcgctgggccaaaataaatattgctctcacttttgcatctttctttgttgttttgaattttattggtgaaatggtttcattacaatttatataagttggtttaagtttagaatgttattttatcattttagatttctgatgtaaactttttagtagtaaaaatttaacattatttttgtagcattaatgactatgtaaaccataacgtcattttcgacaatacgaacattgtcgcttgaagcaaagacaatcagcattttaaactggtttatctcggccaaacccttattttataatgttaatcccgtgattaaagctcatagactaattaacatgcaagtaagcgggaaaaaaccctaagagtggtccggtgacatacattaatcaaatgtaaatatactttaaaatgttcaattcgatcatccttctttcatgatcaaccggaatttctaaaggtatatatatttagagttagtttagtttaaaaaattaaattgtaaagtttcgttcaagcttgagcataatcgaatattctccagaacgaggattgatgaaggatgttttagaggatattgtagtttagatatatagagattagtgaaaataattcctctcgaaaacaaaccatttttcatatattatagtaaactatttgtattcattaatatggtcagtagtggtaccctatccatacgaatagtagtacttcataaacttatccaaaagaacagttacatttaacatatgagcgacataaataaattagttagacaaagacatcagtattgtcaaagtataagattaacatcaattgttttatgttatataaagaaaaaggaatatcacagttagttcatcggtcagaatcagactgttttgattaattgaatctgaattgtacataatatcagttgagagtttgaggaagaatagttatatatttatggatttgctctacttataattatttactatggttttcggttgatattggatatgaaagactataaaaatgaagagaccaataactatagtcttcagacgtattgtttattcgcttaatttactactttttctaataaaaatattgcacgaagtcactgaaacctaaagagatgttcccttaaataatttagccaatactataacatatccaacaatccgtggatgaacatttttagtaagcatgaatagatatataccttaaataaaataagaaatagttaatataataacaaagttcacatcatcgtttcattaatgtgttgcatgaacgagtggcaacactatgttaggtataagttgtaacatgtgcatgacccgaaaaaagagtatcatgtcgttcgatgaataatgaaagtatctaccaaaatatattttctccaagtgatgaataatgtataatgtagttctagttttctgtaagatgaaagtataagtcttaagaaaaatatagaacaagaattcttaaccaagttttcttaaataacttaatatcatgaaatctgaaattttaattcattatgcgtaccatattgaaatcgaaatttggccgcgatcaacaggtcatgtattagaatttagagatacatgtttggtttaagtaataatgattaatatatttatgcgatgggaaaactttaatagtaaatagtagctagaagatgaagatgtatatccgtgggttaaccaatttggttaggggaataataataattacgtcaaaagaagatgtatattatgataatattggcaacactggtcaggagacatacaaacattgcatagtgttatgtttgtggtttgtgtgtcactgtatgtcagtatgtgtatacaagtatacgatatctacacgtatactccactgtccacatttgaaacatcccatgatgagcatgtttgtagttataccgttctgatcagtagtattatatacttatcatgttattgtcctgatgggggcataagaaacacttcaaaattaatcatatttattattctaataagctcatataccatttcttattttgtataaacttggttatttgtaaaagcatcaagttttaatataagtgaatgtttgacccacacaaatgggttgaagcatatactattatataatttcttgtcattttgatgttagcaaggaaattcactctaaagtatgataccaagttaaacaatcaaaattcccatttgtaaaactactttgtcactaatttgaaaaaaaaaattacataaattaaaaaaaaattgtaagaaaatattagactttttgttttaaagaaaattatttcgaaactggataaaaaaaaaaataaaaaaaaaaaaaaaaaaaaaaaaaaaaaaaaaaactggagacatgaaaatcgaaatgcagaatacatcataacactgtcgttttacttctacagtactactgggccaagataacgagcctaccatgtaagcccggatagggagcaaagctttgatgtagcacacgtgcggtgtacattatggggtcggtcaaaactccaaaagtcaaacaaatttttagccacacgtgtttggtatatttgagcgattctctgaatagccacgtgacaaatccagcaaagaaccgacactcggttttgtgccatttcaatttttctcgttgtaccaaatcattgaaagttcttgtcattctctttgtcgtccaagaaaatgattgtgaataaaaattggtttcaatattaggtaaagagttgaagtttttggtgagaacaaaatcaaaacaactggaatcatgtagatagatgtctataatctctgccttccttaattaaattggtgataatagctaatagatatgtctcctttacttgtacatcttttaaaatctgttttgttacttctttataaattaaacaatcctctgtaaaaccttttcgtgtttggctatatataaactattcaccccacacacacaaaaaaaaaatgtatataaattatttatgaatattaaaaaataacattaagaaatcggaagtcagaaaaatagacataaggcacacataagtctagaaaaagactggtcgtggccgtaatgtacttgtataaaaaggcctttcatatcttctggggaaaaactttgtactacatttcatcaattacgaacttcaataataaattctttatggggatattggctaatataatcacacaatggtttctagcggctaattaggatatgcttcgaaaataaatataaaaatcatttgagtaatttctaactaaaaacatctgtttcctctgaaatctgaataatgtcggaagccattgtgcttgtgagtattgtttgtttccctgtagcacagaaatataatattaaattctgaaagaaaagaaaaaaaactattacttgcatagttgcatgtaaacatttttgccattttaagagttttgaattgttttgtttacttaaatttgagtctgctgcatgtaaagaacaatttcaggccagttttgtggtctctgatggtctcacagggaacaattgttcttacaacttggcaaaatttatgtcatatttgtgatacttccgagatgttctgtatgttcatatactatcaacaatatataaactatctttttaaaaaaataaaaaataaaactattagaatgcagcaagaattatttatttatttatttatgatacttctgatgttaatgattaattacttgttgtggtgttatataatagtatgaaaaatgcataacactattatattgcatacaaaacataaaatgtcggatcaacatgctctctattatttaatcaactagtaaattatattccttgaagcctaaaaataaacattttttatatccttgaactttggatgattcttgttcaactctcggagtataatctattaaaaacgaatttcaatcagggaaaattatggctttctaatgattttgctttttgaagcagataatagaacaagtaaagttccttttaactttaaccctagctaattgcaagaatagtaagtaaaaaaaagtggattaaaacttctaaaaggctggagaaacttaaaagagtcgcttagagaaacataaaccggctatgtacatatgactagaatctaaacatatttcaaaacaaaaacagtaaagcaaaattaaattaagatttaaattagaacaaacagacataataatttatcacttttctcgatattcatttgattacaaaacagaaccttctacttcatagagagtctttcttcttccccaaagtttcctctttagttactcccccattgcttgtgaccaggggaccatttaggacacttggggctgaagtaactatcaacaaccctagagtttaaaagctcaatgatcggagcaaacttcacacaccttggtgtcttgtactgattgatcgatgcacccaagcttatcgcataatccatgagcttatcgaaagtccctgactcgaccatcttgatctccaatggtccaatggacttatcactgacccttccttgtctatacacactgttaagtgattcctctatggttaaacagcaatcctcgaagaccgagggaggaattggcgtgttaccgttcaagcagagctcccagaataagacatagtggcccgggatagatgatgtgtccgcatagctagtgtactcggagagtgaagcatcaaacggaacaaggtgtgttaccgcgtttttaactgcgttttgaagctcaacctcatcggttttgtccgagtcaatgcttaagaccacgttcttgcggcatatgaagctgaactgaggcgcattgttcttgaaaccagccacgcttaggacatcacccactctgtacctgtaaagccctgcatagaaaatcacaaaacaacacaacattcaatcttttgtaaacaaatgaattgaagattctcacttttagttggaaagattcaatcttttggtaaccaaagcaaatcaatgaaaggtggttggttttcttaccagcataggtggtgacaacaagctcgtactcctgaccaagcttgacatcgacgagatcaacaagctcttgttgttctttctcagtgagtgcttttggaagactgatagagctagtaactccactgttcctatgaacaggcaagaactcgaaatacgccatgttcggtatgagagtgtaagagacttcacttggtttgcagagtggcctgagattcacaccgaagtaacactccgaagaagcatacattgtgcagacaagaggcaaaccattgctgtaataatccagagttggaatatactgtgacattgttccagtcacaatcacatccacatacttagtgtttggccaaagcctagtgatgatcccttgccaagaagtcttcctgcattcagattcgacgaaatcagcaagcttaggatccggtttaagaatctccccgaccgcctcacgaaccgaagaatcggttatctcggaactgagagtaccggttctaatgtcacgagctagctcaggccaatgtttctcaagaaacttgatggctctaatgaaaccagaggcaaaaacagcaccaacacgaagaacctctttgtgttggcataaaccacaaagcatttgagagtacatgctctggtaagagtcagaacaaaggatggtttggttgggacttgtgtagttggtgtaaggatcataaggtctgtttttgaagtgagaggatttgtagtaactggttaaaacaggacgagcagggagaccacctggtgtcttggattctgatttgataaacagaaaatacatccctttgcctttgtcaagaccaggaacaaactggtccatcacaggcatcaagagactgtagagaagtgatcttctgtctagttcctcttcgattgttggcatcagtttcctctctccaccagaagtcccagaactgttgacatatatcaataattcttttgtgaatatatgaaagataaaagtagacccattaaaaattttctttttggataaaggttttaacagtgaatggatgagaaagttagaacctttttaagtacccattatagattcgaatcttaagtcttagtctaagtgatgaaacagagcaaaaaaaaacagagagaatgatagagatagactttaaagatctcaattatgaaaagaaagagaaaaggaacaaaaagagattaatggtcaaaccttgtgaggaactcagagatggggttagaacagaggacttgagacttatcaccattggcgattctgttgatctcaggttgaatatcttcgtaagttacgacaggcatgatatgtttgaaagtctcacgatcggttcgtccttcgagcccgtgtcgtttaagatactccacatcagcattacgtgaaaggatctcttcaagaactcgtctctgaacatcatctgcgttcgtggtcacgtcttcgatgaattggagtttgttcttgttcttctcagcgaggctctcatcagaaacctccaaagctgcgatctttggtgcctcaggcatcgtttaggttttgtgtttaaaattcgaaatgagagaaattaagaaagaaagcttaaagaagagtgaaaatggtgaaagaagcttgatctggttttgttgaagctttaagggtgtgaggaaaaatggaagaggaagagttcatatatatagagggaaagaggaagagggtgaagaagatatcaaagggtataacggtcatttcacagtatgttgaaatccaggatttaagtgaacggcttactattcgtgtttaatttgatttactttataatgtcgtttattttattttagttcgtttcattacaaaaagtggtatttatataattttgttttctatattggtcaatacccgtactggcttgaataaaaaggtttaatagtttaaggacattcaaactatatagtattcttgaattctcccactttattttagttaataaaatatatttgatggttgaattaattttttctaccccctgatttaacttaaattattctctttaaaggaaat

SEQ ID NO: 899 - DNA, 75744 bp, Arabidopsis thaliana
gatcatgtgctgtagagaaaaaaggtaatgaaatgatcatgtaacaggagatgcattataatagttaacatagtgttattgttgtatccatcgttcatattaacaattaatagaatgtatagatttgattaaaaatgatcatgttgcatatcttgaattcggggagcaataagttttaatgaaaaggattttttcaagtttaagagcgaattaacttgaaaaaataaacttaaaacgatacatccattactaacctcggttaagattgaattatgttttggtaatttttgctaaaattgcaaggtggaacgtctagttaaaatttaaatttactatatatttcgacttatttagttcaattatgataaattgagtttcggttcaaattcgagtttgatatgtaatagttcgatttcaactcaaaatttcaggtttaaattagttaattttttcctaattacgaaaaataatgtttgatactatgtgacaattagagcgatcaaatgcaaacatataagcttatgagagatacaaaagggcataaatgagggcacagattttataacgggatttacccggttgaccaggaccgtaaaaccggcaatacccggttaatccgcagtagtttctaacggagctgtcccacaaaataccggcagcaaactcccacaaagccttttctaaaaccctaagctaacactatcttccgtttcccggtacacacaaataacggcgttcacttagaatttctcgcggtattttgaaatgcttttggtcaatgtatcgtggcgacaagaaatggggaccattacagctggactcgatagtgattggttgacacgtgtacttggtgttacattactagtttggtgccttcacgtagtttattttcatgcgacttttttgctgaatttgtttaattttgatcatccatgaaattcaaatgagtatatattttcaacattttgtttcgtgtgaacacatattttaataattttctaacgtttttatttaaacaaacccaaaaaagtataaaatcatattaagtgataaggacgaaaatttatttgtttttaaaatttatttgagtcttttggataaacaattttttctgtttgaataatggcaagtcttagattgtaaactcgatatttcattgtttgttactactgaattataacatcggggatagtaatatttgagctcaaagtttagtctatagctgttaaccagaattagatacgagaacaagatggtaatatatagcaaagatatgattcccgtcaaagtgtcatctgctttccaatttatattcttgtctatctagttaaattctcatttctcagtgtttaatttcgaatgcaatctcagtgttcgttttggaatgttctactatatagtgcaaggaaattctagaagaagatgctgaggaaaagtaaaagacgctatacataaagataacgtctgctgttaatgggttttctttttaactttttaagaaaattgtaaaatagctattgataattatatgacaatataaatgattaacgaaaatctgcaatcccatgtacactatgagttttgtgagccgtatttctaaagaataaataatatctttatctatattatatatacatatgtaattataccaacacttaaaattacttgtcctatcagagaaagtatatatattctttcgttgacaagtaattcacaaatttattcgacaagcaacaatgtttagccgaggaatatctttcaaaactcaacatcaatcaaagccactgataaatatatatatatatattaacgtatgctcatcaatacacgtttagaaaatgtaaaccagtaaaaaagaaaatttcacaatcaaatttgtaagttaggtttcaaaaacatatatcaggactaattgaagtactacacatacaggggtgcgcataatctacattttaggtttgagatcggtgcctaacaagtaacatatacgtagacgctcatatagcgtaacaatcttttattcgtgtttgtagatatatttatttttcacttccgtgtttttatttcgaagtcaaatacttaggtaacttttttgacgtaccagaaagagtgatattctccaaggtagtcaaactttttttctcaattgtcaaacttcatactaatattccagaattaattttcctttcgtaaatgattcgttaaaaagtattcttaactttttgagttataaaattcgcaattgaaaatctcttcgtaaataacatcacaagatgacgtcacaattcagctcgtattttctattcttttgttgattttttggctcgcagtttccgttatttccggggatgatccataaattcactgaaaattccaagaaaatagctaaaaatatctgaagaatgacaacaaaatttaatacaacggagaagaggttgtatcgtttttaagaattttgttttcgacacggaacatccggtcaagccacgtgggagctccccatatgataggctgaaaatcaggtggaagcgggtgcaccgagagggaaggtaggaccgaactctttcattatctcaaagtagtgtgagggcgttttctggaccttttatgtatgtacttagtggttctgaccctctatacgtacgtttgctcactacaacacaagagtttttgttgtgctatattatacggaaaggctacgtgaggcaccgacagatcattgcaaatctttgaccattgactcttatcttattttcgaacaaatttttttttttttctttttttaatagattttgtcaaaaaataataattgtaaacctataccacggataaaacttacgagccaaaacttaaatgatttttgaaaagacattaacacatgtaaaacaagtacaaaaggaggagttgagatgaataaaatgacccaatgatagtggtaagtaatatgtcgggtgagcaattttcttgtaaagccctgttcgtttctccatttgacagatctatccaactgattcattcaacatgttcatctagatgattcattcgactcttgttcgtttcatttttagtaggttcatttaactggaccatccgaatgagatgttgttcgtttgcttatctctatcttcatccaaatgatttgtaataatacaaatacctaaaatatcaatgctttcatctaattatatttttattattacttgtaaacatattaattttaattcttaatctaaaatatatttaaaagtaaataaattttaaataatagttttttacatttatgaatttattttacggttttggcgggaaaacgtgattttacagttttgacgggaaaactcgattttacggtttggcggaaaacagaattttacgtttttggcggaaaaacgtaattttacgtttttggcgagaaaacgtgattttacgatttttgcggggaaaattgattttacggtttcggtgagaaaacgtgatttttgcggttttggcgggaaaacgtgattttgcggttttggcgggaaaacacgattttgcgggtttgacgggaaaacgtgtttttgcggttttggcgggaaacgaaaatttacagttttggcgggaaaaaacgatttgcggttttggcggaaaaacgtttttttactgttttagcgggaaaacggaattttacagttttatcggaaaattttgattttgcggttttagcggaaaatttaatttttatttttttaaaaaataattagaaaataagatttaagtctatttgtttttatctaaaaatacatctaaataatcaattaaataattagggtatttttgtcatttattaattttgactgaatcatctccatccaaatgatccaattaagtttagccaaatgagtttcaaaatttagcctaaattttcaaactcatccaaatagataatctgaatgaaccgttttttgcactaaacgaacatcaaaactcatctccatccagatgatccatttgactgatgaaacgaacagagcctaactagttatttgtagaggacggaaaaaagttcttgtaaggaataatgaaagtggttcatgtttataaatattaaaattaaatctcatccatgcatgtaatattcgacctaaacctataatcatatactttgcacgtgatattttgctaaagcaagaaaaactagtacgtagtaattagaaagaaaaaaaagctagtaagcagtagactgtatacagtaatatatctgagtttgtatctgttcacacctacgtccatatacgttgcatacatgcaaactaatttttctgaaaacttaaaactaaaaaggaatgaaaacagataactaaagctgataatctatgttattaattagtttttggatttttgaatagcttataatgatggtgtcacaacgtgcatgtggatggttgaatgttgaaagatggctttatggtttacttccagggaacagcacataggatatttgcgttattgttgcttatttcatttttcattagtatcaatttagttcgtggaaaccaatgatgtggtccctaattgcccgtgtttaacgatcccctgatgtagtcgaaactcaaaaccctagctagtcgcaacttgtgtacacactaatttttcttaaatcaccattaactatccggttcctctagcatctcttggaagtgagaaaggggcaagttttccggtaaataattgtttcacaggtcaattattggacaattcatcgaaccatccaaaactgaatagaagttaaattccaaatttatgatggtctcaagacgttggtcaactcatcaaaattttgtttatgtgtatgtgtacaaactattgtagatgtgtagttaaaaactacgatgctccaggtttattcgagagaataagcactatctatacctagaagatgtaacaatctcatagtatttcccatttttttccaagataattgactctcatgtctcgcattcatttccaagaataattaatttcattacaaaattcatcattaattatgacaagtagtatggaaagacctggaaaaaattctcattaccactctatacgaataaatacaaatacaccgtatataaatgtggatgttcgatttacactataaatttcgggatccaacacaaacaataaacttttaaaaaccacgcataatctataaaatacatgtagtgtaacgtgaaggcagcaccgtatcttatgaagaggttaaactattatgattagttcgaattaaaagggaagtaaacaaaattataaaaaaggaattaaagtggagacgactgaaaattgattgggtggcgaggattcaaaaaaaaacacatgagaaagtgttgcttctctttgccagtcgaaaagggctttggagattgtgttttaaatctctatttctcatctttttatgtggatggaatcaatatgtagtgacatgaatcatggagttttcttcttttctctcgatacatatatgtcaattttgtgtgatatatttaacaatagattttgataatcggccataaagtggtattttgtaaaacaattcataaatataacactgattccagcaccaaatttgtgactccacatttaggccttaattaacttgcaaaattattgaaggaaatcagccaattacttggcttatttattgtatttcttgcttttaaattaatatttttcttaaattaatatttcctaaaaaaaaatataatccatgttcattacttttttcaagatcatcttatgtattcaacgtaaataattttgaagtgacatagatgtttttcggccatacaaatttggcaggctaaagttagaaatttcatctatttccatttaaccattcagacttttgacttttagtgtatgttcgtttttttatttccagctatattccaaattgttttaattagaaacatcaaagtgaatgaatatgttcttgaatatattgtacgacgagatcgtacggtcttagcacaaagacagtggcaaaacgagtgagaaatgaaatgacaaaatcaacaaaactttgaaatgataaaagcataacatcaattgtcttttgaaatttggtaacgaagggaaggacaatattaaaggacggaaaggtaagaaaacaaaatcgcgaacaaataaataaagttttgatttgatttttaaactttctctaaaagcatgattcccatgcgatgcgtcacttcctcatgcattatcatcacaccatgccatatctttgtttctttgtattaaaatcatttcatcgatgatgtttactgataagatccgtaaaacatacacgatataattccacaacttaccgcggttttaataattttaccatcacttcgtcatgcattatcattgatacaattataccgttatatttaagaatcttaccaattacaatagctagaaaagtaatctgtggcagctttctttttgttaaaagatttaagtagctattttacaatttgagtaacctttttttgaataaccttttgtcccgtagtaatgacattgttgtattattgttctcatattttaaggggactacatacattagcatgtgcatcaatttagctcccgatctctaactttttgtttgttgacggttaaattaactacaaaaatgagatatggaaaaatatctggtcttatggtctagttacgaaaagaagaagataatattaactttttaatagtaaaagtcccattctctttgttcttacagcctttaatatataaacaacaagtttgaacaatttttatcatcattttacggcatgcaccaataatttatccttgttttaacatttaccatccaatatttttgatgatatatatcttttcgattagacctaacatatttaccatatttaccacaattatacctaccacaccacttctagcatcgtcaccatcaaaagcttaatgtctacatcttagttctatctcttgtcgtgacaattattgatctcgaaatcgatcggttgtgcatacacaaaattatctagaagtactgttgactttatccttatctctttaactttattgagaggtaactattaaaagaaacccactaattaaaactagggcaaaaaaatctcttgcgattgatagaagccttgacaaattgagtttcgtgtcttctctctttactccttttttaagaccaaaagatttcctctagggtacaatgcatgtattttcaaatagtgttattggtctttatgtctttatctatccaaatgtttcatcctattcatttgggtgagtaaaatagtttatcactagatcaaatgttgggattgaatttttcagcactatttccagctttcaccacatgcttttgtatgcacataaatgattaatatgagacttttctcccattcatttattaccattaaaagttgaaactacacaagctctcgattaacagttttcttagggaatttgtccatcagtggatccctctatttacatctgcatatgaatatatgctactaaatagtttgagtttatatatccattacttggttgttgagctacatcctctatattgtcacttacaatggtctatgtaagtactgacaattaattcttttctcccgctaattgattcccattgtttcatttgagttttattttcttgcctttaagtgttgtatatatcaaacttgctactttctacatatggggaaaagatcacatttacaatattatagcaaagaccgaatgattttagaagaaactttaagacaaccaaagttgataataaaacgaacaaggaaaaatggatggtatggactcaaatcacatgctactaactacaataatataaaaatgagtatgtcggtttgccttttcaatgtttcattttaatcaaatattagagtatttgatatatattaacgttaaattttttatacattagcacactgactactatgatgaattgtagacttaggcttaggtttgaatttaatgtcacgatgaaaagcacgggtgattagcaaatttggcaaggatagacattcatatgtatctaaaaaagattgataagatgggtcgaaaaaaaagatctgtcacttaaaactctaaagacatatttaccaaaagaaaaaacagtttagatgttaacgttggccctcttcggcgcaaagacatcgcgacaacgaccggtggcaaaaagaaagccttatattttccttcacaatctccatatctccctcatctctttatatgctctctcgcgcaaatttaagtttactaactataccggttttaatttactgtaatcatgttcgatatatgtgtggtggtaaagtaaattaacacttaagaaaatcttaaagatgttttacggtttaagacttgaagtccccaaaagtggagatatggtaatgattttgaaaaatcgaaagcattcttttcttttaggcagggtgatgtttcgtttaagaaggtaaggtcatggtcctcgtgaactcatatggttaagtgaaaagagtaagaagaatcgagggaaacaaataacaaaacaagttgttatttaattatctccctaatgaataaataaatacaaggcgcatcaaattgtctagaccatgaagttgtgatccaatgaaaagaggttaaattaattaagtcttaagtcgtaagaacttttaagcccatcggttcatgtctccaatcaccctaaccggtaggtccatttacttatcgaaaaacttgcttgaccacaagtactctttatatccttttccttgaaaaacattttcgtttagtttgccaatatcacataaacacactaatatcatgtcgtttacttcaattgatatgggtttgtttcattctacatttcgcctagggttgattggttatagacatatagctgtataaattttatttcccacaaatacatggttagtaatatatatatatatatatatatatatatatatatatattgtctcttacatgattttcagaatatgatttttagtttttattatattttaaatgttgatcttcttgatcatgaagaataaatctaacccattgctaaattttgaaatacaacaaaaaattctacgaattactccatacaaaaataactcaattatacttgaatccgaattattttcatgataaacagttctttctttaacacacggaaatacgataaatatacatgcatcacgtaaatatttctgataagtttgctctattaatgtatttaaatttagtgattggagacatttatatacaacaattttacacaacgccatattgcgtgactttgacagagttagtcctagcaataataattctgttgattcttttcgcatcattgaaatttgttttagatgtgtggggtcgagggacgagggtatggtaaataatttagatattggtaaggttttggatgatgcaatgacgttttgtagttggaaatggttagtgccctttatattttgcttttggttgacaataattttgagagaaaatgatagatttgttatatataatacaagaaagaagaaaacagagtaaaaaaaaaaaggagaagatcttttgttggagaccaaagaaggtggggaacaaactcaagacataagtggaaaacatagagttgtatagatgtaggcataatagctaggcttataggatgcattaatatgtttgcacaaaacactatattaaaatataaaattggaggttaggaatatagcaaggatactaaacacatacattcgaccctaatctggaacaattcgaattgaatgatgtaaacaaatgaacaacattggatatatattatagatatacgaaagaggggtttgaccatgaaaattaaaaagtagatatggataaatagccggcaaacaaatcggatcaaatcacatttgactataatttagtacatcaatgttggactaggcatagttctagctagtattataaagttaaattatatgcgcatacgtcatgcgcaagtcggttttatcagaatttttgagtgtttattctttgacgatgagattaacatgtttttttaaaataatttcattctaagattttttattcttcgaattttaaataattttattttacgaaataaaaaattagaaaataaaaaaaaaaaatcggaaaaaactttaaatttacggttcttcattctacttcatccaatcggagtcaaaaacatagtatgtgataaaaaaaaaaaaaaattgatgatgtttttgacaatttagaccgtatgacaaacaaacctttcaataactctaatgtcgatgaccttttgattttttaatgtatcaaaaatgggagttgataaagcgtaacccattactatatctctaaatctctaatcatgccattaattagcaaacacaaattttcaaagttcggcatcatggatagaagagtttcagtctttgagattgatgtcacgtctatttgattcgtatctcttaaaaagggatatatgaggtccaagaagacaataaaatcgcataattttttgaaaaggtggttgtcgaaaattttaatttatttttgggggatgatagataacttggtcatttttacatagttttgggaggataataattttttttttttgagttgaatgttatataatttattcaaacccaaaaactgttttacaataaatgttacagtaatgctgaaacaaaatattttgaaagaggataataatttccaatagtgcacttggttatttttacatatttttgggaggacaataatttccaatggtgcacttgaatatttagtagacacctagcaaattgaaaatgaggtaataattagattcattcaatacaacttataaattttgaagacaaactttggtaatggaaaagctttaagctttaaagggtttgtgtttgtggaccaattaatgtcttggaaatgaactgtttggctgtctacttagtgcgatcaagaagacaaagaagaagacgaagaagaagaatggtgagttataatgataagatggagaaaattggttttataataaaatcgaatacgttttctaaattgggttatcctaaagaaaaattgtttcctctttttcttgacttgcggtgtgtgtatgttttggtcatcgatgcatgattcctttaattggtatcaacaatatatttttatatatggtttatgtgtgagtgggtgtgaaagataaggagacttctttttccctctcttttttttcgtatcccactttcttcaattgctccccatgaaaaggtttataactcaccatttaattatcctgttgtagcctgtttaacgattttctacgaggaatttcgatattccaaactagaaatttagacaaatatcaattataaatgttttaaaatatggtctatacaaacagtatatacgatatatgtgtttatatgttagataagtcatactttatttttaatgctacatggtgtaattatataagcaaaacggacgtgtatatggtgtttaagcggttgtgtttacgatgatcattgtttctttacatttttaatgtcctaaagaaacatcattttttacttctttatgtgacttttgtttatcgtatagtagtagttttattgataatacaaaactggtgttacacacaaacggcgagtttgaggagtacaagaatcaaaagccaacaaaaaaaaaaatgatattttctaatcacaagccaagaaaacaatgataaatctccgagaaaaaaaaaaagtgaactatgaaaaaacatatcaaattttttaaaccaagcatctccagataatgaagcaatcacggagtgaaggaaatgtacatgtattactttacatggcatatatagttatgattatatctttgtacttgttgaagaggtatgaaacacaataaaaggtttttctttttctttttggatttgtggattgtgccactcacttgcaagctgatatttgggttaaagccctttacaaatagtgatggttggaaatcaaacttactgacacacttgttagtggccacattaattggataatatatgttacattccttttgttcaacatatctttatccaatacatggttctatttttctttggacaatcaatatgaatagttattgcataaaacatgatttactacttcttaagggtaacatcaatagctttttgccaggccaatgtagattgttaaccgaaagcccaagacttttttttatcacactcaagtatttttcaacaaccttttttcgtgttttttgatcatttatttcatagctccctgagaatatcagagaacatagttgtgttattgtgtgtgtcagtctctgagtctcacgctcaaatatagtaaagagataaataattgaaaatattctgacaccttttttcagattgactacaaaaatcccattcaagtaaaacccttactgtaacagataatattcgaatttgtggtctgacaaagtttcaatatgcacactctattgtttttttctatctggatttcttgcaatcatactataaccttagaagaaatcaacagggggagtttcatttcattttatttcttcattcgattacgttttctaccatttcctagctactagaacagtggtgagattgagatttgattagcactaatactaaccattgtggaatcactcaaaaacagagacttgtccattccagctacaagccgcgaccacgttaggtaaaacggggtggtatgacacattaacgcagggctgttcataagctttgagcttcttaatgagcgcagtggatttgtagtcgtacatgtatacagaaccgtcagatgagccagaggctaaggtttctccatccgggctgaagttgcatttgattgggaaacctgcaacccagtgaccttcgaatctcttgtatttgttgagtttgaaaggtgggtttgttgagaagattgctgtgtagttcccgtgtgattgcgcgatgaagactgggtcttgcgggtgacgtttgatgcaagggcatgtgtatgcttctacatagacctaagagcaacagtgaaaacaacaagaaaataatcattggcgtcaagatgtcattaatgatagtctcatgtctaagaatgagagtctcaaatcactgttaaatatcatccttatagtaatggacgtagtaatagagtgagtgtgagctaggagttgttccaaagtgaaagaaggaatacgaacaatgtgatggaatgtatagaaaaagtcagtgaaaccttctgcaagttaataatcatactgaaataaatcacatttcgaaagttcagacaaatgtaaaatggaatttttcaaaaatgtcctaagatagttcctgctaagactagattggtcaggaacttagtgatgatgagaacaattctctgacttcctggtgcatcaaacaagagagcatacaacaaattcatatagagaggaaataaagaagtttccttgcttctctctgaaacaactattagaaacgttaagcatctaacttcaagaaatcgaaaggaaaattgcaacagttccttcccacattcatacataaacatgttctgcttatgtctacagatgcagcttattgttaattcccaaatctaagcttaattctgttagtatataaattctgatttactaatgacttactgatacttttcatcaaacaatctaatactgagctagatgaaaatgcagcattgatataactgaaagaaggttatttgacagtgataaactgacctgattagataaaggaacctctctcgaaatatcccaaactataacagcattctcacttatatttctgccagaaacatcacttgacgagataaactgcttcccacccgcgataaactcaacatcaagaattggcccaagatctctaacatattcatgcacgaatttattggctctaatgtcccataatctaagacttccctttgatccaccagaaagaaacacgttacaattatctggatgaaacttaacaactccaacaacttcatcctccttgaaagattgtgtctctacccctctttcaacatcaaacagtctcgacgtgcagtcatatccacaagaaagcaacgataacccttgctttgaccacttcacatctttaaccggtgcattatgatggagaaaagcccgtactttcttcttatcattactccacacattccacacgtaaacagcaccatcaagccccgcagaagcaagaagatgaactgcacaataactctaataaacaaatgaatgaggcagaggataacttcaagccaatcttcacccaaaagctacaacaaaagagcaagaacataccatgacttgtagaccaatcaatagcagtaacagcctttgtatggccggttaacgaaatcgacattctactaggcatttcggtttgcaacgaggatccttttggtctatgtctaaccgaagatagaacatggcgaggtacatcagaatctgagatgctcccaagaactgagattaataacaaattagcataaggcaacagtacaaccacaaagctagtgaagcagattaacaagcatcaaacactaaattctaaacagcgaattgattaagcatggttcgcaattaccagtaggagagctataaggtttctgactcaaatcggaactttgatctggagtcggaatcgttgaaagggaggctagaagtgatctctctctcttggatacgtaccggcctggaaccggaaccggaaccggaaccggtattgaaaacgacgagctggtttgagattccgaataggaaccgtgtggaggatacggtctacgcggtggtttgtattgtcgctcctccgggactggatatggacgcttagaaggaattgacggtgctgcggcgattttagatgttaatcgctcattggtcactggctcaggttcgtcgtcggagtcattggcatacgaattgcagatgagatccatcggaaagttgaagtcgagacacccgaagcagtgaccggtgatcggaaaaaaaatgaattggccttcgatgagatagagaaggctaaatctttagtgggctttaattgggccagaagaatgctccaggcccacgtgtatgcatttatcaattggaattgttgtttcgggatcattctcactaacaatctctaattcattatactattaatcaactccggcatctagatattactcatgaatcaatgatcaatagtaatgtgtttgtttacagaaaggttgatctaatttaatgagatcaatgaagggaaaatgctcaaagttataaactgttagtgattaatataattaattttaaatatcatatattttacaaataaagttaataactcacatcagtaataccaaacatgataactaatacataaacatatatggatttatcaattagaattattgtttgaggatcattctaactatcgggtttttatttcattatattaatacttcaccatttagatattatcaatgatcgataatttggtagcaatgtttttgttgccataaaaaaactaacctaatttagttacttcaatacagagaatatgttcaaaattagaaactattagcgatttatatataattttaaaaataataattatattttcaaagagcgtaacagagataatatcaattgttatatttaataaattaaataactcactatcgacaaaacataattattgatacaaaaacacatgaacttatctattagaattatcgtttgaggatcattttcactaacggttacttcaataaagggaatatgttcgaaattagaaaccgttaacgatctatatataatttagaatataataaatattattaaaaatgttataaagataagattaattattatattatatattatatatttaatcaagtaaataactcactatcgacaaaacataattattgatacaaaaacacatgatcttatctattggagttgtcgtttgaggatcattttcactaacgatttttttacattatattaatctactccaacatttagatattacccatcattagtaatttggtacaaatgtgtttgttcccaaaacgaaattgatctaatttaattagttcaatgcatggaacacgttcaaattagaaaccgttagtgatatatataatttgatttgaatattttttttaaagcattattgagttaaaatcaattattaattaaaaaaatatatatattataaataaaattaataattcactatcgacaaaacataattatatttagggttttatgccaaaaaaatcgtttaaatcatccatttttctcattttacccatcacatcaaaaaaatacaataatcatataaaatcaaaaataatatgcaatttaaccttttcattataacttttgaaatttattattaaataatattggatttgtttttttaacaaaaatcatttgaaatgtttgattgaatacaccctttaaaataagtagttaggtaatgataaattttgtagacaattttttttcttaatttttcttataattctatgaaaccattcataataagagaagatttactactatatatagtcaatcaaaacgtaaaagattatatacatcaatacttgaactaaattattgattaagaaagattttggtggtagaacaacatttccgattttggtggaagaaaaaaacgtctcagtatttcatttacgaaaaaaacgtgaggaacatttatcagttacttaatctgttgagaataaaaggaaaagtttttgaattttctccaatacatacataggacccatgcctatataactgaatttatctttgtatattacacagatgagttataaaagttccaataattacaaggacccagcagaataattaaaaacacacagaaaaaatccaaatttaagaaattagaaaacaaatggtatcacaagtctcacgcgtgtaaaactgcatgagccacacgtgggccaagctaaccggttacctgctgcgtcttaaacagtaacacacagaacaaacgaccgctacgaacataagtgacaactcatctccaggtaaccggtacaaatgggaaccacagaaaatccacgtggcataaatctataagctaccgtcaagtgaaaccggtcccctgattggttaacgtaatcattttctcaattctggaccctactgtagtactatgtatcgcgtgactctctcatagtggcatatttgtaattttaattatctaataaattacgtaattatcacatctcttaattaattatctcttagttaataaaataataagataagatttcgtcataccaaatagatttcaatacatccaaataaatcttaacttgagtaagagatagattcgaagttggaaaaagacgaaattacccttgaagagtgagcttttttttttggctgccgcagaatttaaccgttactttgtttccctttcatgcaaaagccctatgacccatagcttgcgtggcacactgcttaaagacgaaaatagtttaaccataactgaaattttgacaaatattttattctagtcaattacatacattaaatcacatcagagaaaatgtaactactattttattcttgtacttctaaaataaataatggaagaaataacatttttagtgacggttattttagtttctagctagtagtaccaataaacaaaattaagtaatactgagcactttgttgttttgtgttaactcacaaaatttgatttcgtcaaatacacaataatagtccacaatacatcatttccccccctattttcttaaaatatccttgttctattgcattacttatgataagatgtatttaataagaagctttcatcaccaacaaatgaaaaaaaaaaaactaaatgatgaagcattctgtattactccttaaactatcaatttctagcatctaattcgtactcattaggtgttgaattactctacaatcaaagttaattatatagtatatatatacatagcatatatttccatgctacattatcagactatatatactacacatacgtttgttgttgacaaataaaaacaaaaatcacatgcgtttttcacaccatagaaggataaaaaattatcaattttagaagaaatactactttccatgaattaattgttaaaaaaaacaatgatgtactaattctcaaaaaaaataaaaaaattcgtacgcgtgtagttaaaaaagccttcataccttatatgctttggtgattaatacacatttgcatacatatagttataaataccttattttctaaattagacacttcaatcattaattaaaattttctcagttttaaagctaattttggtgtgtccaaccactcttttgtcattatttctccacatggaatttttttatagaaattctatcgatcgctataatatttccattttctctaaaaatttagaaacttatgaactttaatcacttaaccatatctattatatatatggccccattcactcaccaaccaggggcaaatacgtcattccaccttctccttctttcccatttaagatcctccctcttcacttgaatcatcgccgtgaaaaaaaaaactttctctctttctctctctctctctctcagtgaaaagctatgaacaaactcatctcccgtatgatccttctcctcaccactctccgcctctctttatccctctcctcgccgtcgtacccaacggtccacgacgttctccgatcagaaggtctcccggcgggacttttacctcaagaggttgattcttatattcttcacaacgacggtcgtctcgaggttttcctcgcggcgccgtgttacgctaaattcgagacgaacgtgcactttgaagccgtcgtaagagggaatctgagctatgggagcctcgtcggagtagaagggctatcgcaaaaagagctcttcttgtggcttcaggtgaaagatatcgtcgtcgagaatccaaattccggcgtcattgtgtttgatatcggcgttgcttttaaacagctttcgctttctctctttgaagaccctcccaagtgtaaacctgacggtaattttttggattaacacaaaacaatttttttggtttaattaattagtttttaaactgttttttggtttgttatgataagaatagttgtttggattttcttaaattttatttccatgatgactaaatatacgattctatcatcttaattttcggttttctcattttacctttgccatgggttaaactaattagtcggcttttaaattaatttagttatgtgaaatatacatttttgtgttaataaatactgttttttatcccaataaatttcaaatatttaagtttttcattacgaagttctagattgaatgtttgttgcaaaaataaacattttcaaaaaagaaaaaaattagtgactatgactaatagcaatgtgaccatatcagttttcgctctattattcgtttagattcatttgttttttttttcagatcgaaccgtagaatttaattacaaaattagttcgtttttcaaaaaagaatattgttattgtggcttgtggggaatagaagtggtacagtgaagtcatgggctttgggtttgtgttttttctttctcgtttatgtttcgacgactttgaaaactcttttggattttattgtctgatatctttgccggtttcaatacgagtcttgtctctgtaactgctgacataacatttcctttccttcttttactttcttgttttttacttgaataagtagtacattcgatcagtaacttttaccaaattttatcatttgttttaactttacctaatagtatgaatattatgtacgagtacaattctcttttcctagttcgaataacccacttcaagaaatggtaacaatacaatcattcacagaagttacatttttctaagaacagtttttcattctaacttttttggatggtacatttaaagatttattattggatttatgtatcaggtgttttgaagaaaaagatgagaagagatagaggatttgaagctcagaagtagagagaaagacctaaggccatattgtccatttgaaaattcctaaattgtaaactaatcagaaagattagtatgctaattatatgagtagaatagaattttgtttgagagttcttgtaaagatgagactccccatgttctattctatgttttgtgttttagaattttaaatttgatatccattgtctttgactaaattgatgatgtttatctttttgtgatggttacaaagttgctccaaaacttaaaactaatttatttttgatcgacgaaactcggtcaaaaatactatgatttgtgaaaaattcatgtataagattgtacatatactagggctagggccaccagtttttgaaaagttaggtctcaatgaaactgaagtaaatctttctaaaatactcattttatttttttctgtttgtgagttgcgaacctagtataatgaagattcggggtaatacactacactaacgtagaaccaacatttgcagcaaacaaagataataattgcttaacaaaactaaactaaatatgtctgaaaagattggtcggcttcaattcttctcactcaagtcgtcggtagctttgaatactcttaaccaatccttctctcacgcagaaaagagaacaaacatgtttctcggctacagattatcatctattgtgactgaaccatcaaacagttcgtgttcttgattatgcgacaccacagtcttaattattttcagaacttgaaccaatttctcatgaaacctcaaacttagattgcgacataaaccagaatgaaaaatagtatagcaataagaatacgacatttttcgatatttcaacatttcaaacaaaatgaagtgtgcaggatttcaatcaaattttttgcatcctacaggctacacactctattttttttttttttcgagttagaacaaaaaaatctcatttttcttcgctgtttgtttttctccacaatatacaaccattctcattctctttttcaaaaatgcaacatttgtttttcaaactttttgaaactcccatcaaagccccctcaaatcttgagtagaaaatgtgcctataaatgaagaaaacggatcctgacaaaaggtagaaccataaacattgtgcactagatgtagaaattggtgaaataaaaacaaaacaacaaaaactgaaaccatatcgactcaaaacttgatggacaaaatagtcctcccaactttgaagatgagaaagatttgtccatctttgtccttgtgtagcgatttttacggggcctaaaaatgtaatagaacttacttcagcgagacttgtaggtgtggattgctttaccaacgtcacatgtcaaggtgatcaccaaattacagctttctgcattattgactcatcgaaatctcttcttaggtaagatgtttcatatatagcttgtcattccttcatttaaatatatactttcattattattttttggtatgttttgattttgaatacattctatcatgtttattttgggcacatcccctgaacttgtcccctttgaatattttccaagttcaattatgctctttatggttaattttatgatcaagacttcatcaatgaatcgaaacgtttgcacacaaaaattgatagattaaaacgtatatttttggataaaatgggatgatcctattttaccattcaactaattccctaaaatgaatgtaggtagcatactcaccatgtttttaattttaatggatctaaaatattagaccgctcgctaaatacatataattagaaactttcaggattacattaatccctaatcgacatctacactttttgtttctagagagaaatcgacataaggagcaaaatcaaaatgaagacaatatgtaaacatcatcgaagaatataccacccaaaaaatctctaattatctttataaaaatcagtttctgaattcaaggaaaataacactaaaccgtaaccgaaattttacgtgattgtaaagaaaaccaataagtgacccttgaaatttcatttattatatattgacttatttcaaaatatttctattaaatccttgccaaaaattgataaaccgaatctagtcgaacaaacagattcgttgataagatatagtacttttttttttgtaggggttgataagataagatatactttgacatagtaaaccttgattatatgaagatgatttgcctaattacgataattaattaatattaaacgtcggtcatttactgctgacgtcatcattttaccttagtggataaggtattattctctttcttcaaaactcaaatcaaagaatcgcaactatacatttctccaaaatctccgagttctacaattgtgtgatcaatcaatcttctccgatttcaagcttctcgatcaaaagaatcatcatgggaggaggaagagctatggcgacggcggcgaaggttgctggaatcggagttggtaaaggaggattcaagggatttggatttcctccggcgactgagcagtttcgtgttaaaaccgcggcggctgcggcgtcgtctaaaccggtttcggcttcgattacatcggcggttcatccttctgttgaagaagatgggatgattatgcagagaccggtttgggatgattgggaatttgctgaagaagaaccgattcctagggttgtttttagcaaacctcctagtcttgaagaagctaaagaagctactgaagatcttaaagaagcaattaatttgtaagattttatcctaatttgtgttcttgagagaatttgaggatttgtgtttgaatttgatgaattagggttcggtatgagagaaatgatcttactttgaaacacttataagtttgtgattatgtgtgtgttgatggattagggtgtatatgtcatctccaaagtcgtctgctgctatggaaggatcaaatgatggtggctctgtttccaaaatgctctctggttttcaatcttctgagaacagagctgttgaatcagctgttccacaagttgctcttcaagcatttgcttttctaagtgagaacactgctgcgcaggtatgtcggtttgctctctctttgcttggttaaaatggtctctgctcttgtttggtatatgtctcatatttgctttagtgctattctctttcacatgtttgagagtctagttgtttatctttacagactgttgttgcttccattgcgagtgacccaaaagtatgggatgctgttatggagaataaggatctcatgaaatttcttcagaccaacaaaaccggtagataaaactttgctattaacttagtgaatcatttggtgtacatgtgttgatgatgaagcaagttaatagaaactttgtcaatatttcagctgtttcctctcaagttgaatctgacaatgacgaccaatctgaacgttcgagcacgactgagtgtgaagtcgtggaaactaagccaatggaactcttagagattctgcaggacatgaagctaaaagctgttcggttgatggaaaatgtatcttcctactttggtgacttgtttgggttaggatcagttacagaagatggaaaagacaagaagcagacgttgttcaatgaccctcgttctctgtttggattagctgtggttgttatcttcatggtagttttaaaacgtgcttaagatctcttgttcctgaattcgccgatatagcggaaaaacaactacgtactctgtgttatcgtttaaactctgtttcattcctttgctttgttatcgtttaaactctgttttttgtttgattggaatgatttggaaccgtcattggatcttttcataatttataaataaaaagatcctttggatgttttatcgtttattttgtttggatcctttcatgttatagatgttagtcatcaagagatcaacattgcagatatgttttcttttcccttctcgctcgcagatgcctatggcaaaacacatagttggcttgtaatcatgagatagttaaacctagtgtgggactttccacgtaataaagagtttgtttggcattaaaagtagaaaatagaaaagggaagctaatgatatctctcaaaaagatcacaaatcaattggagattgaagacttggtgggcaaggccattgctctgtattaatttaggtggagaaaatgtgaacatatcagggttttatatcttctcattcagaacatccttattcatgtctttacttctcagccgcctctcgaggcttcgacttgggaaacctgcgtccgtgagatcctctgttctgattctctctaatggcttctcatcatcctcgctgcaaactcctccgtgttccatcatctgcgccaatccttgtggagcgggtctcggaaaactcgtgattttgaatgctaatgagagtgattacactgatttggaaaagaaggtgccgatggagttggtagatagtgatccaatggtgacgataggggcatctcatggctgggtagctactttgaaggaggacggaatattgcgtctccaagacgatctaaacccttatgcatcagatacaaaccctaaacgcatctctctgcctcctcttgtaactctgcctcgttgccaaactcaaatcgttaccaatgtgtcaatgtccttaccttctcctgaggatgaggactgtgttgtggctgtcaagttcttggggcctcaactcagcttttgcagaccggctaaaagcaactccgagtggaccaacatcaagatcgcaaaccctagcttcttctcctcacgtgtcatgttttctaagaaagatgagatgtttcgtattcctgggtctggaggccacctcatcggatcatgggatctccgcacagaggatcacaatcccaagattcagaggctgcgattccgaaaccttcccgagctgcctagggccaagcgggagcttctagattcgtgctacaggagtgaacatttggtggagtctcaatccactggtgaacttttcttggtaaagcggtacaagaaggccaccaccagagatacggtaaaaatgaaaacacaaggtgtaatggtgttcaagctagacgaaaaaggaaacgctgtgtacactcaagacattggagatctttgcatttttctctcaaagtctgaacctttttgttctagcagctccaggttccctaactacgttgatatatatgatgtcgacgaagtagcatttgcctgtctggagtatgatgaccctatcactggtgtaactagtacaaacagggcaccttaccatattccacctcaaaatatagactagttgttgtttgggatttagagtatgagtctagagtctgtttttttctcttaaaccttggaaacaccaaatctatttttttcagtgctctttgagaaaaaattcttttacctttgtgaagtaacttgtcgatgggttttctttttatggttcttcgtaatgatttaacgtctctgctgcagtatatattgttatctgaatataaaaaaacatattgagaaacatgaccactacagagatcttattaacaaccatgatttgctaaagaagaaaataagcgatttaccccatatttcatttctaccttttttcaagtttatggctgacattttaaaaataataatatattttagcattatgacatttatattcataaaaattgcgtttatgtttcttaatttaaaaaaaaattatattcctaatccaaacaaatatagaaaatataaacatatactatttcatgtgtataaaaaatatattttaaacttcttttcctccactaaaaataaaactaatcaaaaaatcaatatgatattataatggttgtttttttgccaaaacattgtgttataaatatacacaaacaataaaaatataaaaaaaaactttcgttataattttaagtgtaaattttccattcaattttaatttaaatatattatttcttttattttgacattctcttttgttatcaattactgtcagttttgatatataacttataaacaccgtttaccctgacacaattatattaatttaataaaaaatcaatgatattaggatttgtatatttagaacaattgaattagataaactaaaataagagtataacactaaaataatttgtttatataataagacgttcaaatatcttgaatattaatattttattccttcctcactaatcaataaacctaatttgttcggacacaaaacagttttatagttatgttttgtgtgagtccaataaataatatgcaacaaattttcatacaagtatatatgtaagtattaaaattagttatggctttcacataattaaattagttattgctttcacatgtttagaagtaagcaattcggggagttattagagtccgagtcttgagtctgtcttttatcttaaaccttagaaacatcaattctacgtctgaataaaatattccagaaagttcccttcaacgtgtatgtgagatgaatatacgccgtcgccgatgataatatcgtatcgtagtctcataggtacaccaatgccatatcttattgcgagggggattcattttgacgtggtcatgtgaaaggaccatgagaccttaaattagtaatgggcttatggctttcaacatttcattacctcacctacgagtttgggagtttccacgtcgtaatcttgtctcctttgaccataatattttacggatacgtcttaagaaacaaaaatgttaagagtttatttagcattaaaagtagaaaaccagaaaagggaagctaatgataggtcgagagaaaaatctcaaaaaaaagatcgtgtgtgaacacaattaattagaagatggaagacttggtgggcaaggccattcctctgtattaattttaggtggagaagatgtgaacatgtaagggttttgttgcttctcgctaagaacatcctaattcatgtctctgcttctcagccggctctcgaagattgcccttgggaaacctgcgtccgtaagatcttctcttgttcttattctctctaatggcttctcatcttccgcgctacaaacccatccttgtcgcatcatgactgctcgtccttgtggagaggatctcggaaaacttatgattatggagaatgctactgattgtaaagtcactcttttggaaaagaaggtacccatggagttggtgtatgtagatgaaattataacggtgggatcatctcatggatgggtagcttctttgaaggacgacggaatattgcgtctccaagacgatctaaatccatatgcatcgtatacagaccctaaacgcatctctctgcctccttttgtaactttgcctcgttgccaaacccaaattgttaccaacgtggccatgtcctcctcttgtcctgaggatgagaactgtgttgtggctgtcaaattcttgggtcctcaactcagcttttgcagaccggcacaaagtaactctgagtggaccaacatcaagatcgcaagccctagcttcttctcgtccgatgtcatgtattccaagaaagatgacatgtttcgtattcccggatctggaggccacctcatcggatcatgggatccccgcacagaggatcacaatcccaagattcagaggctgcgattccgaaaccttcccgagctacctagggccaagcgggagcttctggattcgtgttacaggagtgaacacttggtggagtcaagaaacaccggtgaaactttcttggtaaagcggtacaaaaaggccacgaccagagatacggtaaaaatgaaaacaaaaggtgtaatggtgttcaagctagacgaaaaagggaacgctgtttacactgaagacattggagatctttgcatttttctctcaaagtctaaacctttctgtgctagcagctccaggttccctaactgcgttgatatatgtgatgtcgacgaattagcaattgcgtctctgacgtttgactccatcaatggtgtaactcgtacaaacggggcaccttaccatattccacctcaaattatagtctagttgttgtttgggatttagagtttgagtctagagtctgttttttctcttaaaccttggaaacaccaaatctattatttcagttttctcatgaagtaacttgttgatgggttttctttttacggttcttcagaaggctttaacgtctctgctacagtttgttgttatctgaataaacgaaaagatattgagttcaaacctggatgcaagtcactatgcccaggaaacacgacagagttcaaaatcctttagtaacgtgtttgtgtgtaatagctttccaaagtgactttaatattcttcttacaaatatatgcttatttagtttcatagagactaaagatcaaaagtaacgcattggctattgatgggggaaaagagggtatatccactctcaccgtagtcactgtgtgaaaagactttcaaacatgtcttgctagttaagtcacatgcatattatatttgatgaatgaagacgaaaactgaatgaagtagaaaattctcacataacaattacaaaagttcactgaacttaatgctctatatatattggctcttaaaaattgcaaatcagcacattttgttatacattgaataataactctattgattcacatttaagttaaacagtaatacatagtcttttacccgtttttatcacattagtttaatacaggtagaaggaatatctcttctaaaattataatccacactcacatttgacatacatagcattaccatcattacaagaccgattacgtactacattttcaacttggactaatcgtgcttgcaatgttattgcaagtcatggaaagtgaatgtttgtctcactaaaatcgtcatgcttaacttaaatagaaaacttatgatttttttattaaatcgtcaagaccccaaaggccaaagcctatgatttattattaatggactatgttttatattaattcaaaggagattggagacagtcaattagtaagatatatgagtgattttttagatagagtatgtttgaaaataacaactttaagtttattttattcgccttagatattcctgaaaaatcagaaagcgtcaagactgaaagcttcattgccatgtaattcaagctaaataggccaagaaaacaaagctctaatatatcatttggatttttgagaaggaaaaaaaggatctaagctcgtctccaagccttgaggaaactcactgatgatggtgtatgtggaagtgtgacaagttattgactagttttatttttcttgtgcaccactctagttggagagagaacttagtaatcacatgtattttgccaaaatgtgttaattgtttaatttgatgggtggtttagtatatggaattgtaatagatctggctcttattgtgctgttgcaagcggagtatacaatatataatctaaaaacagatatataaacatttctaataaagacttgtacactctttttgtatcgatatctcttcaagagttatgttgcttgagaggtcgctagaaaaggaacaaaagagcaattaagcttctttacgggttgataaggatccatcatattagaactccatatagttaatatgcatttaccaatcttactataaagtgagctttgatcagtctttaaaatctctctctttcaaattgtttcatatagttagatgggaaattgaaactttagtaattaactaaaaattaaataagaaatgagattttagagcatgtccaatagttggcaccttagaagaagtccttcacattgtttaatactaaattttgataattttaaagtttagagttgttgaagagtccttacagtttttattgtctaattctctttaagtgagttttttaaaaataaaataaatttatttttaaaataatttattttataaaacttaataattattacagatatcaaatttctaaacacacattatgaaataaactcaaaaaaaaaaaaaaaaaaaaatacaaaaaaaaaacttgaataacgattagatttaagcttgaatagaaaaaaaaaaaaaatcacaattgcatgatctccgatttgtttatgattcacgtctccatgtgttatgtgtattgattatgtgggtatattattatgatctcgtatgttttgggtcacacctttagaaattcttttatggccgtttttggtattctctaatgaaaagccaaatataaagtcaacattttatatatagacattagacaaatagacagtatggcacagaactactgtgaggagctgccttaggcctttccatgtaaaggctaaccaagtaagttttcccttcaatttctctagatcacagaataaaatacatccgaatttacacaattcgaaatatctttaataatttggggtattcgttaacaatttgataaccaacattaagattgaagcataaaacaaaacaaaaccacgaaaattcacaaaacagcgtaatagttctaatggacatttggttgtcacatctctcttttaaatcatgaaccttagatctaaaagtaaaaataaattatataatgtgaaaaaaagatttaaaagctgtttttgtcttttatatatccatattgtttgaaagcactcgaaatcctttactaacgtgttggtactgtgtaatagcttttaaacattctgttcacaaattgacaaaatcaaaagcagtccacatctcatatactcagattggaggactaacacttgaaagtggtccattgatcatatagacactctcccagtgcaacaacgatggactgacttccgtattgttttctcatcattacgattattgttttctcatcattacgacagaaacttgaatcaaactaataaactaaaatcattaaaaagttttcaccttttcaccgtccaccggagcgtttcctcctccttattcagcaagtttgttcaccggagcctttcctcctctcttttcagcaagtttgttcaccggaacgttttttaggagatcttttgttcttgtttctctggaatgtagtccagcaagaacagtaatgtgctacgtcatagcttggagtttcttcttctcctttttttgtagagcttctctggctgcgtcagctttttctgtcgttttgagaggacttgttgacggcggcaccggtcccgaaaattgcaccaagaaggttaaacttaactacgtgaaaaagtacagagagaaactttttcgttggtttaaacatggtcggaaaattgagcgagaaacagagagaaagagaagtgagtgagagattaagatcatcctcaatagagagttataaatcaagactcttaacaatctttaatgaataaattttgaaatttttgcaaatttactttagttgctttagaaaaaatttatactagttttggatttcaaagtatggtggattttgtgagagagatttaatacatgaatcaatgagttgagaggtgaaagagatgaatataaagtaatcttacaactacaatagtatttgattattttttaagaaccccaaattaatatactaccattgatgatgtccaaaaattaaaatcttaaccaaacttttaactacaaaagtgacaaaaatgatcaagccgccaaatatctaaaagaaggtcaacaaaaagagatgatgagactcaacgatgtaaacaactacatttttctaaatgaatggattgaatgatgtcaattatcaacccaaatttttcaacttaatattttcaacccattcaacttaaaagaactatttgtaactttcatatattaaatatgttttaccatgatagatatttgatagtaaaaagccggaatacatacttttcataaccattcaataagtcggatgatttttgtacaaatttttgtgtgaacaaagtgaatgtatctacaatcagtaattacaatggacccaaatatgatccaatattagccaacttgtttttatgacccaactaagttacacaaaatagtccaaaaacacttttaacaaacattagccttaacctactttatgattctcgagatatgaatttagaaatattgaactaacaaaaaatattgaatttttgagatatgaaatattatacggtttacttcatatctcaaattccaaatctacaaaatcatatccactaacggtcataatcttcatatctttcacatgctttaaacatatatcattcaatccaattagacaattagtaaatgccttagtttgattaagtttaaagagacaaaattttgtttgagattatgggatcaatttaagcttgtgagagccatcaaaatagttgttatatatgattctacatcaaaaacggtcgtttaactgtctcttatctttttatcgtaacattctttatcgctaaacaaaaatgattcacgtcgacaatgttatttatgattttatgtcaaaaacgatcgtttattgtctcttatcttttgagcgcaacattctttatcgctaaacaaaaatgattcacgtcgacaatgtaatatgaagtcaagatagatcggtatcattgtatctgtatgtttgttgtttatttgagtaaatagaaagtagtcgtaaattggaaaggtaaccaaaaaaatttagtttcattagccacatttttttttgttctttgttttaatcaaatacgtgcaattgtttagttcttatttttacactaaaaaaatatttaaaatctcaccaatttacttttcaatttttttttaaaaacaatgttatgaaatttgaataacagtggatttgatatgatttttataaattcatgattgaataacatgaaagttgaaatgatttgaaatattttttcataaattcagttttaataacttgaaatttgagaaaatattttaaaatcactaattgaataacgggtgatttaacaaaaaaaaaaaacctaaattttccaaaatagttgttacattacagcccctaagtaaacggttcaagttcacatttacaaattgagataattaactaattatgggtccaattgactgatttggtttgttcacgtgaaaattgagagggttttatgcaaattacaataagtttggggtttttaaaaaatatttgaatctctcaatcctaaagtcgtatcgccggcgagacattcaaatcgactccggcaatatcacacactccctctccgatacagatttccggcaattacctggccctgagccataaatggcgtctcgagtgtttccctcgagctcgtgtggccattaccggtacgtgttatagacaaatcctgtaactatcctttaatctctcgagctttgtatatatagcgtttcgttgtttgttctattcctgtttgaatatgcgactgtaacaaaattcatgaaaattgagcttttgtatataaattcctactctatgttctgtcattgatctgtctcatttctcttggaatttgtactcttgttgttgttctgttgcctcttccagtagaataagcttgctggaatctgatgttgaagaagagccgctaagtattgtttgaaaccatcgagcagaagctttaggtatccttgtgagattgttcttgtagtcaacatagtagatcccaaaccggaccgtgtatcctgagttccattcccaattgtctagcaatgaccacacaaaatatcctcttacgtcgcattcatcattcctgcaaagtgaatgcgggaacatttcaaactcaagaatctttgtgaatctctgcaaagtgaagaactttaccttatggcagctgataagtttgagaggtaatctctgtggaagccaatcctcttgtcatcttttaatgctttttccatgtctatgaatggactgtttttctcatccatgcctgtgaatatctccatgttaaaaatttgattgatggttgtgagaatatacattttggtatttgagaatgcttaccgttttctgtgatgaatacaggtgggtttccatatatgtctttaacatacactgccagtttcctgattccccatgggacaatgtgtagccagcttgaccctgcctgtttcaagtaagttgtttctcatcaagtaaatttctttggagtgccagttaaggattagtcttctgtttctatcagagaaattacatactctttctcctatagctactcctccacgaaaagctataacaattaggaccatacattagcttaattcttttagttttgtagcggtaatgagaatgatatgagataaggtgttgtttcttacagcttgtaatcacggctgaatcagaagaagcatcttgtagaatcagtttccttatcctagttctgtcattcctcgcgtataatgtggtgtagtggttgattcccacgtaatcaaatgccccttttatggttttatacatctctggtgttatcttaggtagtctctcttccactagactcttcattgaagctggatagtctccattgattagaggatccataaacctattttttaaatctcattctgttactttggtcttttctctctgtagacttttctatgcaaattttcagataaagggatcttatatttaccatccaagcccaaaatccattgctctacgagctgcatctttgtcctcatcacaatcagacattggctcataccattttgcatctaatgatatcccgatttgaccacgttgtttctccttgcatatagaaaatttcccacattttattctgcacttagaatcataagattgttctgttttgttttcttaccttaaagtttctttggtaggtatggtaagcagcagcatgagacaacagaatgttatgagctacaatatacggttcgaccgatgacttccccttcttacagaaccaatgtcccagaagtgagcaccttcctggagcttgtatccctgtgtcatagccttggatcgataccccatgaggctcattgaaagtgatccagtacttcactctatctccaaatgctttgaaacaggtgaatgcataatgctcaaaatcatccctgcaccatttatttagctttttaatttcgtaataatctcaccatatcaggatttcacatttttatcaaaatatcatatactcacaccacttctctgcttagccatccttcatatctgtcttctaaggcttgtgggagatcccagtgatacaatgtcacataaggtttgattcctttggctaaaagagcatctattaggctgttatagtacttaactccatctgggtttacttcccctgttccatctgttaaaaccagagtttaaatagacccgtcgaaacgcacaacattactcatcatatcacagctgaatgaaatagacttactagggaatattcttgaccaagatatagagaatctgtaagcatccattctcagatctttcatcaggtctatgtcattctgtgatagcaacaaaacaaaagaaaggctcttgcttcttagattctctcatttgtgtcctgttgcgtcttatcttagatttgtttggatgaggttgctctgtcaagaagcaaccctacttttatcttcaagcttaagtcaacaaatttgtaattgttaggtaaaacttacgtgaaacctatgatattgatcaaccgtagtatccgcattgctgaaatccagtatctttcctgttgatcaagaacgataccattgagttaactaaaaccttcgtgatgttttctgggtttgtttctttgatacctggtttctccttcgtgaaagtgtcccatatgctttctcctttgtttccttctttcacagctccttcgaactgatttcttgcaagaaaatgttgcgattgtcaaaatcttcgttctttctttgttggatcagtttggagaagatgaagaagaagaagaatgtcacctggtaagctgaagaagctgttccgaatacaaatccatctggaaaatttgctctgctgatagattctgaagaaacgtgatcaagaggtacgaagaagacgacgaagaacggaaacagaactaagacgagtctcattaaagattccattttttgggtcgcatgaatagagaaagtgagagaaagagagagataaggggatggaattttatggtgaatgaaagatttggaggcaagaaaatggagttttggtgtgtgtgtgtttttaatttgtaaagttgaagaagaaagaggaagagtgcaaaacaaaagctcacgtcttttgaaggcttttctttggttttgacatttgttctctctacttttactgcacacgtttcttatacttgtgccaaaaactttttaaagttgtttactctcttaagataaaaaaaaagtttgttactgagtgacactgattcacctaactacctatgtcttttttttaaagatattcttcttgatagtcttgttatttgtaaccccaaattacatgataatcaaattaaattcatagattgaataatatattatgtactttattttgagatgagttaataaattaatatataaatataatgtgaacttttatgttagcatccatatccatttatatatgttattttttgtgtgtttacacttatcacaaaaaaaaaggggtgtattgaacttaggtaagattttgtggattttagattttgagagattttaaaagacgtctggtcatttggtggatttttagaagaatcaaaacaaattttaagtggccattaaaaaaataaaatggtcatttagtgaaattttatgtcaaatttcataaaatattgaagtattttgtgtgatagtccaaaaaacaatttggtaaccatttaaagactcataaacgtttctacgtgccaatgaaaaaaaatcgaaaattggagctgcacattggcgaattccattaattacgaatatcagaattgtaaagtttctatcactagtccatccattccgaaattttgaagtaatacaagggtatatccgtcattttatgtcagtattttttttttttaggtcatcttctcactctagtaaattactcgttttcgtatcaatcgattttgtttgttctctgcttttttggtttagggttttagcttttcaaagttaaaacctttttttcccgaagaagaatcaatacgactcaaatcaatcaattgaatctatggcgatggctatgagacttccagcgatatctagagctgtgacggaagtagcttcagctccggttggtttgagacgactgttctgttcaaatgcttcaaggttctcttttttgtctccacaagctgaatcccaaacaccggctcgtcctcaggctgaacctagcaccaatctcttcgtctccggtaacaaacccttttcatctctcaattcatttcgagggtttatcgttgttagagtctatgtctgtttctatttgatgctttttaaagatccttcctttttgaattcagatttagattatcaggttcgtctaacatcaactaagattgtactctatgtgtttaagaatttgataagttcaattattcatttttggttctgatttccagaaaaatgtctactttcgattgcttaactctaggaatgaactgtaagagttaaagagagtttctttgcactcaattacttgagaattcggttttttcggttaaaatttggatgctatgtgtaccggatcagtgtcttgtttcaagggtctatgtgggctgtttctaacatcttcaaggcttctgtttttgtaaagtgcttcctagtatcaattagtttttgaaatactgctcaacattgggctttgatgcaagcaattttgattaggctattacttattgttccttcatagcctctgtttctcacttttatcacatggccattgaacatctcatacatacatctaaggaattttatgtgttcgatgctgtgtctcagtttcgtgaaagtgtcttcttctcatgttatctttatctttgtgtcactgaatatttcagggcttagtaagcgcaccacttctgaaggactaaggactgcttttgctcagtttggagaagttgctgatggtgcgtatcttataacgacactataaagtttatgcgcagtaaactagtcatcgtgaagaaaactaactgttatgattcctttctcttctattggttttgtagctaaggttgtcacagacagagtatcaggatattccaaagggtttggatttgttagatatgccactttagaagattctgccaaaggcatagctggaatggacgggaaggtactattcattctaatatccatttctcgattaccatatcataatctattaagagagatttacactgacaattaccaaacggctaatctcctctctgtgcttctctgcagtttcttgacggttgggtcatattcgcagagtatgcaagaccgagagagcaatcacagtcatatcaacctcagaacaacatgtctcgtcctccatactatggtaaccgctagagaaacagttttcttcggttcttatgaatcttttatattcatatttatgcttcattctatcctcttctatgatcgaactgtgttgtgcttcgtctcgtgttattacctttagaagattaaaaacttcaaattatattttgaaggaataatcagaaactgtcatttacaaaaccaaagtattaagtgtaatagttttttaagaggaagaggattttgcttacatggttaactcggaaatacttaaaacgtcatcgttttgttgtttgtgatttaattgattggaccggtatgtaatgagattgatcgggttctgagaaattcagatccggttttagtgttgttgatttttggtcgactttaaaatctttcagtatatatgcttcgagttttgttttgctacgatttcattttgtgaaccaaaattttttaggcaccaccaatctagatgatcattttcaaaaacccaatgggtccgtagccattagccaatcaataactcacaattttcgtttagatgcaactacttaacattaaaagtgatgattataacaaatgggaataagtcattgggccacagcattgagttctcacaatttcacgtggagctgtctagaatctctacgaacatttttgtatactacaacatgtggaccgaacaaaaacaaaaagaaatatcatcccaaatactaatggcttacataaatttatgcactaaatgttataaagacaaaaaaggaaacaaaacatacaaagagataccgttcatacaataacattccttcgctgtccaattacgtttggtgagacaattccctctttctcatgcaaccagatttgtatttcacaactcatcatattactccaaaatcataacggtacccatttttggagtgttcttagcttataatggtaatagtgataggttttgttgttttgattgtgatctataatccttagacgcaatgaaaagttagttgtaattacaaatgtcgaccgcaacgtgtacaaatgtttcttgtttccaagtttgtggagtgggcacaagtcaaacttaactgcataaactaatcaaatggtaatgtttctaatcggataacgtttctgattaagttcttttcgatggacgattcttgttatttctcattcgattcgatcgtgtgggttaggtttatagattcaaatcaatcaatcttccatcaatatattttatgatgacccatgacacctagcaagtagcaacataacaaactgattaatatcattactaatatataaactataaactataaagtcgtggtattaatgagaaaatgagggcatgaatatttttattgttttaaattagtaaaaacaaaatttaacaagatgactcagtggcggacctacgttacaactaggtggagcacgtgccccatattaaatctactaaatattatataagttgttatttttcattatattacagttagctcaaatggtttttcggcaagcaatgccttatactaacccaagttcgaatctccaaaccgtcacttttgtaagaatattttataatctacatacaatttaggtaattaaattataattaatactatttatataaatgatgccccacataaaattaccttctagatccgctcctgagatgactcatcgtcgtttttgttgcgccgcatgagtgattactttcaaatgtgaaagcattttagatgagtcgttctctacggttgaattatggttttaaaatgaagctgtttaattacacgtttcatgaattaagtttggaccgtttcattttttatatcgttaggagatatgagcctgatctgatctatatttaatatagttcttatctacatgagtttctattatagttcttcctacattcatttattataaggttttctcattgccacgtataatataagcacatgcagatataagtaacatcatatcattttacgtacttagaaaataaaaacaatatggaagttagtcccaaaaggaaaaaatgatagtgatattgattttagatagtaatattataactatgtctatatagttcactcaatatccgattcattaagattgataagccaccatgtaacaaaaggataaattgggttatttgtctatacgctaaaccgatccaaaccaaattagagagaatagacagataacccaatttttcttttccaaatccaaatctgaagaaaaataaagatttaatttttttattatacatgtatttgaccatctaatgatgtaaagcagatgaatcaaagtgaaaaacatgaacgaccatcataatttcataggtgacaaaacttattcatttatgagccacacaaaaaaaaagaagaagtagaaatatatgtcgtcgacaaatattaataagtggtccaagaaaatagggttatcaataaaaacattttgtatacgaagaatacaagttccagttacggaaacaaaagtgattcacgtcgacataatgtcatatgattctgcgtcaaaaacgatcgtttaattgtctctttatctgtttatcgcaactttttaatcatttcattatgaatccttttgcatttcgttgcttgctcccgtataaccaatcggattctttatatgatttattaaaaataattgcatttggaaactaatataatcaccaaaacaatcaataaccaatccttgtctggtcctattttaaaccggagttggttattgactgtttctaggtaaactaactccggtttaaaataagaccaaccaaaggaggtttcgtaataatgtaacaaatcatgtccacgtaaacaagtgagtcacaacgtcaagattctcgatgtccttctataaattgcctctgttccataaagagaatcaccactcaaatctcttcaccttggcaccatctataaatatcctcaaacattagcctctttaagaaatcaattccaaccttttaaagattaatcttgaaaagtttctaataaaaggaagagaagtgatcaggtgtggtgacgagtaggatatgaaattcttgttggaactcgtcgtgccttgttttggttcacaacagttccaagaatccgccgcaagtactgcggatgattcggtttctgacgaaacacaaacgctgatgaaacaacggaggcgacggaaacgcgttagagtggctggtcaacctggacaagtggcagagtggagaccgtctcttagcgttatctccgagaacaagccggcgataacgaagatatcagaaaagaacgaagaaaagaagaaagtccgtcggaaaagtgaaggcaacggcggcggagacgcatcatcacggtccggtggtggtcatattcgtttccgtagtgacgatttcgggtaatttatatgatacgtttgtgttaattaaggttagggttatagggtagtcaattaaaaattttcttttttacaaagcttaataatatgtttagtatctagttgtagtattaaaaaattattctaacctcgtcaatgtaatttataaagataagtatggagactatgaaaaataagaagaagataatgatatggtagttaagatgcaattttgtggataaagattcgatatagttgagaagtcaacatcagtatgtcttattgtttatttgcgtaaatagaagaagacgtaaatcgcaaggtaaccgtaatagtgaaaattgatgtttacaaaatggcagaagaacatgtagctagtggcttatatatataacgcatactaatgtttttgacgtttttaaaattgttttttgggttttgcaggagaaatgctttcgaaccggtgattccggcattctcgccgactccgttcatgttttgagtttaagtttctggtgaagtttatgtgtataatatattgataaatatgttattgttaatggaaagatgtagcattaatgtatatacttctttgattttactaccactgaaaacttatgcttatgcaaaactctcaaacgaacatagtttgggctatgcaacacgtagagtaccatttataccaatatggcaatatgactaagttatgtcacagtactgaatcaacggaacatacagtttaaatagatatcgaatgccaacttattttcaattcttggaaataaagaataaacttgcagaaaatgacgatttacaaacaaattattgtattacgactcgtaatttacgaggaaaagagtaacacgacttattctttgtttcaaatatcaatcactacaaatatttacaaagttgttaaggaaaaaaaatcattaactggcaaactagccaatttagaaaatcgtttttccaaatttataatatttgcaagctagccttacaatgtttggtaataacgaaaatctcgcatccaatattttaattaggtagtgttaatatataaatttggctatttaatgaatgtaatgtatgatttaaagaaactcatttaagtccggaaattttgttttatttagttatcattatattgattttgaatagtccgttcaaaattttggtttatttgcaaacatgtcagattttcgaaacatattgacatgtacaaacttattgatttgaatgtggttgatttatgtgtttattctccatccaaatctttgttcgactttgaattttgaaagtgtattgtgagtgtcacagttcgtttctatagtgaattattttatatagccgtattatgggcacgactaacagcaaaaggcccatttaattattttggtgagttccttattcgacgtcaatccagaagaaccaaatagactatatacttattattaggtttgcatgatcaaagaaaagacttgtaccttaattttctcaaattctaataccctaatatattactacttactagtgtactaaagaagtcgctaacgcgtttttttgtatctttaatcacattctcacatgttggcttatcttttttttccttcgtaatcaataaatctccaaatatataaatgcaacacatacgaacgactatgtattctatacatggagtggagacatgagaacgtggggttgtaccgtgcacgtggagaggacatgtcttgcttaatgattatgcgaccatggaacaagtaaactttgaacttggggaatatttgctctcaagttatcaaattcatcttttttccctccaaaatcccaaatataatttaagatatcttttcttcttttaatttccctttctattctcatgaaaataacatataattaatctacgcaaagaaacattaaaatctcgataaaataacaatatccgattaatgtatacatataaattatctctctcacacatgttgttacatataaggcggtcaaatacaataacatggaggatcttcacgtgttctcttggttgtcttggcttggcttaagccactctgtataatctaagaagtgaattgtaatgtttttttctttcaattctttaacctctactgcatttgatatttcgtaaattttaatcctaaagagaaatatagttgaaaaaacaactttacacgacgttgttttccgatgaactttactcattaacaaatttaaaaacatgttatttgttttgccttcatcaagtggattgtaaaatgaacaattcaactagttattgcttatagttgttttgttagcataaaaacatagcagctagttcaactcttaaaatataaaaaatagtattattgaagtgtaagcagaattaagtgtcgttttacgtcaatcatttgtgtgccaaattgtttcgttccgtgcgctggtggtgaatatttttgtccaagtatttagaattacttgcggcagtaatcccgggattttatcttcgttttatcttcattttagtgcacacaacgtaagcaatattttactaaattttcgaattagtgttaatcatcgcttaaatcaataaatgtctagaaccatgtcagtagatttaaaacaagttaaacatactcaaagttgatttcacgaaactgttagaatggtgtggataattcggcaataaattcatgtcatctcgaattaatttcattgtcttattttgtctatagcagttactttttgtttgaaaattttatcttatacttattaggttcatttatttggatgaaaattagctccaactaataatcttgatgaatgtgacattaggtaagttaggtgtatatatgtaactgcttactactagttatagacttatagttccacatcttatcttatcaatctcaactaataactaatctccaaactctcaaatgataagatgaatttgatatgtggataacataatctgtatcatcatcaatctgtaaaataattactccattgaattgttttataatactcgagggtataccaaaagtacaaagaccgcgatacaggtaatcaaaccctggaaaattcgtcgcggaaaaccaaaaggtcagactaataagaatgtacgatctaaaaagaataaattcatccaatcatattaagcatagtcatattcgtggggtccattattcacacgacaccaacacaaatttatatttctcctttatataatttttatttatttatatggaaatacacctttctattttacttatctgatatctgaactaccacttttcttttttttttacatttctttcacattaatataatcatatttagtcaatagtcaaaaactcaaaattagtagaaaaatgatttattttattaccatgagcttgttactcttttctatataaagacacaatttattgtaatatagagtatagtacataaaaattaaaattatgtaatcaattgttaacataaaatcatcacacaatctaattatagtaggagtagtaacgtaaatttaattaaacaaccaattaaagaaaagaagaaaaatgaaaaaagaagctttccgtttcattgttttagcttttaattttgaataagaagttgttacatttgtaaaaacaaattttatatttaacttttaacttttttttattctaacacattacaacataaataaaataaaaaagataatttttgcttgaagtagaacctctctctcagtctctttctcactattctttggattcttttctctgtaatcaaagcaaagctctgcaaaaatatttctctccttttctcttcaaaactttccttttttatgattcatctgctaaaatgcaccaattttctataatccttcacatttctccaggtaacacattcgattcacctgttttttttttttttttggtcttcagcgattttttgttgtcgttattgtgtgtagtaggtgtgattttttttcttttcttcctggggatttttgttgttttcgttgagaaagtcttctttgggggtttggttgcgctgaaggaagaagaagaagacgaaataatggaaaattaaacaacgaaaattagggaaaattagagaattaagaaaggttttattcaatcggcgcgtttcaaaagtctacgcgattctcgagattcattttcaaatccttcttcctcgggatctatagtatagagcttcagtaattttgtcctcttgaggtatttgtttgaagaagatacgaattgatttttagctgaatgaatccattttggcagccaagcttttgttgaagagttcgatggtcaacgttacgctaatttcttatttgacaaattagttgttgtcttcctcttcttctgacattgtgccatttaacaaatacttcttctctgatccattattgtttttttgtttgcagagacgtctaaagaagcttgaaaccattattagagtatttgacaatggaaggagaatccaaaggattaatcgttgggatctcactaggtttggtgattggtgttgtcttagctatctcagctttgttctgctttaggtatcatagaaaaaagtctcagattgtgaatagtggatcacgaagaagtgcaaccattcccatcagagagaatggagctgattcgtgtaatataatgtcggattcgaccattggtccggattcacctgtgaaatcttctaagaatgggaggtctgtttggcttgaagggtttagtaagaggagtaatgtcatctctgcttctggcattttggaatattcttacaggtttgtctcttcctctgacaaatcttagtttcctgattaggttattattttattgtcttaactatactcaggactagacttctcttgttatagtagttactttggttattatttcaaagtttgaaagttcattaaaaaggggaatgctgttgtggatatgagaaggtcttgcattcttggggttatattccgtttttgacatatggtctttggtgattgcttcagggatttgcagaaagcgacgtgtaatttcacgactttgataggccaaggagcatttggacctgtctacaaagctcaaatgtctactggtgagatcgtggctgtgaaagttctagccactgattctaaacagggcgaaaaagagtttcagacagaggtaagatatatctatggattcatttccgaagaacaagttagtgtgtaaaacatgtagcattaggcagacttttaagcattacaataggctttctgaaatctctaatactcaatttattagttgtgtcatctataagacaggctacatgaatgaacaatctatatatcttactctcttagtatctgcttagtttcttgaaaaactcatccactcgccttaatcttttcaggttatgttattgggaaggttgcatcaccgtaacctagtgaacttgattggatactgtgcagagaaaggccaacacatgcttatatatgtttacatgagtaaaggaagcttagcttctcatttatacagtaagtaactacctggttatacataccatattaatctgcttgtcactaaatgaactgttaatgcaatgttgagctattcggtatctttgtagaacatttattgagttgatggtttagacttcactaaatgatgagccttggtaaagatttgagatgcactaaaatggtacttttgatacaggcgaaaaacatgaaccgctgagctgggatttgagagtatatattgctttagacgtggcacgtggtctagagtatcttcatgatggggtaagctgcttgctaaaaccattcaccattttaatgcatctcttaaacaacaacttcaaaactcatgttctaatcaattgttccaggctgttcctcctgtaatccacagagatatcaaatcttccaacatcttgctggatcaatctatgagagctcgggtaaacatatcttctttctctttgaaatctcagtctattgaaccacctcaagtttctaatggtgatcttctttaacttcaggttgctgactttggcctctccagagaagaaatggtagacaaacatgcagctaacatcagaggaacatttggctacctcgatcccgaatacatttcaacaagaacattcaccaagaaaagcgatgtctatggcttcggagttttgcttttcgagcttatagcaggaagaaatcctcaacaaggtctaatggaattggttgagctggtaacataaaactaaaaagtcctcgaaatctccaattgttttgtttggagaattgcatgtaaagactaaacgttttgttgttgttgatgaacaggcggctatgaatgcagaggaaaaagtcggatgggaagagatagtagattcaagattagatgggagatatgatttacaagaagtgaatgaagtagcagcttttgcttacaaatgcatctctcgtgcacctagaaaacgtcctaacatgagggacattgttcaggttttgactcgtgttattaaagtgagacattgcagaaagcggcagaagaattctccgtcgccgtctccacggcttcctcctcctcctccgatagtggaggagtcagaaggtgagttaactgcaaacggatcattacgatcagaaattcatcggagggataattccttggacagtagtatagctgaagacgtgattttgtaaacaaaatgaaaaaaaagtctcaatttttttaattattattaacttttaaaatgtgattttgtttttcaattcttttgggtttttagacgctagattgtctatatttgtgaatgaaaatttgttctttgttttttcgtgttaaaacgagttcaaaactggagaaccatattatatatttgggctatgaaaagaattgaattcaaggcccaattaaaacctagcctagcccattaaggtttagtgataatacagtgtcgtttaatcgtttatccaatttttatcgtcatctgtggaacggataggacgaaggaaaaagaagaagagtgaaagttgcagagcgagaaaaaatggcaaccatgtctgctcttcagagctcttttacttctctttctctatctcccagctcttccttcctcggccagcgtttaatttccccgatttccctctccgtcacttctccggtaactttaattttcgatttctggtcaattcaggtttttaatcattgttcaagcttttaggttatgtagttcacttgtttgcgtaatagattaggttcatgtcttcgcttttcatatccaaacccatttcatcaagtaactctcaaattgaatctgtgttgttgctcattttaagtttgaattttgcttactgggatataaaattttgtgcattgtctatgtttaagtgtaactactgaattgagatgaaagttatgaggacttaaaacgtcatcctttagactgattgactagttattggtttggaatcaatggactagtacttgtaaatgctatactttttaaacgaacgaaaatgtgcgtgtgatggctcacattgagtaaagtggctatcttgttcatttggttgtgattttttgcattttcttatgaaatgcaaaatagctgcaataggatatggtttctttgttactctgctgattattttatactcattgcaggtcaagcccgctgagaacccatgtcttgttcttgcaaaggttagtccacagatccattacattaacattctgcattattcgttaatatactagctttgaaaccacaataattctttagattttgtacacatcaaaagcaaaaaggaaaactgttgatagattcttttgaaacaatgagattggaagatgatttatgtgttttgcgttttcagctcaagcgttgggaacgaaaagaatgcaaaccaaacagtcttccgattctccacaaaatgcatgtcaagtttggagatacagtcaaagtaatatctggacgcgacaagggtaaaatcggagaggttactaagattttcactcacaacagtaccattgtgatcaaagatgtgaacctcaaaacaaaacacatgaagagccgagaagagggagagcctggtcaaattgtcaaggtcagaaatcatagttttgtagctttcctttactttgcaagattggagtgatgattgaagattgtgcgaaatgtattatgctttccagatagaagcacctatccacagctcaaatgtgatgttgtattcaaaagaaaaagacgtagtaagccgggtgggtcacaaggtacttgaagatggacagaaggtaagatatctgatcaaaacaggggaactcatcgacaccattgagaagtggaagctacttaaggaggctaaggataaggaaaccacccaagttgcagttacctccgcatcttagcgtctcatttctttcttcttcagtgcacttttgatataatagacctatgcattggatggatgtattgaatcccttttaaggtaaattataatatttctgctcccctcatgaacacctcttagcatgatttaacatattaatcgaactaaagccgggtactcttgagtcttgtctatatcaatattgatcgttattgacaatgttagaccggcctatcaaataaactgaaccaaaaactaaacatattaatgactccgccataaccttaagcacctacagtaatttattcaaaagatacaatctttaaaatgagtgcacgttacaaagttaaagcaaacaaagtttcgagggaacaaagtgcaaacgcttcaaaatggttaaaccatgttcttgaagttgtcagaaatcaggtcgcttttgggtttgcgtaccttcatctgcgtacaccgtttccactttacatataataccagtagatacacgaggaataagcccccttcatatatgatgaggaagaagaatgagagaccatgcatcatgtacatcaaaaggaaataagagaagacgaggggcaccgtaataatgaaataccaccactcatatgctctgccaactggtaagagaataaatgaaaataggatagctatggaaaacgctaccgtattgcatccccatagttggaattccgaaaacctcataccattctttttaactttatctagtttttctttgtctagcagttgggctgcagtctgaaaagtggctgagattatcaaagctgctattactagaagagcgttacgtgatccgtctgatatgcgactcctgtaacgtgcaattcgcgtcttgcaatgttccttgaaagtgaccggttccctcaggaagatataccattcctgaattccggatagagagcctccggtcttaccaccggacatttgtatgatttcctctatttctttgttcatgtgagatcctctggctcgtaagacatcaagggccgtcatgccacttttgttctggatgttccggtccagtgacaggcattttaccagctgttttactacctgaataataacataaattattcaaagaggatgtgagtttaatgatgttaagacttaagaatgacataaatgagtgtttggtctaacaacttcttggtcaatttaatttctgatagtatgtggttatattgaattacatattcacatcccaaatatactagcgtataattaaagagaacacggatcaaccatttaaacatcttatggacgataaaacaaaaaagttcaaaccaaatttgaatgactgactttaaaagacaaaaaaaataaaagagaaagtacataccttgtcattgttctcgtatgcagctaggtgcaaaaccgtgttgcctccacgatcacgtctgtttaggacgtcgatgaacacatcatcactatcgcgcattttctgcatccaccctgtgagaactttgagctgctcgtatttatcgttcataatcgtgatgtgtaaaatcgtttctccatttacattcacatctttaatgctttcaggacatgctaggagaaaatctgtaagaaggtctacgtcacctttctttgccacaagatgcaatggtgtcatacctgtcgtcattataaccatataaaaagtctctagcttatcaagtaactttatattatatgtttcaaataaattctgttaaagattttgaaacttatattacaaaaaaaaaaaatgatttttgaagaagctatacctcctctaccacgaatacgaacaagactgggatcaaccttgactagctctagtgctaactcaacctggtcgttttcgacagcgagatgcaacggacttaacccatactcgttaagttttttggcaaaagatggctttagaatcatcagttccattgccaaatctaacttcccagcagatgacgcttcatggagaggtgtgtggatgataggtaaaacgtcaactttttgaagaatatcgggagccgcttgaataagagaatataaatcatcaacactacccgattgagtaaccaaaagcaattttgaatccatacttacaaagaaagaaaaataattgtaaggaccaagaaactagtgtcgttatatttaacatatgggagcatagttattttgtagtatttttcatttctgagtagtgagtctattgactattgacttaattggcaccacttaaattggtcactcgagtggttgccaaaaaaactggaaagaagaactaaaaagcttctcacctaatgcagaataagtaaatcaacgcttggctaggatacaaaaaagtggtaatagtatcatttaggttatgttcttttcctcatctagaatttgcatccaaatcgatgatttgttattttgactgaatcatctatctaaatgaattcgaaaaattgacctaatctttaaaactcatgaatgatgctcaattttgcatatacacgtaaatcagtttgcagcttcatccaaatgaattatctgaatgagcaaacgaacagcggaacatggcctaactctaatggaagaagaaatataatataaggaaatttaggggtccttagatcatctgtaatcctcttgatatcctgcctttctcttgcatcatttctgacttataactttcctccatgagacatttttctgttgaaatgttagcacgttaggacttttctaaaggcgccagaaaatccattatgttgcaggccaaaatttgtctcgtttttttctcccatgcgattgttggatgaatactaaattgtagataatgataagatttgaatacagtttctataacaaccttatcgatttcctttttttctttttgaaacaatcagttcacgaatcagatataaatcaataattcaaccagagccaatgagtcttattctccactaatagccaatgtgagattcaattctgagtagtgactaatgagtctattgacttaattagcaccaattaaattggtaacgaattaaaggctgtttctcatctattgcagaataagtaaatcaacgctaggatacataaatgttgtcttggactgttagtgaggcccagcggcggatacatgttatgttctagagtgacatatttgtcacttatggtgtttctagaattcaaaaaaaaaataaaaaaaaaatcatataatttagattgaatttgaccccaaaagactaaaaaaaaccaacttacagattagtttacaatatgaaagagtactcaaaaacattggaatatgtttgtacaaagcgtattaacaaacttacaatcaaacatgaataatgctcccaacatcctgtgaaggtcgatcattggcttaggtcatagacgtgaagccttcaaaagtcagctcactttttggttctggtaccttctcctgcttagccctcttccatcccacgtatagtacaaatacatagattagaaatccgagtataaatgccatcatcaagtataaaggcatacataatatcgggaattgtatatacttgagaaacatggaaagtgcgtaagaacaaacgagaggcaccgaaataaagatgtaccaccaattatatgctttaccaacaggtaagagtataaatgtcaaggcaatagccaagcaaaatgctatagtattgaatccccacacaaacaacacatttatcatgatatttcccgtgtaatatatttcatctttatcttgcggttggacggcagtttgatatgtagctgtgataatcagagctgttattactagaagggcatttcgtgttccgtcggacatgcggttcttatagcgagtcattgtcgtggagcaatattctacaaaagttatgggcgatctcaagaagacagatgcggtcttaacttttgatagagaaaccccgctcttaccccctgagtgtcgaattattttctctgtttttatgttcatgtgagatccattagtacgtaaaatatcaagggctgtcataccacctttgttttggatgtcccggttcagcgatatgcattttaatagttctttgactacctgtagaagcttcacgacaaccattcattagaaaatcctataacacataaatggccttgagaagattaattagagtattatattttttatgactttttttattaacctatatctttgcatacttttggtttttttatcttcttcttaatataagattcaaaaatttgaagaaccattaaacgatgaatatcgaattgtaaagacgggtaagaacatgccttatgattattcttataagccgcaagatgcaagatcgtgttgccatcacgatcacgtttgttcaagacatgaatctcagtagatgcagcatcgcttttgtgcaatctatgtatccatcctgtgagcactttgagctcttcgtatctatcattcatcaccgcaatatgtagagcagtctcgccattcacgttcgtgtctttgatgctctcaggacaagccagtaagaactcagtaagaaggttggcatcgcccttttttactacaagatgtagtggtgtcatgcctgtatagttatgtgattaaaaaaaagaaatttgacatcatcaaactttatattatatgttataaagatatggaatttaagttcttttatagaatcccctacaacatagatgcatcgacttttctcctgctatagcgcatcaacataaaaacaaatattttcagtttggaaaaatatcgaggtaagatatttgtatattaagaaagggatatatatatatatgaactagaatatttcattttgaaaacatggtattttagttttccttatcaaagattaaatcacttgaaaagtctaaaagcaaacagtaattttttaactattgtttgataagaaaaagacatatatatcaaatattaacacaagcacaacattaaaacatttaaacatataaacacgaagacaaacataataacaatcaaagttctgattgacctactaattaagaaaccaagaacgaagcaaataataccttttctcccagcaacaagaacgagatcaggattaatcttgactagttctagtgctaactgaacttggtggttttcgacagcgagatgcaaaggactaaccccatccgagtttagttttttggcaaaagttggttttaaaaccatcagttccatcgccaaatctgtctttccggttgatgaagcttcatggagaggtgtgtggacgaaaggtaaaacatcaatgttttgtaaaatatatggatccttgtgaattagagcatataaagcatcaacgttacccgaatcagtaacccaaagtaaccttcgatccatatagctacaaagaaagaaaactgattccaaagaacagtttcaacaatgaacaaattgaaatattgtcgtcggtatataaattaaaggagaatattaagaaaattatatactactagttttaccgagtattgacttaatcaatcaatacaattggttagtcagaatgttgctaggcaaaacgacgaggacaacttttagtaatggaagaataagtgtactttattatacaaacagttgacttagattttatctaatcaaaatagtttatgttttataggagatagtgcttattgcttaatgatcaatgtttcaaaattaaaactgcaattagatttagttgcaattagcttttaaaccaaaaaaaaatgtaattagctttagtttgcatctatatgcgtgtgtaaaaagatgtcttcgctcccagttacgaagaaaatatatctgaaagagtaactaaaacattacatcacacatcatcttttacagtaataaaattatttttgagcttgtgtcatattgctctgaatccttaataatattttaaattttctataaattagttattgaaaacaaatatctgtatatcagtgatcaattatcggtatttcttcataaaaaaaaaaaaaactgattaggaacacttggatattagttgtagatcacataattaacgtcacatatttaatcatcatttcaaatattttaccatcgtatatttcacatactttgagcgtagtatataaacttgttagaagtggattacgtttccgtcattatataaaaggatccgaatatgacgacatagatttttgtcgagtgtttctgaccaaaagaaaaaaatattgttgtcgactgaaaaatcaaaatcaaaattaattctctttgagatgtcatgtggtatgatcccaacgttacttaggttgaagcagatacactgtccatatcaggcctcgttgtcattcattccaatatttacaatatattcataccccttttataatattaaaactagagaaaatggatatccaaattttattgttttatccatgattttaatttgttctgcctcaattaacacatttacaattcatcttcaatccaaagttaataggaatatacgctattcatgtatttcccctaaattttgacatatttatttacattgtgcactaccaatttgcaaatttcattcccatatactatccgcgatgaatcaaaatgtatgtcacacatattagttgtatttattattgtcagcaaaaaaaaacatactagttgttagttaactgttaatgaatcaaaatgaatatcatattattttgccctgcacatatctatatagaaaactatatataattacatataagtatataattatccactatatatttattttcagagttcaaaatttcaagatttgaaacttcggcttataattgggctcacagattcagatttttctcattttctcagaggataattatgagtgggtggcttttgcagatagaaatatttaaagctccaaataaatatttgcatgggatagaattttgtcgtcacctttgacgtaagctttgtctcgctaccattatgaatccaatggaccattttactttattcgttttaacaaaatgcctaattatcatcaatgttattttttgttcttatgtgccatgccttttatataaaactatcttgtacataatccaggactaaaaggggatagttccaaaatatttgaaggaaaataaaaacgaatattttcttacagaacagtatttgaaaaaaaaatagtacatgaaacaatgaaacatcactatttacgtatagtagtatttttaataatctttattattaacaatgtactattttgaaactgatagtaaatatgtatattctaaacagtgccttctattgtttatatgaacattgtttacgttacttcgtaaaaacattgttcacaaatcacaattaattattaaattttttgaaacaacattccataaatttttcatgtcatagctgatttttttaaaaatgtttagtttcattagtattctataaaatgaagaaaaaaaatgcaaactgtagtataaaatataacaagtccccaacgaggcattcattagtcattcatttgtattgttctatatccgaatttgtaatcgtatcattgtacttctttgatgtttcgtcgttgaaaaaaaaaaatgaaggagaaaagaatttcttgttccctttctttctcaataacgttttattactggatgaaatttggcatttagtagcacttttaccaacagggccacccgtgaaactaaattctcactctgagaaacttcgacatctatctttaaccattgatttcacatcaatttaatacactaacatacaaatttaatctacaacataatatgaacaatttttatttttttgtttgtctctctacgtaagagagttttcttgctgttaaaattctaagtataatggttaatcagaactaaacttgacaaaaaagaattggtaaaccttatcaaaccgtagacttgtaaaaaataagctaaaagacacactttttagtgaagaaaatttaagttgatcatgaaaatgtggaagaaattttatttacatttttgttcctttttttatcatcgatattgtggaatggcttaaacaaaatgacaactctacaaataaatcgattcattccaccattaccatttcaaaaaaaaatggcaaaaaaaattgaaataagtaaaatctagatatcaattatctattgatttcaattctcattatacgatacataaatttatcaacaaaagaaaattcaatctttttccccaacatgctaaatgttttagggcttgcaaatgaccacaaagcaaggaagcaaagctttaggattaagcaaataaagctcctccacatttgtatacaaaccaactttgccagccaaagaatcaaacccactcatcaacccattcatctcctccacattctccaccggccgatgaactcttccggcgataaccctacacacaatcaacactttcctcaccgtccgatcaacatctccactctcatctccaccgttaaccaaaatcgactcgaacgctcttccactagtagacgccgtgaaaacaccaaccccattattcttctcccgtttcgacgagaacccgtttcgtataatccgacagacacaacatttctccgccgtgcaaacacttgttgacccgtttatacctaaaccacaagccacggtggttccgtggaacctaagtagctcgttaccgtctgcgagacatcttggatgcttcttctgaagtttgcttgctctgattttaactgtttctctgtattcctcgaatctagctaatgtcttctgcatgttgtgtacttttaaaactctatcgattcttccacattggttctctgactttaaccagcttgttctgcagattatctccactatttttcttgatgaatctccttctacaagctccgttactgcaatttagatgaaagttatataaatttgagaaactttgaatcaaactgcataatcaaaatcggaaatttagagtaaatgttgttaaagtttaacattttagctttgaattgttaattgcaaaactctgtttttttcaagactctgtttttttctttataaaagttgcgatttttataacctaacttttgttactatgaagcctaaattgcataatttgttaaatttacttaccggcatgtttagagagatgatgagcttcagcagcttcaagcttattgaactgttcaccacatttatgacaagaaacagaggaattgttgcctccattaatggtggattctctgttcatctccaatgaaacccttctgtttgtatgaaaccctaacccttctcctcctcctcctcctcctcgatctctctccgacaaagcaaacgaaccctttcttgtttggctcctgtaagaagctgaatggttaagataatgcatcggtgttcctggtctaagcatccctacataagtcgtagaccgaccatttcctccaccgccacctccgccggaatccgctgctccgacaggtgaagccatgtctccgacaccagtgatcttaagctcacaagttgagttactaagaataacttcatgagttataggatttagaaactcattgcttccaatagaacgaggactacttattggtggtttctcgaaatgtcttttgcttccatggattacgtctttgagatttgctattgatcttgaacatcctgataaaccaccaccgcatacggcggctccgccggatgatatgccggagattttcttggtggagattgtggagaggtgttgttgctgtttagtggtggatattgggtcgtggacatcagatggttcggatttacagtggagggatttcttgagtgagaaccaaacagttgggatgttgttcttgcttttgttcttcttcttcttttggctttttttgcttgaatcttccattgttgttgtcgatatctctctctttctttctctctatcttcttcttctgaatatttttggaagtgatgctataataaatataaattaaatattgtcgccggatgataggtaataataagtggattttgtcttatgagatatattaaaaaaccaagtttcttttctttctagaaggcatgtacgagcaaatgaatctgaaggaggtctacgatgtctcaactcaccgatgtaataagtaataacacgagagaatgtttctttcacttactgttttgccattcttaaaagtgtaaaaactgaaaagacttcacaacatgttcataaatcatgaaatagtaatttatagactagtccatatttacgaattatcacattaactgaatattggaatctttttagtggtaaacttgatttaatgcacggtaataagaaaagaaaaaacaagctaaatttcatgaacttgcattcattaacaaaattaacattagccataaatcgtgattaattcaatgattttggtttttaaaagatctttttttcctatagttaccgtgtagagaatcttgaattcatgtcatacttctaaacttttggaatttcctttaactttctcttacagaatttaattacagttaatacgatcataaatcaatgagactgtgcgtgagcaggttcaccggtctaataagtacttttactcgcaagaagaaacaaatattttatttctaaatttacctttgagattatatggtgaaagagttgattattcttctatgatgtctgaaacctagtcaggctaaaactacatatgtattcactcactattcataaatacgttaatccaagcaataatgatgacaaattgttggtcagtgacaactaaatgagaattactaatgaattaatagcatggctataggaaataaaattgaataaaagaacattgatttcatttctttctgcttgcatctgtcaattcactcttaaatgccccataagagcatatgaaacattctgacatttcttggaaagacagtaatcaatatacattttaacaagccattaaaatttatactaaacttcttattattacaccatgcatgtaactttatcactctagtttgataaataacaatagttgacataatatgtttatacgagcggacggtgaaatataagatttatttgtataaacgaaagtaaaaccgcaacgatagtacatcaatatttttgcattatctctgttcctaataaagtaacactgtagtatttacatcatatcgacttcaaaacatgaaggaatggatgacaataacagttcgttaatgatcaaaacacaataactctaatctgaattgtgagtttgtcaaactttgaaagtgcatttattacgaattgtagatatcgcaaagggtagataatggaagtaggtgtgggtgtcgttatagccatattgaattcaaaaggaaagacattaaattagaaattgaattttgaaacatgttgatagatcatgtccttcttctgggttacccagttttgccctaaaacctaaaaccaacaggaccatcatttcgaccacaccacattgactggtctgccccaatctagctatgatatatcttaatttccgtatgacttggatccataaatattgaaatagatttggtgaacacaatttactcttaaaacttcttctctttcatgcatgttctttttctcactttaacatttttatatagtgacatttttagtaatccaacgttatttatatgattagtaattcatcaaatttatatagtgataaaattccacaatggttgttcaataaaaatatgaacaacacaatagaattagtaaaagtgactatgttaaatcattttcttcgctggggtttggtgggcgagttctaaacccataagcggcccatttacttcgtaaactcaattcgatttgttcagcgttccaagcccataatattattttcaagggcataaaataaattgaggtttatatggaaaatttggaaattccctcgtccagaagaaaccaacaaaaactgcaaaagttcaagcggtgggagaaaaaacttcagatcgtagccattcattaaattataatcaacggtttaaacctcttcgatccgcgtactctattcttattggtcaaataacttaatcctccaacatatataaacaacaatcagatttctctctgttaatttcgtcaagaaaaaaattcgatttttttgcgctctttgtgggttgttgttgttgaaaatggctggtcgtggaaaaactcttggatccggtggggcgaagaaagctacatctcggagtagcaaagccggtcttcaattcccggtgggtcgtatcgctcgtttcttaaaagccggtaaatacgccgaacgtgttggtgccggtgctccggtttatctcgccgccgttctcgaatatttggccgccgaggtaaaattacatcgtcttttctctctttcccattccgtttccgatcttattcgtctgactctgtttttgcgtgatcgattacgaatctagggttcttacattttccgaatttgacatgcaaaaattgaattagattcgtgtttgaattgaattgttgtagttctgtaattgacctaattttgggtttgttctgattggttgatggtaatcgagatcatatgaatcgttgtagttttctcgcaagattctaaatttttttcaattatggtaaccaatttgatttgagttgttaaagttctcaaatttggaaagtttgatcatgaattgtgtgttttgaatttgttcaggttcttgaattagctggaaacgcagcaagagacaacaagaagacacgtattgttcctcgtcacattcagcttgcggtcagaaacgatgaggagctaagcaagcttcttggagatgtgacgattgctaatggaggagtgatgcctaacatccacaatctccttctccctaagaaggctggtgcttcaaagcctcaggaagattaggtcttttaacacaatgatatagaacacgtctctcttttggctttagatctaataacctaataactagctagatgttttcactttttgtatctttgctttttttaattcctttagggatttgtttctttccgtttctgtttcgacatgttgtttctgtttttgtgaatatatgaaagtattttgcgaaatatgaatgataatgtctttcaaaaatgctgatgccttattcaacaagcaaacactgcactttgtagaagtataaagattttctttgttgttgatagtaatagtacaagaaagaaaaaaacacaaaggattattattctatggccaacaagattgaaaaaatatgaaaagaaagtatttctaagactaaatgtgaaaaaaattggtacaagtgagtgacagtgtctatgcctctttaaattacatctgaaaaactcataatcagtgactaaaacctgacatgtcttgagggttaatgccattacactcacagcaggaaaagataagctctcagcaaaacagcagatgaattatgtcctaacaggtaacgaaaccaaagatttgtactttttagtctgaatctgaactagactgatccacgcgtctctctgtaatagctggaaacagcttctgcctaggatctaatgaaggcgtttgtcttggagtttcagaagatgctgaggctgttgagccttgttttctggccatccttacgggtcttcctcgtgcttctctgacttctttgcaggatttatctaagattatcagaaaatcgcgcacaatcacaaacaaacgcaacccttcgtcttttcctgctttgccatggaaatagtcccctgtacttttcaccaaagccattattctcttctcttcctcgagtatggacatgatgcttccttcagcattttgaataaaatcttcaagcgcttcacgaaacccactctcctcgcctgaacttttcatctctgagttgacaaagtctcgagctttcgacaaagcatgacccattttaagaacagtccctgttaaaccatcggcatctatgtttgcagatttctttacatgttcaagctcactgctcaagcctgaaactttctcaagtccaagattacggtaattctcttctgactcttcagaggtttcctcgactaggagatcctctgttttaacacttgagaaactttggctctctctgatagtacgagccgctcttacaccttcagtcctaattatctcttgaacaacaaagtggaggagcgttgttttcccatctgttcccttgacgtctgctaatttcaaaagagtgtccagcttgaaagcttgagcaccacccctaaatgtaccatcattcattcggtttccggtcttaagaactgcctctaagagcttcaggaacagccgacttcccctaagttctttacaagcaacctttcatatacaccaaagaatatacgtttagattggagaagaaagagtcttgagaaagactaagaaactgtaatatgtttttcttttcagaacaaagtttttgtaaaagattaggaaacgtacctccaatttctgaaatgattctttaacaaaagccatttcttcatggagtgtacacataaatagaagtgcttctagacgcttgaaagcaaaagggatatcaacgactgctttcaggaatcgttcagcggatcccagttgagctatttcaccgcagtataatctaagttttagttcttcttctggtgttggtgccatctttaacagagtctgaatgaattctacaggaagctcatttcctaattcaacgaaaattatgttagcgaacacataggagaatgttgccagaaaatcaaaatcttattttccacctaaggaaaaagaaagaaaagaaggttaccttcgcgaagtgcatcacacacttcttcagttgtcgcattcaaagcacgcaaaagaattgatagattttgtcctttctttggttcgaggatctgaacaaactgaggtaaagcagcttgtccagaggaccccttcttgtcgtttttattcttgtctgctgctgcatatccaaataacgactctatcatctcttcattgaacctggaaaaccatcacaagttgtattcagtaactatgccaaagttatatggttatagtataccgaggcaaaaagctaacaactttactcactgaaaggatcctgatcttatatcattccaaaccattgaatgttctgggtttgcttgcactttatcccagaaaaatggcttcagctttgttttgggagcatcatcatctaatgcatctgctggcccagaaggcggtcggggtgcttttgggcccagactcattggtggaggcggacgtggtccttttggtccaggaggaggtggtggcttaggcccaccagaaccaggtggcggagctggagggggcggtcgtggaggaccagcagaagatggcatttgcggtgctggaactggcggtggaggagcagaagcctttttcgaggataccttaagaaatttgggtggttccggtggaagaggctccacttttccagaaaaagacttccctgaaagtacagaagctgttcttccaggtggaggcttcaaaggtggaagcccgtgattggtaatactattatttctcaggccttcgtgtgatagccgttcttctaacgaatctgaagtgtcagagttacttccatcgaaagatgacatttttccttggtttgagtaaatattaaaagattgatgaccctgcttatctcctttgaccgaaccaccatagttgatggaggaacctgaaaacattaaaaaacattttagtctctatagttcaagaaatttcttgttagattagtacagtgagaaagtggagatattattaccaacagagtaatcactactgcttaaactgagaagaggcctttcatcgtttttcctgcctcctgaaccatttccacaaaccctggagcagcataagaagaataatgcagccaacaaaaacgtagaaactgcagtcacaacaacagcaatgatgattgttttctcatgatcctctttttttttcgcaggtgaaacaggtgcagaagttgaatttttagaagcgtttttcttagcaggaggaggagggggagatcttgatggtggaaaagatgatttccgaggaggtggggattttggtcgagtaggtgggcgcggaggcccccgactacgcttaggagggcgggaaggtgaaggggaaggggaagagccgggtttagtagctagatttctcctcggaatatcaagcatagatgataagagctccagatacttggggttatgaccatttaactttcctttttcttggatacaatcaagaagagtctgcttcagattggtatggttcaaaccaaatagttccctactatcctttgatcctggaaaacataaattgaattctgccacagcttccttcacacaatctgaatcttgccaacaacgctgcgcccatgatgtttcttcctgtcaaacattgtacaaacaagagagaaacaactataagagctataaaacattttgaaaagcatatcagtaaataagagagagccaactataattccaagtatgattacaaatggcgaatccaaactattttgcaagaatcgttctgagatgatcttagctttcttatagagaacatgaatcaaaaacaaaaaatgtgatcttagtctctaaagacctaagctttcagcaagaaacaagctatgactcgcaattctgtctggataaaatctactacggagctacttgatcttctagttttatcacacacagaccataggaatgccttacaaacgaaaacatatcacgatagcgacaagcgtgaactgaaagctttagcagcaacaaattgttctctgaatatgactccattgattaaaacgtaagtcaagactattacatgaataacacataattcaaaacctatcgactttatatagcaggatacaagctaatgatcataattctctttctcagacacctagattcttacagggtacatgatacaaacccaaaaatgcaatctcagtctctaaaacatagctttcagcaagaaacaaaaagcaatgtctcgcaactttcccatcaaaagtacactagagagctacaaaataatcaaacaagcttgaaaagcaaaaaaactatctttaccatatgttcattgacctgccctgttgatggggccatgaattgactaagaaaaatctcatctttttctggattctcttccaaagttattaccaataacccagaaaacagaatcaaccagaaaactaaacgactccaattctgatcacccattcctcctcgaatcattccaaccatatcttttgcttctcatttcatcagatactcaatagaaccaaattgccgattctacagctttttgctgaaattcgataaagatcgaaactttaacacaaaagctcaacaaccctgatcgaaaatttggagctgacttcgatgcaatttccttggaggaccaattaaattaaagcttcttactacaatgccacgagatcaattacacgttttcgagacagcacaaaaggggaagagttggtgctaatgattgttggccagatccaaatgttgacaatgcgatttgtcgtcggtgcgttcaaccaaacccagaattttgaccagagagagaccaaaaaagtttcaaccttttactttttccgagaaaagtcgacgagataaattcacggagatattagctctcaagcttcatacaaatattttctcgaagctttctcgttctttttttgtttccaccaaactcaatcacgcgaaatttacgcagagttattaatatattggattatttgttttttcttggttttatttctcaaagaaaaaaagagaaggtaaactaaaatcgctgttttaattcttttttatatatattatttgtctatttattttagtttatcatgttattaaaattaaatactaaaacttcagttttcatatacatttgatattttttctaattttgtgtattaacttttaagtaatgtttttttatatagaaatgaaaacattgtttataatgatttcttcatttttgttgttacagttaaggaacagctaatcatgtttatctttttttattttcttgtaccactttaaaaccagattataaataggtaaaatagcaatagaaacaaataaattataacctctgaagataaaatcatttgattccatgtttaaagatgcatgcatgatgcatggcccatctctcaatagtcaaattgcttgggaaagccaagtgttaaaattaataaaagactcagaatcttgatctatcacgttacgctattgatcctttcacacctattttcttacttctcttaagaaagttcacaccaaaagatcaaactatcctaattccatttatcattggaaccggaaaactcaaatgcgtataaacttaagtttggtattaattaattgggttaaatttgtttatgaggagccacccctattatagaagtaacttttgattatgaacttcttaaattaaagaacatctcaataatgaatatcattgattaatcaccatagtgttctttatggagattctttataactacatccattaggcatcggacctttagccagtgaatcgaatgatgtattacagtgtcttggaatccaataaaactgcacctcacaaaagtagtgtaggttttaataaaaattatcaatagagtaacttaaacctaaaaaatgctacaaactataatacttttttggtaattaaggaaatttttccaagacaaacacacaaactaatctttggcctctatacaaaatccgactaatctcgttatttatagtgttcacgttgcatatataattgcctcaacgagaaatagatcacagtgatttaaacatcttttgatagtaataaatactttatacaaaaccaattaaaaataaacaaatacttctttattatacatcgaaataaagatattttttatataaattcttttgtattagttgtcgttttacaagttgaattttgttttaaattagttgttattgtcagtttttaatgtagatgtttaacagattttccaattttatccctattctgtaaacttatttattgatgatatggagggggtatcagttatcaaaatagtacaagatgaagaatcgaaatggtatggctcaaagcaaataagacacatttctttgtgacccttcgagcaatttctacgtcaaaagaacatattcctctctttacttaaagcatgctaaagtatagtcacaaagaaataagaatctctcccaactttttctcttatcatcaaataattttcagcacccactatttttccataatcttcgtttaatttttcttctttaatctactttgcacctatcatgtcaatctataagtatatatattttacatatgctgcaaatatacctccacaaaaaaacaaaagaataaacattctttttatatccccattaaaatcaaaatatttgtatcattttttttattagctatctcaaaattatactataagaacaaaccttgattccaaaactcacacacacaatcaaccactttccttttttcattcgtctcaatttctctcatgacgagtagtagtggaagcctcaaactagagatccacactgatgacaagacgccgggaaagtggagcgtaccgctcggcgatgatgttttccgaaggttcttgagcgggggaggaggctcggagaaggctgtgttcggtgaggggtctctttttagcccgtttttgttcgggaagtactttgatccgtcagacgcctttccgttgtgggaatttgaagctgaggttttgctggcgagccttaggagcttaggacagtgtagagtcgattggtctcagacggatcaagcttatgtccttaaatccgatatccccggtgcgtacgtctttcttacaccacaattctcttatttattttcattcggaaacgtttatttctgctttagtaaaaaataaaaatacaatagatcgaactttaaaaaagaaaactaaatcttcgttcaaatgatttgttatacatcataacgatcaaaactgaatatgtgaactgatgaatggttgatatagtacaaatatgaacagaacctaagtttctttaaaagtgaacgtgaaccaatctcaaaacgtaactcattcaaatttaggatttcttttgtcaattttactttaaatatcaaaatgatcgaaccacaacttgaattggacactagttataatgatggtaacgagaaagatgaaatggttcgcaaaattttcaaataataatgtatcttttaaaatggtataaaataaggaaaaaaaaaactgattaaatttttggtacttgtatgttagtggtggggaaaaataacgtgcaggtgtacgtggacattaacggaagagtgatggagattagtggccaatggaacagcaacaagaaagcggcgaccaacagtgactggagaagcggccggtggtgggaacatggctatgtccgccgtctcgagcttcctagcgatgccgacgccaaatactctgaagctttcctctctaacaacgacgattactctttcttagagatccgaatccctaagataaattctaagaacaagttttaatctgatcatgtcgccttgacgagttttaactttagattcttttcgtaattttgttttctttagttaactattattatagatatgaaattctgtggtagagacacaatggatgaatgatatgttatatatacatactataaaatatatcaaatataacatatcgattataaacaaatgatttattgatattacacacttttatgcaggttttttagtgtatatatattagaaaattgcactgatttcactagtgaagattaattcagactcaaaaatgtgtgttttcgaatgtaatatcagactcaatagggtcattgtctggcgtgtggttttggggaatattatcatctcccatgaattgtttcgtgggcttcaaaccaatgtcatgttaaaagaaagaaaaaagttaaggccatgtaataataaattcattaccaaaaagacatgagaaagacttatgatcatgtgatttatgtcaaatagaactttcatagatgctctattaagacgactaggattgaataaaaattggacgaagtgggtgatttggtgtatctataggctatagtctgtagcatataaaattatgattagtggccaatggaactgcagctagtacgactagagaagcgaccggtggtgctacgtccatggtctcgagcaccccggtgacgccgacaccaaaaactccaaagctttcctctcaaacaacgacgactactctttctaagagatctgaatccctaagattagctccacaaacaagttctaatcgaagtattaagtttagactttagagtttttttctttttcttttttttgttcattttattatcacagaattttatgtgatggacactaaggtagaatagtcatgagtcatcaccaatgtaaccgacgcaacatatgaactccatatgtcacaaaagtacattctctttggttagacaacattaatgtattgtcataggattctaacttcttgctttatatatactgaaaatcctcttgaaatattatcttgtaaaagttagtttgacatagtatacgttggtttgtcatcaccaattgaagtaattcgcatcatgtattgtatcccttgtttccacaaaaatgtgactacattcaaatcttcatcggcatttttcattctcggctcgaacataaaacaaaatcctaaacgaataattgtcgatctcataccaataactactagctagctacttgtagtcttgtggaaagtcatcgaatctaaatcaaagcatgaagtgtttgggcagatcagaacaatggagctaaacttaagaaatatatatatgaaaatttatattataccatcccagatctgaacattcttttttttggatgaaacctgaacgttctttccagtggcatctatttttatttttcacctttattagcagttgatccctcttacatcaatgatgcctaacgcaatgacccaattataccttttctttataatagatgtgtgaggtcgatttaccgattaggtgaataaaaataattatatttaccaattatgtaacaaaacagtattaattaaactattcttttaacagaagaagtaggtctaagtttgatgtgagaatatgacttaagatgaaaactatggagctcgctaccataaataaaaaatagatatggcaacaactttttcttcatgggaagtgtttggtgcattccctcaacatctatttttatatagaaaaaaatcatttgaagaaaatgataattgtctaaagatcactatctagaagttggtcaatagattaaaggtttctacacctatattttgaatatattgattactacagtttcaagtatgtaagaaattatagattatgggtactgtttgtttttgagacattttgtactttataggttggatagtctgtttataaaattttgttgaattatatctcattatatagtacattctgcatttttttttctttttaacggctgctttattttagattctgcaagataaataatttgaaatgatggtgtatcaaattccaaattgattttagtactagatattttaatttagttggatgagggggagtaaataaccatggcttaacgctgaagtctccaatgaactaattcacgtttcaataaagttgcaaagaaaaaggttaaaaagaaagatagaaatacttggcacccatttcacgcaattgagggactaacattatatgaaacaaattcttaaactaaggagaaaacagattcattatacatgtttttgtggtcatgagattaaacttacgacgtgtgaattaatgttttgattctttacaaacaatctgtatgactgacttatcataactttgagtcgcagccatatcaagtttcaatagtttaacgtactcttctaaagttttcatagttttttttttgaaattcttttaatatcaactccatttataagaatatttaagatagctcagaaataggtttcggagtttaattaacttgtccttttaattaatcaatttaaaattccaacagagaccacttcgtctaacaataaaagttcagatataagctacatgcggaccacaaatcataaaaactatgacaataaactatgaaattgcgcgtttatatctatgtattatactactttgttaactcggaattctagacttgttcaatttgatattcgacgccacgatttttcgaaaaacccatagtccaatacatttgtttaattcataatacttaatcctaattttatcctttagtttgactaaatcaaatttggcatgatccttgcatcgcctaattaatcacctttgcataaagtagtttttgctttatccagacataatttgtatttatatatttcaatatatgcttaaagttcaaaacccatctcaataatcacaaatttatttacaaaacggttacaaggtgaatcacaaagtttccaatcatgaaaatataataaaatgttatttattttttgtttgttgcatgatccaatttgggaataaatttagagtacgtaaagctgaaagatgtttaatgcgtctagaatgtgcacttattaatgtctctatgtcaccaatcactaatctcaaccttttattggggtcatatataaagaaaactgcatgtacattatacattttttttctgacaaaacataaataaaaaagctttatccccaaaatgtaactcaaaatacggttaatcgtattcaatgctataaatagcaagaattagataataagtttagccattttaattcactaacttaatgtttcaacaatgtgaatgtaatcgtccataacacaaaccacatcaacgacgatatttcaacggctaattcagctcggaccattagatttaacattgtttctttcacatgaaatttgacaactcgtcagggtatgagacagaatctaagaattacacgacaaaagacaatttttcattcggacaattttagcccatacctttttaaaccagaaacgtgactgctttgaacaatgtctggattgatgctaagggtaacttcggtaagataaaatatccactttttctgaaaagaatctctcgtcttaaaatgctgacgtaactcattttaccgacacgttatagttagcttttcataattattttattaaacgttattagtttattaaatttcgcatgttaataaatctgtgagattaccgatacaacctatggttagatattttaatttacatctgtgttgaaaaccaaacaagaagattccatcttaaaatatgggccattatatgttcatctaattttaatttttttttttttttttacaaacacaaattatttatgttcaaaaatattacaaagaatttttaccactttcatatatatttttaggattttagaattttaaaatatggtggtacgtttgtataataaaacaaaaaaatggtaagtttttattttcaagaacacaaataactattttcattaatatagagtttttggtgatttcatgaatatgatttttactagctttttcgttatacattttatagtaatattgatattcacaatctcatgaacccattattatttataaaatcatgcttataatattcagtaaacgattttttacggtaaaatgttatctaagttgaaactcgtatataatttatagatgataaatatatataccttgtatggtttaaaggatgttctccttaaactaaatttatattgtgtaaaaataatattgatttctatttttggtgtatggattaaagtcataataagtccactgacattacccccactgcccctaacattaaacctttcttctaattactttgctgcttaataaagcaacggctgtgatttcattacctcggtgacttcagatccaatcaacggccccacgttcatctctctctctgaacattcaaacaacaaatatagaaaaataagtagccaagcaacaccaagagacgacgagagcaacaaaaactgaaacgtgcctccatttctaaaacccaaatccttcttcgtacaaacgacacaatctctcttaaatgccaaaggtcctctttttcgtcttcttccactctctctatacttctctcacaaatctgggcatgttttgaaatccacattcttcattcactgagtttcctttacctcttaaagtttcaatctttaggtctaattctctcttcttaaaaatgctctgtttttgttacttatttaaaaacttcatcttcacgggtttccttccgttttttctctcatttaatctatttctcaatttatctatttctctgaaagatc

SEQ ID NO: 900 - DNA, 31178 bp, Arabidopsis thaliana
tctaagagagaaaaaaacaaaccttttttgcagattgagagagaaatttgaagtaatttaaggtaacaagaagagaacaattttgttctgttatggtgggggcgatggcaaacaatggaagaatccggtcagcttttccggtgactaatgggtcaaaagatctgacgccgaacagtgctccggcgagtacaaccggatctgaatatggtcctgttgagttcacaagagaagacgttgaaactcttcttaatgaacgaatcaagtacaagagcaaattcaactacaaggtttctactttttcacccacctcattaaatttatcaactttttattttttttacctgaatctaaaattcttcttgtgttttagtttagttggtgaagttttgaattttaagtagcttttttactggcttttctcgttggatccgttgtgttttttttttctgaagaagaagatttgattgttgttgtttataagacaatttgtgggacctttatatttaggcaatagcattgaagacattgtttatgtgtgttgattgatctttgtggtagaatctggagcttttaatttcagttagctttactggcttttatcgttggatctgttgtgtgtttttttttttgaagatttgattgttgttataagacaatttgtgggaccaaaatagttttgtctatttgataagcattaaaggactttgtttatgtgtttttggtcttttggtttgaatttgaatgttgattttgcaggagagatgcgagaatatgatggattatataaaaagacttagactttgcattagatggtttcaagaacttgagttggattatgcttttgagcaagagaagttgaagaacgcattggaattgaatgagaagcattgtgttgacatgggtgcgttgacacattaaagtttagttgttgattttttcgttagcagtttttgaactttgtgcaatttgatgacagaggttagtttgaaaaacaaagaagaggagctgaatatgataattgaagagctgaggaaaaactttgaatctgttcaagttcaacttgccagggaacaaacggagaagttggtaagaagcggttcattctagttaagttacttgtgtctgatacatatttgtaagtcttaattcggtttgttttgctttaggcggcgaatgattctcttggaaaagagaaagaagcaagactttctgttgaaaaggcacaagctggtctcacagaagagctaggaaaagcacaaggagatcttcaaacggctaaccagagggtgagaaaacttaaaggatctgaaatgagaaatggatactacttagctttaaccaatgttcgttttttgggttttgttcagatacaatccgtgaatgacatgtacaaactgttgcaagagtataactcaagcttgcagctgtataacagcaagctacaaggtgatcttgatgaagctcacgagactataaaacgcggtgagaaagaacggactgccattattgaaaatattggcaacttgaagggtcagttttcagcattacaggaacaacttgctgcttctaaggtgattgatgctctatcaatagtagtaaatgtttatagttttggtcagaatgtgatttggtgtcttgtttttttttcttgctaggcttctcaagaagatatcatgaagcagaaaggtgaattggtaaatgaaattgcgagtctcaaggtagagcttcagcaagtcaaagatgaccgtgatcgccatttagtggaagttaaaaccttacaaaccgaggcaaccaagtacaatgacttcaaagacgccataaccgagcttgaggtttcctatccttttataacttctttcaaaggaattctctgtcaaattaatttctcttaagataatgtaaattattttggtccagactacatgttcgtcccagagtacccagatacgacagttgcaggatcgactagtaaactctgagaggagactgcaggtttcatcacatttttgagttacacatacaacaaatgactttactagatttcacaagttcttgataccattcttgattgtttatggtctaggtgtctgatctatctacctttgagaaaatgaatgagtatgaagaccagaagcaaagcattatcgatctgaaaagtcgcgtagaagaagcagaacttaaactcgttgaaggagaaaaactacggaagaagttgcacaataccattcttgtataatctgcttaactcacctctgccacatttgtttcttcccctttgtgtaagcttgactgatatcttctcatgttgcaggaactgaaaggtaacatacgtgtgttctgtagagttagacctctattgccgggtgagaacaatggagatgagggaaaaactatttcttacccgacatccctagaagcacttggccgtggtattgacttgatgcaaaatggtatgtaacataaacttctgtggaaatgtggttcttgcagaaatgacacatttattaacagttgatgtgtttttgctatggacagcgcaaaagcatgctttcacatttgataaggtttttgcgccgactgcatcacaagaagatgtcttcactgagatttctcaacttgttcaaagtgctctcgatggttacaaggtaactaaatctgcaaatggcaaaaagtactatgtgcgtttcactgtttgttggaataactaagctgatagaatccattttataggtgtgcatttttgcatatggacaaactggatcgggaaaaacttacaccatgatgggtaggccaggaaacgtcgaggaaaaaggtctgatcccgcgatgtttggagcaaatatttgagacgaggcagtctcttcgatctcagggttggaaatacgaactgcaggtatttttgtagtcctctctcttttaagtagcactaagtaagatatatccttgtgattagaatatatgtataatcctcctagttttgtatcatatgtataggtatccatgttagaaatatacaatgaaacgatccgagatctcctgtcaacaaacaaagaagcagtaagaacagacagtggtgtttctccacagaaacatgctattaaacatgatgctagtggaaacacgcatgtcgctgagcttactattttggatgttaaaagctctcgggaggtttcattcctcttagatcatgctgctcgtaacaggcaatatagctgaaacccgtttcaatttgactgaactaaatggccatcaagattttcgatgaatctttctgacagttgaaagttgttttctttcttcttcaggtctgtagggaagactcagatgaacgagcaatcttccagaagccattttgttttcacgctaagaatctctggtgttaacgaggtactaaccaaaccgtctttcttcttacagaatgtttgttttgtgtgataaaccaaactggcttttttctttcttacagagcactgagcaacaagtacaaggtgtcttgaacctgattgatcttgcggggagtgagcgtttatcgaagagtggatcaaccggagatagacttaaagaaactcaagtacgtttgatagaaacataaaacatgattatggtttcttgcaatttttagtctcttaaactttcattctttcttcaggcaatcaacaaaagtttgtcgtcgctaggcgatgtcatattcgccttagcaaagaaagaagatcatgtaccattccgaaactcaaagctcacatatcttctccaggtaccaaaccaaaccgtaaaaacatctttcaaaacttttgtttcttgatttgtggcatcataataaaaactatgtttgatttttaattcagccttgcttaggcggtgacgcaaagacgctaatgtttgtgaacattgcaccggaatcttcttcaaccggtgagtctctctgctctcttagattcgcagcgagagtgaatgcttgcgagattggaacaccacgtaggcagactaacatcaaaccattggaaaatcggttgagccttggatgagggaaagaaaagagagatggatttgaagtttgaagctaaaagcttcatttcaaagttaattatatgaatgtacttaatatggtcacaacttgatgaagaaggatgggatgattctaacaagaaaacatgaagaccttttgttgtaatttgtatagtttggtttagcattttattatctgttgtttatgtaattctttttcttttggatcataagtaggattttgcttgttgatgttcggattcatattcatcttctgggattcaaaatatttacttctcgtttctgtgaccaatcaccaggcctagaagcataatggtagtagtgttttggttacgaaattgatatatgaatgattgtttatgtttggtcagattcaatatcgtatagaaatatgaatgaaagataataattaataaaacactaaaaactaatgttagttatattttaatatgcttgtaatatttagtacttttcgaaaacataaaaacgtgaaaattgactaatactataaatagtaagaatactggatcattttttcaaaccatgaaaaagtggtatacttttttttgtgtgcaaaatcttgtttccattcagtagatcaagtagttacagaaatgaatagtttagcaaattcaaagtttaaatcaacaatactaaacgcatttttgaacaacaataataaaggagataggatatatagaccgacggtaagatcaaatggtttccagacaataggtatgaaccaaattgtcacatgcaagccaaaaagtcgatataccatttatctttcctttttctttcaatcaaggtgtaatcatatatatcatatatgaagcaaatttggaaatggaaataacacataacagaatgggacatgacggcattttttgcccactccgaggaacaatgtattccattgatcaacttgaaaccccacttgattagctggttctagataaatgtttgttttctatttaggttgttacagatttcgtatagttaaattgagctacatgtacaccagataaaatcaagatgttgatataagaatcattagattcaatttgacttgaatgtggtgtgtcaattgtaaaaacaattgtgatagggtcatactctattttccctataactataatcttgttttgttggacactggagtaatatatatatataattctgcaacaacttaccaaaaatatttgaaatcatggatcatatgtcattttttttcttccaaaaatgattttgccatatgattaatgcattacgctcgtatgtttgataaatctggttcgtcacataaatatcacttcgaaaaaataacttttcatagttcattatcggtacatgtaaacgttaattcaattatagtatttcatatgttccaccatctcactattatattggtcatttgatatttcactactaaaccagataactattgttcttaccagatttcacacgtaatcattgtattttctagaacatcgaacgaatatagcctacaaatattatatgatttagtcaactcctgttgaatttcttctaaatattgagataaggtaaactaaataacatctgaaatcatggcaaaattcatgccttcacggaacttgggaaaagaacaagtcaaactttaaaatatttgtgtaattacttgtttattaacatttgtttcaaaatattgtactccaaatagtcaagttgatccataatgccgcttctgcattcattaatcaaactaaaagcaactggcttagccgatcataatttcaaataatagtagtgaagagtataacaagaagaaaatgataatctcctatgaaaaaaataataataattgataatctcctttatattttataaaatagaaatatagaagataacaagaaaacaagaactataaaaatataatttagtacaaaacaagagaatatacctcacagtatgagtggatattcctaatcaatagttgataaatctatttatttatcaatttgggtttcgttatattcttggaagaaaataagttgacgcgtataatttgagtactggttttaaaaagaaagaggtgctattatataatttggggaagatattaaagattatatatcgtacataaaagattcttctattttttttctttctatttcttggaactaccgttcttaattaaattacccatatattgttaaattttggattttgaacctgagatgtcgatgggcatcttatcttattatgttaaaaagttgaaacgaataaatggtctcaatgctagttgagaagtttatacttttagtgtgtatcttaaaaaaaaaaaaaagttcgtatctatgtgtatgatatattattgtttatcaaatgtgctaatacgtaaagtattattggaaattttcatgtatgtacgggaggaagcagaagaatgtataatctcctagatcacgaccaaacgaccattccaaccatgttctcgaatattatcggttcgttccaacgaacatggtcacaagttttctttatcaatttaatttgttaaaagctaaacggacaaatagaaaacacatactactaaaaccaaagaatattgaaacaaacaaattaatcaaaaccagctttagtggtgttagattgataggtctttagattcgtgcttcttacttattattgctaagatagtcgacacacacaaaaagaaaaatccattctcttttgttagaaaacatgaatacttgccactataccgattttgatttaaaaaaacaaaaagattgttaatggacaaattttgtctttctagtgcatatttacttaaaaattgaaattattaaaaaaaatttaaaacgtatggattatatttgactatttgttttggaatttaatccaaaacatatgaaaattttgaccgtttatgaaatgttgatttttattttactctttaactcacacacaaaccacatactttaaaattcgaattagagaattcactaggttaatgccctgattagttaagtttgttgtaaaatgtattgatatttgatttaatatatatatgatgatgtaacacataaaataaaataaaaacacgtaaaatgaattaaaaataaactaacaaataaaataaaaacccttggtatgatgggccttggaaagcccaaaaaaaaaggaagagtgcgcgtgaaaaccactctaatttctctggattccaagattccccaattcgtctcctccaacagttttcttcttctcttcttctttgggtgttccttccaccaacggcagaaatcgatttggcttaaatctccccctcctttcgatctctctgatcgccgccgggaacattcaatttcccgggagttcaacaaaaaaaaaactctccgtttttatttttccccctttttcaccggtggaagtttccggagatggtgtcacccgaaaacgctaattggatttgtgacttgatcgatgctgattacggaagtttcacaatccaaggtcctggtttctcttggcctgttcagcaacctattggtgtttcttctaactccaggtttttcttcttacttcccctttctctcttaagtgcttcaaattagggttccgatctggtttttaagaaattcaaattgatttgagtgaaatcagtgtgattgcttgaataattttatgtgggttttttctggtatgcgaaggtgtatcgttaaatcaagggaagggctaattttgttaaagtaacgaactttgtgattttaagcttgtgtgattgtttgagtaagttatagagaagaaactgagttcttattcatttgaattggtttctatgcttaaatttgggttcttttagcttgtgtagatatctttagagtgggtgaaatgatatgttaagttaggaagtttggcctcaggagaggatttaggtttgtttatctaaagtcaactgtgtgtgcctgacatgtttttagtgtaacttctgacatgttacttgattcgggaattgattgatcatatatcacttcttgttaggtgggaattagattcctttttcatggatagtgctttcacatatgagtggatggtttgaccttagcatgtcaatgttaactaattaatctgcttccttggaagtgagtagttgtaagttgctacatgattgagtatagatgtaatacttagttggttcgatgtatttcttgttggttcagtgctggagttgatggctcggctggaaactcagaagctagcaaagaacctggatccaaaaagaggtaagctttttatgttaaactctttgtgacacacctttaattcaaaagacttactgaaccaggaaactatagcaactttcagaatctataactttgagaaatcgctatggaattgtttatggttcttttgttgtggggatctgtattggctcgcttgacatattttgggcttgacaaggtatcagaaaaaataatcttgttcattccatgtctcagggggagatgtgaatcatcctctgccactagctcgaaagcatgtagagagaagcagcgacgggacaggttgaatgacaagtaagttttaacaattttgtatatccttcctttactctttagtaggtactaaaatgatcgccttttaaataaataacaggtttatggaattgggtgcaattttggagcctggaaatcctcccaaaacagacaaggctgctatcttggttgatgctgtccgcatggtgacacagctacggggcgaggcccagaagctgaaggactccaattcaagtcttcaggacaaaatcaaagagttaaaggtgaaatttgaatcctcctttatccccataaaatcatcgaatgcttactagtttccggtttatgtcaatcagactgagaaaaacgagctgcgagatgagaaacagaggctgaagacagagaaagaaaagctggagcagcagctgaaagccatgaatgctcctcaaccaagttttttcccagccccacctatgatgcctactgcttttgcttcagcgcaaggccaagctcctggaaacaagatggtgccaatcatcagttacccaggagttgccatgtggcagttcatgcctcctgcttcagtcgatacttctcaggatcatgtccttcgtcctcctgttgcttaatcaagaaaaatcatcaaccggtttgcttcttgcttccgcttaaaagaaaagtctccatttgttttgctctcctctctttctcggctttcttagtcttatccttttgctttgtcgtgttatcatcgtaactgttatctgttgaacaatgatatgacattgtaaactccaattgcttcgcgcaatgttatctattcacatgtaaatttaagtagagtttggcagatcgtctctcactttatgtgttcttacattaatacatagaatgtggttacttcctcgccataagagtttgaaagtacaaaaaattagaaacaggagagaccgcaaaacatgatccggtagagaagtgaaaactccactgcagaaaagtttgctcctatatcttgatctgtgaatctcctctctgggtgccaatgtagaaaatggtcttggtttgtgttatcatgatgctctaatgtgacagctcttgataaatctgtcagaagaatcaagatacttagcccagagaggacgtagatgaggaaatgctatatccagccaaggcttagctcttccattgaaatgaacaacagcggcactttcagcatcggcatagctcgtggtctcttggtatccgagaccaagcatatgccagaacggatctatggtttggacatgaccgtggaaagcaatcagcccaggaggcaaagttcccagctgccacaaactcaggtctgattttaagttctgcaacacatacatgtaaatagttttgagttaagatgattattgcttgatagtgattgttgggtagttagtggtttccttttacctcgtcaagccaatgatagtaagtggagcttatgttagtcctcctccaagccgctaggtcgaaaacattcattccataagcccatgcacattcctctggattgaagtttttggcaattgtcggattcgagaagttgaggtaactcttgaacttctttgacatcacaaacttgtcttctcctctacatgtttccactgctccatttacttttccattcatgtcaatgtcccaaagaggtgaaagatcagtttggatcacaatgtcatcgtctagaaacacaaccttgtttaagcttggaaacaactgcagaaaaaagcaaagactgttataggtttcgggtctaatgctgttgagtattcttcactagtcacagatcaaacttacctctggtagatgaatacggatgtgattcatcaaggagttgtatttagggctgagagcttgtaacttagcagcaacaacaaccgggttctctttgttattagccacaataaccgatgatccacctctgaattgagacctcactctctgatctttctccatagcttccaaaacgggtactttacctttcgataaccaatcgaaatgatgcaaagccttgacctcaattattgctggagacagaggatgcaatgagaaccaagcttgcattgggaaataagttttcctatccgttatgatgtgaagaacgatcttatgaggtcttaaagcattttgaaccaacgacttagccacaaccgaagctgcaagaatattgtctgaagccaagacaaagtgaaagtagttgttgtctaccaacatagggacaagctcagcttctggaagctggagacgcgccgctgcgtttatcgagtgttcgttggctagtttaagagctaaacagtgaagttgtttcggtatgctgcttgatgcgacatgtcgatataaatactcttgaatcttagccgttcttgttctctgttccatcaatgtcaccatttcttttagcttttgagcaaattctcttgcgtctgatttgcttcttttgacttcagacatgaaatcttgaagtgtttgaggtatatctgatcttcctttgagttcttgttcgcttaaaggctgttctaaaacttggtacatagcttctggaacattctagaaataaccaaaaacttaacttttcaccactctgtttcaccatagtaaaaataaatgcgctcaataatctgaaactgaagttagagaggacttacaccagaatcaacccttcttcctaaaagctttggctttagtcttttccccaagcaagctgtaaattaaaatggttaattttttttgtcaaatgttaaaactatgtgttattatgattaataagtaagtttatctctttaacatgaaatgtctttaaatatttaattaagcttgaacataatactacaaaatcaacgtgaaacaaaccgaccagctcttggatttattcacttttgagcgtaaatctctagtaattattcaacttcttcgtttagattattgttttacatgaactagaagataatatatttatttctcataattgtgcatgtatatacacataaaaagtaaaatgcttttagtataaattatattgctattttttctcatatgttttttttttagtgagaatcgaatgttttgtcgaagaaatcgaaatcaagagttcactattttacataatttccggatttaaaaaagaaaaagaaaatgagggaagttagaagaagaaagaaacgtaccaagagaggagcaaggagagggatcgccgtcgatagtatcaacggtggagagaacaaagacgaatcggagaagaaaagtgaagaagagtagagagtaaaacaccatttgataagagaatcttctagaaccaaccttaacttttatgaactctctcaatcctttccctgtgaccacagtcacatgtctcaagctcggagatatatgtaactgcatctctctgtttctcctctgtttctttgtttattatgtctttgtatggtttttgtctgaaaggagatggatgttcgaagagggaaactggatcttacgttgttatgtattgtatgattattcattaggggtccatatcatttacctaaccttgctttgtgtttaggttattaatggcagatcataactctgatgtttcttgtgaataaaaaggaaacgtgtgttggttagaattagaaacaccacggttttatgtatttgttaggaagctttgggttttctcggttatgcgctattcggtttttggttcgaatctctaagctggtggtggaatcaatattacacattagtacattacttcgattactaaaccgatgaatctgaatcttgttttggtttatattggtatatgtttgatcggttaggttatttggatttatggggttatcctttttctacttgtaggaaaagtttttttccggtggactcggaataccattcagtgcaaatcatgaaactcttaaaatgaattaaacgtcacatgtttatgattagtaagatctgaaattttgcgatagttcaacagcttcggtttaattcggttcggtttaagggatttggatttaggatttggctttatgttgaaggagagaagttggagagagaaagacaagtcaaaggcaatgcaaaacatagatgttaaaaaaattgggagtgtagatgaaaaggagctgtttggtggttacaagacataactttacatctaaataaagtctttgaacaaagacattggagcttcaacttcagaatttactttttgaggactaatttcttgtctaatttcgattgcgacccttttctcttaagttattcaaactcgtcagtcgtccccatccaaacaagaagtctttgtagtttgtacttcaagacttgttgcctttccagtgtaataatatttgcaacttgcaagtttcaatttctgctagttatggaaactttttgggcctatgtctacggcctctatgggatatatcattaccaatcattttatatacccgaacaatttagttgtttttttggaattcgttggttgaatgaagtttgattaccaaacacaagggatttttagagaaaactcttctcacgactctttttataaaaaccacatgttgatacatcaattgggcctcagtgatcaaccggcccatttcaaggaataacgacccagccccgaccatcactttagaactcgagccggcccaccaggccgaagcccggcctggtcaggatgtgagttcggctgcgtagaaaaggggcactctcgagaattcaccttgcgtaccctactatacggacgggtataaataaggaatagaaagtctcgggaaaggggactttttcgagacctggagaaaggatagcacaagtcagctcgtcgggagaagtctgctcgtcaagatcagccagttcgcccagaagagccagctcatcgacacaagtcagctcgtcgggagaagtctgctcgtcaagatcagccaactcgcccagaagagccagctcatcgacacaagtcagctcgtcgggagaagtctgctcgtcaagatcagccagctcgcccagaagagccagctcatcggtacaagtcagctcgtcgagagaagacatctcgtcaagacaagccaacttagcaagaagagccagctcaccagaaccaccagctcgaaacggcatcgcctcgtagcgccctcaactacgttctcagttcgcaataagcctttcagcccgtcaattgcccagcttcaagttcagctcgtggattagagattgattcttcaccttccccagagactcacccgtacttgtttaattcgtgcattaacaccacacatgaaggctatataagtcacgcaagccttcaaatcacacattacaaccttatagaaatcaaacatgaaataggaaaacaaactaagaaagcaacacaagttgccctgcatcactaacctaattgtatacattagtcaataatagatatctaacaaaataaacttaagatataggtgctcggatttatgatttccaatacatgacatagccttttcccgttgcggcctcctcatcagggtctctttccgtatctatcttccttaagatgtgtttggccagcttaaaccatagaaaaacatacatacctcctcgcatgacgatagaaataccaagagtggtatagagtaaccatttggttccttcaaaatgaggtaaaatgatccatcccactgcgacataggaagttgccagggcagccacagagactgacatcattttatgtgttataaccaagacattcttgagtgattttggcttgaaaggaataatgctgaccagaagaatgacgatccataatgatgtaaacaacgcgatgctattgcttacatagaagatcttgaaagctactgtttttgccgcaactgatttccctttcgaggaagtactctcttgatagatgccaccaggagggttcatccccactgcgaaagtaaccgatgcaatcaagatggcgacaaccgtgattgtattcctcgcattttgcaaagcctctgaatgcatcacactttcctctttgtgactctcgccaccaaactttaatgcgatagatgggaaatttgcatcatctttatcgagaagatcaaccgctgcaagaccctgtatgttcttggctttggtatgtatttttgtttcattgatgatgtactccgctagctgtattaattgttatgttcaaacaaactccattatttttatgtatttaaatagtgtatatgctaactcttacttatgtaatactttgaaacgaaaaaataagctgaaatctaaattcaattgagtttggaaggagcaatctcttttaggaatcggagagtaggctcaaaaccaattatcaatgagttgattaatccataaatcttttatacagttatagaaatatatatctcaattttcaatgtgtgattataatagtatctaaaacacgttatctctaaaaccctaattttgaactttggaaaaaacgactcaacatcgagatttcgaaaagatcgatacaaacacaaaatggaaaatgaatgagatcgaggaaaaactcacggaagtagagcctaaagaggcggcagtgtgaagtactgtgtttccatatttatccggcttgtagagaagtttttctaggtggactttctgtgccatgaacttgaatgctttgagatttttgtgtctcacagctagatggaagactgtttcgttatgtggttgtgtgagtatatcgaaagatgaaggagtcttgtggctaaagaccttgaggattttgatcgagttactgactgccgcacagtgcaaaggcgtcaagccatcattgttcaccagttctgcaagtttgaggtcattttctacttctgagatatcatctaatggcgttgacttctctccaaactctaacatttgcgtccccaagtagcagccaaatggataggagtgttgccattatcgtcagtggaacatactagggaagggcagatcccaattatcgtcttggcgaattcctggtgccctatctttgtgactaggtgcaacaccgattctccattgttctccttgtctctttcctctatcacagacggtttctcttgtatcaactgattgaaagtggcctcgtcatttttgcggatggcattgaaaattggtggagtcatctttccagtggaatgaggaaagtttggtctttagatcgtgttcctagctagagagataaatttgtaagtttaagtgtggctaagtggtttcttatgttttttagttcgttatacattgattctcttatggttcctttaaatagcacgcttaagggtcaaccactcctctcgtcgtcgtagaagcattcaaacaagccaagttagttctctttaaaaaagaaaacttgtagctttactctaacttgtgtattagtttatggatgataaacaaagtcaatgactgaattgcataattttatgttttaacgcagatagtacgaacgtacgtaaccagtattagtttatatatatagcagcaaaatgaaagatctatcacggattgattgtctgtaactttcctatccatgcacataaaggaaaatacaaatttttgttaattataaaatataataatctataggccaatatattatcgtgtcactctcaccgtcatgttctatcatcattaattctcacttaaccaatcgtagatttttattttttttggaggacgtcgaagatcttattcatttttttcatctcccttattaaaaacaagagaatctcttgactttgtaaaaacaaattcttctccaacaagccaacaagttttgttgttttactctataagggtatattccacaaaacaaccaatttttatgattaatattgaatttgacacttaaaagacaatttcgcatgtttttccgaacctacataaaaagttaatttattgatgagaatccatcatgagatgtcaagacatccaaaacccacttttcaatgcacaagatctaattttgtaatgagacatcggtttaactcgactatgatgtttcaaactttcttgccaatccactgataaaaaaaagtgattcctaatttttaaaagaaaagaacattatttaaaaccgcgtatgttatttttttaccagattgtatatacattgccaaaagacactcgtgatacaaggaaagttctgtataattcatatttgctttggtcccaaccgtatcaaccaaaaaatgtgggcctcgtcatgttctatcatattcattcaaccagtcgttgttcttgtacagtacacaatgaaatcgttttaaaattagttcctaacacccaaacattatatttggtcgccgtcgtcgcgattgagcaactacgaaacgaacaatatttagtgttgtcgctaacgagtgtccaccgaacatgacacgtttataaaatatttttaaaattctgattggtttatgcttctgttgccgtgtgtactcgtcatacaaggaaatttctgtagaatgtttgcttggaatggtccctagttttttttttttttttgctaaaaggttaatatcattagatgaacgaataggtgttacaaaaaatagagaacctaaaacagagatgacccgtgccaaaaaaaagattataaaaaacagggggcattaggaaaacacaaattaagaatggtccctagctggcatcaaccaaaaagtgtaggccactgggcctcgtgttgttctaacgtcttcctatagaatgcttgcatgtccctaccgcattaaccaagatatgcttctaacaaaatccatcttccttatcatgcatctaattaattagcctaaccgaaatttaaacaaacataccgcctaacgtcaagccagcgatagcagagtagcataacgtctccaaaatgtggtaaagtgatcgatgatgccgccaaataagcactttccatggctgctacatcgacccacatcagccgatgagtgataaccaataatttcgtaagtgaagcctcctgcctccctataaggtataatgctgaggagaagaatgaccatactcattggtataaacaacgcgatgctattgattatcgagaagttttttatgatggttgattgacaattgacccatcagctaaaatagcgcgcgttaacattagtgacaactgacaacagtaacaaaaaccaataaaatcccttattaatttatatataaatgacaatccagtggcaacattgaatatataaaaagtgactatatctcggaatatcataatatcatataaatatgtgcgtggaaaaaaataaaaataaaaatagtcatatttcaaaaccaatagcagccgacatcaccagcggcttccatgtccaaggtcgtacttggggttttcccgtgagactggttacgtctcaatttatccttcttcaaaatgtgtttaaccatcataaatgacacatacacaaacatacttcctagcgcaacgctagcgatagcagaagtggtgtagactaaccatttagatccctcgttatgtggcacagtgatccatgccgatgcagcataagcagttgccatggatgccacggccaaccacatcatcttatgtgctatgaccacacacatcttcagtgctttcgttctataggatataatgctgaccagaagagtgacgatacttagtgatgtaaacaaagcaatgttgtttgctaccgagaagatcttaaaagccaatgttctccctgcggttgctttcccgatgaagggtccgtcttggtggacaccaccaggagggtttatcccgcatgtgaaagcaaccgatgcaatcaagacagcgacaatagtaatagtgttccttgcgttctgtagactctctgaatgcatttcacgttccttgtttctaggatctctaccttctcttagcaaatccatcgcacgactttcagaacttaacttctccccattgtttgtgtttcggatgagttctacaggttcatgtgcaaatttaacatacctcgcagggcgttgaattttttctgcttcatcccggaaccatagagagagtagaggaaagtctacaccctctttgtcgattaggtcaacggctgcaaaacctttcttgtttttcaaggtgacatcaattgttgtttccgaaagaatgtggcgtactagctgtaataaacatgaaatttaattagttgctaataaatttagctctgaatcatgagaattaagagagaaaaaaaatgaactgtaaaatactctctctattccataaagagtgtcattttgacatgtttcatacaattgttttttaaaaaactatgtaaatttctactatactattgacaaatacaataaataaatttctctttttacttaataaactgaaataatagggataaaaaaaagagatttagacttcaaaactgcattgaaaatacaaaacacattttgtaaaacaaataaaaccttaaaacgacacttttagtaaactggaagtccccaaggagtaataatttagaaaaatgagaaatcttagatagtttctcatattaattgcaaacttgcaaatgccaacaactactttgactttgtttagttttcttttgagaattttctaatttcttagagcatcttataatggttattcacttattataatgatctaaaccattacaccgaaaaaaaaaatgatctaaacgacgagactctgtggtttcaacacttaaaacatattttcagtttcaaatctcttgttgcaacagaaaagaatatagacttacagaagtggagtctacggaggcggcaacatgaagtacagtgttgtcctctgcgtcgaggctgtaaagaagttggcgtatgtttgcactctgggccatgaagatgaatgctttggttttttggtatttcgcagctaagtggaaaactgtttcgattgttccttgtgtggttatgttgaaagacgaaggagccttgcatagaaactcctttaggatttcaactgaaccgtttatcaccgcgcgatgcaaaggggtcaaaccatctttatccaccttttctgcaatttcttgattaacatcaacatctaatagtgtccttgccatctcaaggtttcctgatttgcacgctttatgcaatagcgtcgactgctcttcatcagcatcaagaattaggttcgggaatttctctagtatggaatctatgataactgcagtgtatatcaacattaacaaaagaatcaaaatttcattatagttatcaaattatatatctgcaattatcctccatttatttaagatattgcaattaacatttccacgaaattctattaaaatattttgctaaggtttgttttttgattaaataaaaacatgttataccttgttgctgttctgaaaaggctgcattaagttccaccatcgtcatagaactcgttccttctacaaggattctggcagaattaacgttattgttgaggcatgctaatatgaatgctgtttgtccttgcttattaatcttcatgcactctgcttctccggtctccaacattttccagaggatatttatgtttccaatttcagcagctaaatgaagaggagtgtttccgtcgacgttagtaacgctaacgagtgatgggcagaggtcgattaccttcgtcgcatattcctcgttcctttgtgtcacggctttatgcaatagcgtcgactgctcttcatccacatcaagaactaggctcgggaatttctccagcattttatctatgataactgtttatatattaaaacaaaaaaaacgaatgaatattatcctctgttatttaatatattgcaactaacatttctatgaatcttatcaaaaaaaaaaatatatgaaaagaagcaacatgtccacaaacaaattatcatgcgtggcaaaacaaattaagttattttaaaaacacaaataatttttttggcttagatttatattttgcttaaataaaaccatgttatataacttttatcgatgataatcttaaacctggttgctgtcctgtaaaggctgcatcaagttccaccatcgtcatagaccgcatattttctacgagggtaagtgcagcatcgaggtgattgttgaggcatgctaatatgaatgctgtttgtccttgcttattaatcttcatgcagtctgctcttccacacctcaacattttccagaggatactttcgtttccaatttcagcagctaaatgaagaggagtgtttccgtcgacgttagtaacgctaacgagtgaagggcagaggtcaattatcttcatcgcatattcctcgttcctttgtgtcacggctttatgcagtatcgtcgactgctctccatccacatcaataactaggttcgggaatttcgctagtattctatttatgagaactgtttatgttaaaaccaacaaaacgaatcaatattgtcctctattatttaatatattgctttttctttttgtaaaaaattatttaatatattgcaactaacatttccacgaatcttgtaaaaaaaattaaaattaaaagaagcaacatgtccacaaacaaattatcatgagtggcaaaacaaatactgttattttaaaaactcaaactagattttaacccgcagtataccgcggaacgatttattttttaaaagtaatatatattaaaacttgcaaattttatttttataaaatatttcaattttacagtttataattgttattaagtaacgctataccacgaatccatgagacaatcatgagacaattgttaaaaaactgaagttttaacccctattaaaacagcatactaataatattttaaaattttataaatattgattcaaatacatctaccatataacccaattccaaaataaaacccgttctgtaattttttaacccgtcccgtgattttttttttgaagtagtaatttttaaaatttaagaattatttttttatatataaaagttatgcaaattgtatcattctctaatacatttatattttatagtttaattttatatatagtaacattatacataccacataacattttttggttttatataatcttttctaaattaggatgatttgatatgtttaatattagtggtcttaaaaaataataaattaaagatttaacccgtattgaaacgttggattaattatatattacttttttattaatgttgattcaaaaacccgtatctccaaatccgtcttgccaaaaagtcatttagtttattaatattaattttatttatgatatgattctgaattataatctaaacattttagctaataacataggagtgcaccatatttatttaataggggaatgtatcatatgacccgaatgcacttttacccaaatacaccaaaaaagtcttgcagaaatactataaagataagaaacgatagtcggttttgataggtataagattaacaaatatattagttagcttaaattagttaaagaatacaaattaaaaaggtatattacactttattcgaatatagtatcaaaacttatataacacacagagatttgataattttttaattgttgaatacttttttttgtgctaattttttgtgattaagatttaattgatttcgtatataaaatattaaattgttttacgaacttatttgtttataatttggtaacagatagatatttgaatattcagtatattttgattcagtttaggaaatctttgatgacccgtctttagatccaataaaccttataattaagaaatgaatattgtcgttaaatgattttggtaacattaatgacatcattaaaggattttgtttttgattaaatttttctaataacattgtcatgtaattaattacaaaaattaaggttacttttaaaatgtatttcccaaataatatggtaggataatatttttttgctaaaataaaaacatgttctataacttatgcgatgataatttcaaacctggttgatgtcttgaaaaggctgcatcaagttccaccatcgtcatagaccgcatatattgtaggagggtaagtgcaacagcgacgtgattgttgaggcatgctaatatgaatgctgtttgtccttgcttattaatcttcctgcagtctgcttctccacacctcaacattttccagaggataaattcgtttccaatttcggcagctaaatgaagaggagtgtttccgtcgacgttagcaactctaacgagtgaagggcagaggtcgattatcttcgtcgcatattcctcgtactcttccctatgcaaaatcgtcgcatattcctcgtagtcgtatttatgcttgtctgttttctccaaaatcgattgattggcttccaactgacgtataagtctggcctctacgacttcatctatcaaatctaaatttttccgttgtttacctaagtactttctgatcatctgactccgactcctgtcgaccggtatctggtctgcaatgtcgtctagatatgatccgtatagattcattttctgtgagagatagaaatgaatatgtgtgtatggtctaagttccaatcattttgagggtttattgatatatgtctcaactctcaagtctcaagtccacttgcttctcttttcctgagagtttcttctaccgtttgttcctggaagaagtcaaaccacaaccacttgcatctaacatattaaatagcagtccctttaagatgtcaaatgatttgatttttgtttctttaactatttttttcttaggggataatattcaaatggttgtggtttttcaaattgatttttgatattagtgtttccaaaaatacattttaaaattttatagtcggtcaagattttgataaaagccaaatattttaagactttttgatgccaacgcggccgagttttaattctcatggagatgacaaaggcgcggttgaaggcaagtgagtcgttagcccaagcatcaacgaatggtctgctgcggttgtcggtgaagagaacctggtcagaggtgaagagtcatttgccgtgttgcagatttttaaagtagatgttgtgaaacttcctggggcttaccgggtcaatgttaatgatgacttttgggtcaactttcgtgggacaagccaattgaagttcttttgcgtaggctttgtttagagtagggtcaactaggtgagtacggtttatagtctattcaagactattattatggagagtcttggatagactattatagtagaagtagtaatgatcgttatgtttaaaataaaatttcaacatggctcggattatgtttcatcgagccatgttcttgtaatggcagactagttcgttggttcctcttttttttcttgcttgtttcttaaacatacaaaaatttagcatgacaaattttttctttccaaacttgaatacaaaaggtggtagtaaaataatgtattttttttttaactatgttcatgaatcaatgggctaataatattctgtaaaaaaaaaagaagaaaaagtactaaagctatttacatctaaaagatatgtcaattttcctctttcttttctatacaattttccagagttatttttttgctattctgttgttgaagtcgagtatgtgtgagaaaaaataaaccaatcttctaatccacttgctcttcatcctcatcttcactgtgattcttctcctctgcaataccttctttatctacaggctcgctttgtgtctgttcttcgctatgtacagcaccgagatcagtctctgttccatgaccctccagagtagccactttgtcatcttgtgtagtggtacttggactctgtattgatctgtgtcatagtatcattgtcaagaaactgtgacagagacagagacaaaaactttcaagtgtcgagtataattagtatcagaaaactcactcgtttatcacttgctgagaccttggagattggagataaccccagactggaaccaaatctcttgttcttgcttcaatagttcgagtttggattccttcaatctccatctcccttccacctccaccactaatctcttcaccccgattcaataccaattcttgaaacctaaactgttttgtgcaaaatatacgaagtatgagagatcatccaaacaacacataaccatattccccaaaaaaggaaactttacctttcgccttgcccataagggtagctgagtcggcagatgcgtttgctgttgttctgcttcatatatgtacaaatgacgcttatccaccacacgggtagttcctttcttagatactttccaagcttcctcaacactttgttttctaacaacctctggaaacactttacttttagaatccactgatgttccacctccatatatgtcactgtgggggtcatgcgtctctcttctagattggttttggatcatggaccaccttcttattggatctaccgctaattttccttctgtctctagacctgactcagaatcaaaccccgtcattgcagcagtctcatgaccaacaccaacctgatgttcccgtaacgcatactgtgtcatacatccagaaggagcaaacaccagaagatttgtcttggagcacatatcagcaacagaaccatagtagttattgttactcttttcatcgcagtaacagaaagtggatgtgactgtacccggaaccgagcctgcaaccattccagctgctgcagatgctgcaccgctcacagtcccaatccatccgctgctgtttccgcttcttatcctactgattgcagacataggaaccggagcatccccctctttctcaggattaatctcaaaaagatgacttgtccctcttgaagaaccaaccacaatcaaattgctatccttgctgaaacatatgtcttgtatcacctgaaaatccacattaaggtaaataaataagtatcacatttttcaacatgtgtaagtgaagggctctgcttaccgcattagtaaaaccgcgctgaagcctgaacagatgggcaaaagtcgttgtcttcacagctctgcttgtagagattgttggcattattctaaagacgttaatattatgcccctgaatcgaagcagtcaccaaaagcaggccgctttggtcaaagcacaaagctgaaatcggactcttgtgtgccttaaactgcgttatgacgcttttgtttgtgatatctttgacaataacctgcccataccatgaatatgtttaaggcacataccaatggaaaaaatcaacttgaaagcaaaaacattgaggaggattttgtgtataccattcctatgctctctgcatctgctactttttcattaccaactccaatgcctttcaaaccaggaatatacggattgggcaaaacctctgagcagtatttagtcaatgatctgtaccctttgtctccaagatttgctatcccagaagcaagctgcttactcgagtctcttgcaaattgtgcaacactgggtgatgatgttgacagtgagacaatttctgaagtaaaaattgcagaacttgaggtagcaatacgacttccactatacgcaatccatcgtggaccaacagcaagagggccatatccaacacccaaggagccacacacaatggagttagttacaatcctgtaatccatttccagtgttgcagcatcaaagcaatctatctgcaaatacatatttttaagttacacattgttagcttcagaacagaaaaatcacaaaaaccaaaagtgacacaatatgacatacgaacctgagctgcttgtagtacagcaacaatccgagaacagcacctaaccgaatagatggtagcccggaatttcaacgtatgcacataagactgagactttaacgagtagacatagacattagtaggagtagctacggtttcacttccggggttatcagaactgatctttttacttgaataatcaccacacacagccaaaagaggacggctcttataaaacctatcatctaaaactccagagtttattggattcagtagcatttgcataaagaatgcttgtccatcatgtgcagaaactataacatgaacattctctgtatcttcaacatcccaaacttgaaatccagacttaaatgctagtagaagaactcttcgtgtatcaccatcctctttctgtagattatcaaaccccgcccatagtaccttttccaaatcaaaaacaacacaaggattcaaacttcatcaaccaagacacatcaaacaaaacactccaacaaacctgaagatcgctcttttaaaactgaaatcaaatacaatacctgatcgtgatgagattcaacggcggaagaagcggcagatacggcggagcgagcaacagtagaagcaccagaagaaatcaccttaaggcaattagacaaagcacgaaacgagctacgagctgatcgtgatacaactccgtctggcgacttgggagaagaaccgtcaccgtttttcttcataatggtggaggaggctcttcactatcaaaaagctttgatctttagcctccaaatgaaacaaagtgtcgatttttattctctatatcgacgcctgagatatatccaagcaaaaatgaatcgacgagaaagacgggggagagatcaaatttacaatttttaagagcgaaattgaacaaattcgattagaatcttttaaaaatagaaacaaaaatacacgcaaactctgaaatgtcacgaagcaagaaacacacacaatcaatagaaagaaacaaaaagatcgaatttttacaaaaacccagaagaacgaatcgatgatttgtgagttttttttttcttgtaaaaattgaaaagaattagaagagattaaaaacccagaaagaaagattaagactttggaaacagtaatctgattaggactatggtaacgtttaagagcaagaaaaggggaagagatttagaggataagaagaagagagagcgaagatgaagaagacctttaaagagttgttttagaaatctgttgtttcaaaaaacttcataaatgatttgtttttggtttcttatttatatatcaaaaaacaaattttggattaagttgttcttttacgtatcgtctttgtatttactacagcgagaaagagagactcaccttccacgtctctttccctatttttattcaaattttaaattaacataaatcattgagaatgtctggttttgttggttatacttataccaataattaaaccaaacaaacctaaattattaattgaaattttaattctcgtagtgtttacctacccattaatgtggtaaatttaattttataacaaaccggtggtttgaccaaaaaaaaaagaaccgagtttgaactaaatttagcttatatgtattaacattcataaactctaaaccaatcaaatccaccgaaattagtacgacgtgcgctagtcttatcctttttcttttccgtgacgtgcgctagtcttagatgaagattttcattagtttaattttttctaatgtgtttttaattagtttattggttaaataaaatactttggttcgactcggtttagttgaaccggtcactagctcaaaaaactgaccggaggacaatatacgacatttgatgtttgaataattattaggcttatgttaggctcactaagtagctaattaatggagggtgtttgaccataagtccataattagtttgaccataactaaaatgaaaacttggcgagcaagttacttctcctctgttttactgtaggagaaaatgtaaaacatcaccatgtctctctgcttcactatccacctatgaaattgtctttggtaaagtagtacaagaagaacaccggccggaaagatcatcaaatgaagacaatagctgtaatggtgttcaaacactcttttaatcttttcagtaccaaatctatttatagaaaagaaccatgtcaaggtctcaatccaagactaatcatgtagatcttatcctaatccgctgcatgtaagtcccaagtatacatatatataagcttatgtcacacaattctcaataatttattagaacacaaacatgagatttaagagagtgtgagtgtgatgctaaagatttttgaatacccaagaacatcttttatttaagggggtagggcaagttacattacactagaaggtgtaatattgccactaagactctaactcatacagtacaaacatttatctactatacaaacacgaacacgccacaagagagagactttttattatcattaacaaaaccaccatgtgtacgtgtgtgcttttatagtttggtcctcttcatggtcctagtaaggagatgccttgaactggcaggatccaacggtagggattttgcaaacgttaggcaagttcttagcagtctgaaacacatgttgcacctgttgctgtccatgcattccctggaatctgacttgttgagccgcctttttcagtgtaggacacacacacatcttgtccacttgccttaattcattacaacacattttaagagatgactgttgttgaggccccattgggttctcatcgtcctcaagatcgacatcaagagtgagctcaaagtcatcagcttcgtatccgattcttccttgttgagctctcttgcggatccattgcttgcaacctcttagttgctgatgcttcataaactccctctggcacttaccttgttgtgggttgctcacgtcatcatcttcctcgaactccaccactgtgcggtagatggatgcgttggctaggaggatgaagagggcaagagttgcgaaaacgagaatgagcttagccatagtttcgattttttaaaggtttcaaggtttttggcgagtgatggatggatgaagtgaagtgaaagtgggaatgaatatatttatggaggagataggacatttgcatggcattcacgtgtaataagcatgaggttgtgtgtgagcatttggaacataacacgaatggagttttgtttggattaggtgttcgaagttcagtaatgtgtgcatgtgtcaagtgaatgatggagacgagtctccgcatctacaacagcatgcatgctcttgacttgtatttttatttatttattttgtttgttaattccaacaacaaaccttaatttatattacattacaatggtataggtatatgtcaattcgtttattttcttggttcgattttcatttgaagttctttttggtaattgacatctacttcggattagcttgatcgcggaagtaaacgcacaactaatagattgatttagataaataaatcattgtgatcttatcctaatgcgctacatgtacgtcccaagtatataagctatattatcattaattctcaatagtttcttaggtcatagatatgacatattacatataatccaagaaaagtttttgttaaaaaatctaggacatgtccgatggtattctatgacgttccaagatcaacgaagtttcttttcttgcatatttatagttcaagactataacctttccgttttctaagtcaaacctcaaatcctccgtgcgacatttttttatgagtctacgtaggtgatccatattcactacttcctctccgttcactttcttcacctgtttacaccatatatatataggcatgatcaatgtagaatcaaatccagagaacataaaccaattggtattgaccggtttcttcaacaccagctaaaaaatgtttaataattggagttgggattatgtacctgcgcacaaaacaacaaaaattgatattagttaaaccgtttgtttgcaatctcaagaaaaatatatgctataagcaaaagtaattgagtttgccacaaatttaagcttattgtgacgattttaggtactaaataattttttcaatttcaatgtggcacacattcatactatatatatattttaactcacttgtcagaaggagaatcattttcaaataccacaccagcaactttgttgcccatgaccactggaccaccactctttccaccgttaatacacgcatctgtttgtatcgttaatatttcaatggagctgtgagcatacttttgaggttcaactctcgttacaataccttttgtgacagatatgatatcaccatctgtatttgcgcataacataactataattattagtcattttttttaattgaatcatgattgctattcttttctcaataccacatatgatcagtacgaaaattttaaagcattgtccaagacgtaccacgaggataacctaaagcgtagatagtttcaccaataaaggtatatctccgagctccaaatatcctcccaaaactcttcactatcaatacctcagatagctaagtcacatccctacccaaacgctttaacttctgctttgtacttagtgggtgaaccatgttttctcacttgcaggtatgagtgatcacccacaacatgagcgtttgtaagaatcctcctcccggagattgcaaatcctaagatagatattccaaagccgaacaatataataccatacggttttcttaactttggaaatctaataaagaaatcacacgagagagagagaaagagagaaatgtttatgaataccagagcttgagtattctttctcagttgtttgccaaggttgaacaacatttggctctcttgaaaaggagaa

SEQ ID NO: 901 - DNA, 80315 bp, Arabidopsis thaliana
gatcttcaccaccgagtcttgagccagatcaatatcgctcacagaagaacaacaacgataaatcaaagaagcattaaaagacgaaccaccacgaagaagggaaagagaatacaaaaatagatgaaccggagtgctcgtggagttgctgaacctagccacaatatgatgttcttgttaagtactatgtttacttgtattaacgatacataagatatatcatttacttgattactcatattttcgatccataataattacactacttccttttcctctagatttaaacttgctaacaaatatttttaaagattttaatggaaattgttaacattttatacaaggcttttatataatcaaatgaaactatagattttggtaacacataattaatctgttgtgctctctcttttattttactatgggaaaggtccaatgggcttaggcccaattatttaaacaaaaaaagattctaactttcttctaatggaaaagaaaatttgcgatcaagcaattactctctctctctctctttcttctgccatcgccaaaaacttgtcttttgcttctgggttttgcttcttatttttggtaagattgaatttttctttcaccccatttattatttcgtgcttttagatcgttgattgatctgtatcctgcagtgatcattctttaatttacgaaattgttttttgtgtgtgtgtgtgtgtgtgtgtgtgtgtgattgataatgttgttggggactttaggtgccatttttgtcgattttgtggtttaatttacctattgtatattgtgattgaatcgattgggagggtattgagaggtggttgtttcaatctaacaaaatcaagtgcaaatccattttatagccacttatcttctgctagtagatctacttgagttttaagagatgtgtcttctttaataccattgtggttccttttttaatttcatggcttaagtgaatgttttttggcttctttggttgctatagcttatctctgatttgattaagtagaatcctttgtactgaagtgactttttttgtatggatctaatgtagaatatagtcattggagatggctccggttggtcctcgatccggtgatgcgatcttctctagcattgatcgtgtggtaagttcagatttcaaagttttcgccttttttatctgttcctctttgactctgatttatagaatttggtatttgatatgctacattaccgatttgcttatctatttcttaggatatgcctttttctatgtatgctttattgcggttggatgtgtttttgtaatttgtaaaggatttgagaagtcaaacttgaagccagttccgaatctttgatagaattttgttatggagatactgtttgatcttgtggaaattgatgatttgtagaatgcggagttgttcacgttgacgtatggtgctattgtgcgtcaattgcttactgacctggaagaagtagaggaagttaacaaacagcttgatcaaatgtattcttcttctacgatttatgtagactctcttccatggttttagttttgtatttttgtcatcttgcatttgtatatttcattcttgtgtttgaattttggttgcattatgtttctggttcttttgttcatatatctttctaataatatgtcatggatgggatgaataaagcattgtactctcaggttcatactgatgagtgttcgattgtttagacctttatcactaattttctgtttattttgcaggggatacaacattggaatccgacttatcgatgagtttctagctaaatctggtgtttccagatgcgttgactttaaggaaactgctgaaatgattgccaaggtttgtaatttccagtgacttgtttagtatcacgacgttacagtttgaagtgtctccgggagtaaaaacaacgaggaattaaactgcaagatatatgaatgtttattccacttgacactatagataaaaccttatatatcaaactagagcataagcttcttaatgtctagtagatatcactcctttggtttcatggtattgagaaagcagtaacagggctttgccttattgcacaggtgggtttcaagatgttcttaggagtcactgcatcagtgacaagctgggactcggacgggacttgctgcagtataatcttagaggacaatcccctagttgatttcgtcgagcttcccgatacttgccaaggtctttactactgcaatgtcttaagtggagtcattagaggagctttggaaatggtcagtctccttctccattatcaagtgcagaacttgtttgtgctcagtgttttatgttcttattttttgtctgcacaatgatcaggtctcaatgaagacagaagtgacatggacgcgtgatgttcttcgaggagatgatgcttatgagttgcaagtaaagctactgaaacaagtcgctgaggaatatccttacaaggatgatgaataaatatcaatctcttatcttccctcttcctcaaagagaaactaattactgttttgtagtctctttctctgcattcttagctttgttttttttctccgcaaacacaaaactataagctatgaaactaaatactgtttaaatccatttcttagtgttctgatgtgacaagagttaatcgtatcacaatgtctcaaatcgtgtaataaatagatcaattcagtgagatcagagtgtgttttttctttcgatatctccaatattttttagtttacctcatgaagaaataagacaaaataaaataacattaaggtgtcgtcatatgattggttcagataaatctgacgtggacatcattggttattaaaaatgattataaatctctttgtcttaatattttctcaccgtcgagaaaacaaaacacaagttgcagactttatccaaatttagggttttctctttttttcttacttagttatcatcagatcttcaaaaccccaaaatttgcaaatcaggtaataactttctccgtatgtatctcttcgatcaccgattgtctgtttctttgtttgcttttctcgatccgttattgaatttttgagttcgtcgttaaattttgattacatcaatttttcttttcgattcgattcagagagattgaattgcaaattatgtgccagatcttcgtgttctgtatctgattccggatcttggttattagttttttttttgttgttggaatgaattcaacaacgatgattttgatttggtcaattgattttttaatgctatagttttaaccttataggaatgtaattgaactggatcagctttacttgaattgtttggatctagattattcagacaacatctttttaactaaattgaaacatatttgtgtttgtgttcttgatgatcatgtgaatttggtagcataattttcttgttgagatgatttctgagatgggtttttgtagtttaattttcttactcgatgaaccatctcgtgcaccttgcaaaatcttttgttctatatctcattgttcgatatcaaactaatgaggttaacgttttttggtgagacgaccagttatgtaacatgttgttaactatcttcatgtttgaatcgattttgattggatgttttcatgttctatcatattctgcggttttgaatcttctgaattctaacgtgaggttatccttcttgtgcagatctcagcttcccggttagtactaccctcaaatcaactaagtttcatgtctgaacttgactcccaggttcccactgcctttggtatgtttctactctaccaaaacttgagattgtattagtcactgatcttcttctacttgttttagatacttgaacatgttatcatttgtaaatacatgttaatcaaagcatcattttttgtttgattatgctgtttatcttacatgggaatctgtttatctctctcaatttgctgttgcttgtttcagatccgtttgctgatgcgaatgttgaggactcaggtgccggaacaaaagaatacgttcatatccgtgtccagcagcgaaatggtaggaaaagcttgacaaccgtccagggcctgaagaaagagtacagctataccaagatacttaaggacctcaagaaagagttttgctgcaacggcactgtggttcaggattcagaactcggacaggtaggttttatcaaaacactctattgatccatgtagtggaaagtggatgataatatttctgtcgttagtgcctgcttgaacaaaccagaatgatttggcctcttatctgaacatttgagcttctctgttttagttttgtttatggtttgtgttgatttgtaggttatacagcttcaaggtgaccaacgtaagaacgtctccacattccttgtccaggtaaatatcaataactctacgagtctctttactgctaaaacatacaaactgtgtaagatgattgtctgatctcactgtttctctgtaatcacaggctggtttggtgaagaaggataacatcaagatccatggtttctaagctatctagtggatcatattattaataaaaccatatctttttctttcatctcttgttgcgaatttcgggtttgattcatcaaaatcgtcttcttcctagtgttcttcttctgtttggtattcgaattttaatggcttatgttcaccatacttcttcccctgttttcgtgttactctgtttcacatcttacttatcttataatatcagtttgttaagataattctgctctaacttgttataatttttctctacaatggttcatagttttaaaattatataaggaccaaccggaagtttatacggtcgatactttccaagtataccaaattgcaggttttagtttggaccacaaaaaagttcaatgatcaaaaaggctgatgtatcttctcactagtaataataattcataagcacacaaataatgataaatgaactgtctctgtcactagtaaagtccaaatgccgtctctatcgtacaaagatatttcaccttcttgttgttcgtgtcaccacacactcactgcaactggctacagatgttcccagataaaagcttcgagatatttttttatacatttattttgatccatatcacaatattaattgcaaagttttttcccttttcttcaagaaatagagcaatccgattcagtcaattctttgaagttataacagtaatcaattcgccattaattttatacatttaatcaatgtataatataagtatttttctttcataaatgggggaaaaaaatagagatagtttttgaccaaaaaaaaaataaaaaaaaatagacatagtcattggagatggttttactaaatttgggcttgttcaagagaagtgtcttttcttcattcaatcagaaccgtgaagaaaggagatcgttactttccattgatggctaaaaattaaaataatcacgataaatattaataatacaaaaaacaattaaaataacaaaaaaagatcaaaaattctctaacccttcattccttatctctgacgtggccatcaatcttcagattttcttcttcttctaatttaaatactcaacaaccactcttcacttcaccatcagcatcactaaactcgaaccctaaagaaaaacaaaaatggctgccatagcttctactctctctctttcttcaaccaaacctcagagacttttcgattcttccttccatggctcagccatctccgcagctcctatctccatcggtctcaaaccacgatctttctccgttcgcgccacaaccgctggttacgacttgaacgctttcacgttcgacccgatcaaggaatcgatcgtgtcacgtgagatgacgagaaggtacatgacggatatgatcacttatgctgagactgatgtcgtcgtcgttggtgctggatctgctggtttatctgctgcttatgagatcagtaagaaccctaatgttcaagttgccattattgagcaatctgttagtcctggtggtggtgcttggctcggtggtcagcttttctccgccatggtaagatttagattcatttgcatgtgtgattttgttgaagttttgagttctgtttctgttttaatggagaattagggtttagattgaatcattatgagtattgattgcttgtgcttatggtagattgttcgcaaaccagctcacttgttccttgacgagattggtgtggcttacgatgagcaagacacctacgttgtggttaagcacgcggctctgttcacatcaaccatcatgagcaagcttttggctcgtcctaatgtgaagctcttcaacgctgtggctgctgaggatttgattgtgaaaggaaacagagttggtggtgtggtgactaactgggctcttgtggctcagaaccaccacacacaatcgtgtatggaccctaatgttatggaagcgaagattgtggttagctcttgtggtcatgatggtccttttggagctactggtgttaagaggttgaagagtattgggatgattgatcatgttcctgggatgaaagctttggacatgaacactgctgaggacgctattgtgaggttgaccagagaggttgttcctggtatgattgttaccggtatggaagttgctgagatcgatggtgcaccgagaatggtgagtattcttgacctatatatgtttgatttggtatccatagttttcgttagatcatgtcctgagttagtttgtggtgatgtagggaccaacttttggtgctatgatgatatcgggacaaaaggcgggacaacttgctcttaaggctttggggctaccgaatgctattgacggaactctcgttggaaacctaagcccggagctggtcttagccgcagcagattcagctgaaaccgtagatgcttaaaatcaaaaggttttaacgttaagaaaagtttcccttgatccttcggatgttgaaggagtgcaataaaaggagtttaggtgtttaatatgtcttgaacttttctggtgtctttgtttctctcttctgaacttctgtgtaaaatatcgtatccgttcattcgtaatgcgtatgttctcgttcttctccttctttatggctctagtacaagcagctttctcgttgtcgttggcaatacaaaatctgtctaaatttgagggatgagattagtgttggatgtcggattcttgtcttcaattctgattcttatccttgaagaaattatgtatagatagagctattcaatgtctatagtttctctgctgatgaaagaacgaagagttttatgattttagattcagagaacagaggaaaactgtgaaatagaaagaaaaaagtttttacatttcttttatgaacatatatatatatatatatatactgatgtctgacctggaattcaaatactccatccttatttacatatataatccgacttagaagtgcaacaatgagtttagaaatgacatcgatgataattcttttgtgtgctttttttttgttttggtttgtgaaacaaatattacaaaatgtgtggatttgtatgaacagtttacaacgagaagttgttgtgtaaattgggctcttttcttcagaattcttgccacccaaggaatcgttagtcacttttttgtcgccggttttgtgagttatcaaatatgtataaaaacatacaaaaacgctactactcgtgaatcttctgcaatgctatttcttggcctgaaataccaaaaacagaacaatcagagagttataagatagctaaagaaggatcatacacaaactcataagagtataaagcaaacctttttaagatacttcttgtgaagtttcattgcaccagtacaggcttttttagcatccaagtttccggttatgtcgtttaagatctgagcaaaatacacagattaaagaggacttcacttgtaaaacagataaaaaccgctctgaattctctgcattacctttacaacgtcatcaagtcctcgagcttcggtcattaacttagaactcttgtctttcaaaacactagccactaagaaaacagagataggcaaaggaccttccgcgcttttccctccattcttcatgttctctctctcgtacttcccgcattggtttatcgactttggtttacctttggaggaaccttcgattctctctccctcgaattgaggctcctcatatagagaatacatttcagggtcgtactctaatgcccacatcatctgctcaaggaatacatgtacgtatcagtctttattagtgtgcggtcaaagaacaatgtttctgagtttgtgatttgtgaagtttataaagagacgaagaagaacgttacctcccaaaggtacaaggagtcacaaaaggagaattctcttcggaactgaaccattatcattcgaatagcaaagagatagtcaccaccacccaatttctctgcatttcaagatccataatgtctttcaagatctctcttgctcaaccagtgacgattagttatatactaaaagtgaggttagaaagctttaatagatacctaagtgatggtgaagtttggggtcaataatctgagtgattgaagccaaatgagtaagctgtgcttcgactccaactgatctccccgtgtcacgaaaattccctcgctttcaagttcaaaagaagaataaaaaacctttagtattatctgattacagagagagtcaagacaaacttatatgaacacaaaacatagaggtatagtaccaatcggcgcatcaatctttcgaaacaccaaaaagcatcagcttcgtcctcaagaagcataatcataggggaacaaagatcactcattcctactcagaagaaagagtagatagatcaaaacataagaatcaatcagggcttgaacaaaggataaaccctgttctttctttatatttaactgcttaccttggcaataaccaacatcattgtctatccatgcgtaaagagctagaatgtcccaaagcttagacaagttctcctttttctcatagaataccaaagtcctatctgtgcgatttacatcaagacctgaaaacaagagtttacgcaagtcaattcaatgacatattgaattatctctctgttgtgaccaaagcagtgttattacagacctatttggtgaagtgttaacagccattgaataactttctggtccaaaggtccacggcttgcaagatctttgaagaaatctgaaccatttgcacctgagataaaacataaaaattataagttctagtgaaaggtgtttgttctactgtttcctagagcaaaagatacaaatttttacctaaatttgtttcttgtagtacaataggatcgtaaatgggttcacccttgttggtaattacaggtgcagtaatgaatccaccacttccgatgacgggaaacatttgtttacattcctccttccaagaagcatactgcaatctgaaaggaaatatccatacttcaaaaaaaaaatatatatagagcaaagagagtgcaagataaagaggatctattataaactaatatataggtgaaaaagaacaccttctacgttgtcggatttgctctctttcttcaaatgtgctttttggatcataacaaccaagtaagaattcccagacttctcctctaattgatggatggatcccctagaccagtcaagcaaaaagattgaaatgataagaaaaccaaatctgataccgtgttgctaaccgtgtaactcttgattgaaatgataacaaaagcaagcaaaaggatttaaactataagtgattttttgtatattcaggacagatttagttaacgttgcagtctttggaaacaatgtatagagacttacccctcgttggattcgacttagagtcttgccaatatcaaggaatccttctgttgtaaatgcagcttgccattttcttacacttagagttttaccaggctgcacaaacataattaagaaacaaggtaggtcttgtcagcaaattgagactctgccattctctaaaacataatcatgtgatgctacaaagcaagatcaatgctagatatgtgaccctaaacaatcagcatcagaaatcataaacattgatatacccaacccattaaaccataactagtactgctctcttctctggtttgatcacatcaaaacaatgaataacaatggcaaacaaaatctccaaattccaaggaggattctgcatttctctaaacgaaaccatgagaatatcaaatctagaaagagcactaagatcaataatcccattataaatcagcatcataagacataaacatgtcatagcctaaatcataactagtaaatgctctcatcgcttatttgttcatatctaccaatggtaaaagttccaaatccaaagagacatcacgccgataataatataaataatgctaaaaattagctgaaaattttagaatgaagaatctaagcaacaccaaaagaacacattttgaacataaacccagtaaaagaatctgaaagctcagagagaatcgcaaacgccaatctcattgataacgaatccaatgctgaccaaaatccaataaaagtcaataacaaagatgaaagtatcagggaaaggaacaaactttgatcttgaatttggtattggggacatcagtgcactcaggacgaatcaggtaataagaatctgctggttctgcggcggctccccacatttttatcgaactttttcaatctccctcaaaaaaataaaaattacaactttcccgggaaaatcaaatgaaaaatccaaataaaaaatgggtttttttctacaaacaagaatggagaagacgaaagagaaaaaaaactggaaccctctcaaaagatcaattcttttctttgtcaaattttggagaagaaagaaaacaaattagagatctaattaagaggggtccagtttttgagattaaaagaaaagatgaaagacagaacttttcttttcttttggggttgcaattattttactagtaatctaattaatcatcaactatgttgagtggtctctggagaagcaaacatttttaatggtggtgaattaagaaggtgttgatcgtttggtcaacctcatcgatctttcttttattatctttctcttcccgtttttagtaaacgagagacaaggttgcgttttttgacaaagtttctggtttagtcaatctgttgacatagtttttggtttagtcaatcagtttttggtttggagttttgggttagtgattaaaccggattcaaaccctctacaggactaagagtctttgtgtttaatcgaacttttacaaaaagtgtttgaacccggtttactcactatgccggatttctatactttgataatttagttcgatctccatccgatttgatgcaatttgtgttggatgatttaatttttgttagaactaaacacggtgacaaaattagctttctgtttaagtattttcgatttggttcggtttttatttgtttgttcttctccaaaaccctagaaaactaggtttggaaaacattggaagaaactaaattaggtgtcataacccacattagatttttcgccgagtgaattaagttgtgtcttgttttgacgtattcaacgactccgacattagtcgttagaaaggtttaagtcactcatcgtttcagccaaacgacaaaagtagactaagccaccccaagacttgaaaaaataactgtttctattcagagacaaaataatggaattgtatgtaagcgatgtggttgatcacaaaaaaaaaaaaagaagaagaacgtaagcgaagtaaactatattgatgaaaaaaataacagaagaaataaaactaaacaatacaatcaccaatataattacgcccgatcctctctagttgcccaatatacataaaatgcataggtgaaaacacatataaagaatgcaaaaagggcaaaataagctataaacgccattagtcccaagccctccattcccccttctcgttttgtctgtatactgtgtattgaaagccgaaagaaacatatattcaataacaaagaagaggttttataataataattagcttcgaaggaaaactttcatataagtgatgaccaaacaaatggaaacttagatacgactagtgaataatatatatcttactattacctcttgtatctaaataaatggtaaattatagagcgagtaaggagattgaccttttacgaaaaagaataaagaggtttacctctacaaataaatggaaactatataaagttcttaatcacgtacattcaatatatatatgcatatcataaacatgccatgttaggattaaacgctttccaatggagaatcttatatttaatatacaaaattcgaaatagtttatagtagaaagcatgtcatatacccaagatttagtgaatcataattgaaaaagcttatttatgtgtgacaggctaagaaagtagaaagccggtagaaattagcaatccaaatatgaaagattcatgaaacttaaggaaaactgttgaattgaaatatcataactaataattttgagtcaagaaaatgttaacaagaatttcatacgtttgtgtgaagcagcaaaatgtctctaacaattctctttagaaaaaattcagaccaatgtattttgtttgtatctcttacttagagcatccccattggtgagataccatgtaggtatctcaccaaattaatattaatatttttatagaaattgtttttgagaatcctaatttaaatttatatctccattggtgtgaaatccatttgagtattttatcaatataattttattttattaatgttaattaaattaacactttatctaaattttcattaatattctcatagacatttcaaattatatcttaaatatatccataatctaagttataaaagaaaagaaaacactagaaatatcatgggtaacaatagtaaagacatgaaatctatataaataaagaaataaagtaataaatatacataaatttatcaaagaaataaagtaataaatatacaactcacatgctatatgtaatttgttacacaagcgtatctcaacaattaagtgaataacatatataacatatgactgaaaaaaaatctaccaaatattaaatattctaaaatgaacaaaaaatgatataggaaaccaaaagaatgtaaggattattatttataatcaaccaagaaaattggtgaccatagacaaaggaactaaacaaagcccttttttcttcaagtctattggtagtccaccttggtttggcactgcactcactcttttctcctatgtaagattatcgtatcgtaaattcttgttagaagtcggaatataattggtataacatatgattgaattaactatactaaggtaaattatatagttaatatgtttcttacatcatcacccacaataccacccccgtgtctagtgttgttgtcttgtaggttcatcatgctatagacctataaaacgaaaaacaaatcccaaattgtcaataactgtttaaaatatttatgtactaaattaatttataaggtacatttgacttgttaaagctgattattatatacattgatgtcaaataggaacttaagaaatggcacagattgttgcatcaagttgttggataatatcaattatgagtcaagtcaaaacctaaaattttaataaactgtttgtctctcttggcaaaaagaaatataaattcattccttatctttgacgtctaaccttatcatcaatccaatgtcctaaaacatataatcaccatatgactaatatagataatttatatatctgtatcaaagcatatttacttataaatatagtcggtcgtcgactgtttgtacaaaacgaaaaaataaataaaaagaatctataatcacgttcttagaaaatgatacgataaaaacataaagaaggaaactataaaatgaataatgcctgaaaaaaatcatttcatcacatacctacagttaacttaaaatttatgaagtgttcttgtagtgttaattttcacgagttgtatagtaataatcgatcttttgtgttgatcaccgcggcgataaccaccaaactaacatcattttgtaaattaaaattatatgtattcatttcgagagggagagagagatatatatactgacgttagggctaccagaaggagaagaggcagtgtcttcaagatcatgatgacggccaaaaggaatctctctatttcttgtcctcttgatgtccaaattagatccttcttgcttcgacacgttgagggtcttcttagtggccacgaatgacgctgcgtcggagacagaggaagagctgaaatctccgacgtcaactatgcttgaagaagcctcgaagaaatcctcaaagtacatcgtccagctactttcttctggattttggtcgtctgtaaacatggccgtttcatgtttgctcataatgaaggcattgttcattgaactctccatgaaaactttgtaagagaaaaaagaaagagagttgttttttgttggttggtttgtgtaatttggtggcagcagatgaaaacatgcgtgagggtttattatatatatagtgaagtaaataaataatcaaattaaccaaattagtattaataaattgttctctttaatactattttgctgtcaatgatggggaatgtaatgttggtttggaatcttggtttgtggggtcgctctatctgttgtttctctatttggttggaataaaagttggttgaaatgttcaaaccagttcaatatactgttatcctgcaaattaaaacataaatatgaaattttatattaaaaataaaacattcgagcttggtttatgaacacttttatgaatagtattaattattcgtgttaaattatctaaaatgtcgtaacatgaataaagtagaatattgttttgtaaacggtctgaagtataaattatgaatgagtagttaaaatattaagaaattaagaaaaacatgatgtagaactatatgattgaatcattttacagtatatgcaattattccagatagttttttttttttaacttgcagttatagagacatggttacttttttaaatctttttttcaacaaatagtcaaatatgtaaatgttattcacagactgtatatttgactgtatataacatatttgtgctcagctttagcttctaagtttttggagttgtattttccgtcgagctactctattattactttagcatctttatggaataattatttggtgtatccctaattataatttatatacagataagtaatagtatagactagtgtaagaaacacacatttatgaggtcgcctaaaacaagagcgaagccggtctattaaaataataattataatttgcatttctatgtgatgatatggaggaagatgtgtcacattctccttcatataggtaacataaagtgtcgtatgaggtttaataacatgtaaactacttgcaaggtttaatgtcaatatattaaagccaactataaaattaaatcttaaatcttataacaattacatgtcctccgtaaccatgtttacaagattagatttagattttagagatgtttaaaagtagcacaaatatgtcctcaagtttagcatatataaaccttaaaatctcgtgttaacacgtttagtccttgtattgtgtgtcgacggaaaaataaagacatatgtatgtggaaggaaataaagtatcaggttttgtgattttgggataacatgtatatgaaccaataatgctacatgtgcattgtaactttcctccacaattagtattgataatagaaaacaaggaataaatagtctgacgtcgcattttcgctctttcctgatataagttaatgaatagagtggactgaaacatcattagattcctaattaaaattttctcttattgatccacttggatggtcaatttactaacttctggattatgaataaatcaatgatcaaatgcgccggtttcacattatccaaaaacaaaaatataatagttaaaatctatgctactactaggcgcatttcaatcagttcccttttgttaacaatatagtattttattaataaacaaaaattagtaaaattttgataacttgaggagcatggttcatgatttaagagaagaatatggaaggctgtcatgctgatgaagttaaaatttgtcgaccatatcgatattaaatttgaatttaaattcggcatatcacaccatttactgttcaaattgcaaagaaaacgaaaagtgtgataaccaggaagttatatggatgtgactatgtgagtgcataaaatcgaaatataaatcgatgtgagagcatagaactatatgtgaatgttgaatgtatgaagttacaaacctaaactataaataaacatggatcaaaatgatcagtcctactttcacccgacatcctaattgtcttttcttttccttttgtaatctccaatgtctttgattcgttgtggccacttctgtacaattctcttgagttacttttttttgtttgtatcaaaaaatgactaaaaatgtaattcttgagttactttgtacctaaacatttactctcttgcaagatattccactcatcaaagtttaggtaccacagacagagttacgtcttagcaggattgatattcgcatgtaaagggttcgaattttgggtgttattgatcatgaaacaaaaaaaaagattgagaacagcatcctagaattccaaaaatgatcactttactgtaatttagataagaacattgggtaatgatcactaaaacaaatacaacaaaaagatctagaatttgtcatattccaatatataatatcattgacttagtaaaactccttgacatacgtcaatagaagatcttgcaaagattttatttcactaaataatgttcagaagccgaacttaagaactaattatatatcaatatgtgtcctttctttcatttatttaactgttgtttcgtcaggttatatgtcgacacaaaaattattttacctattgtaagccttattttattacaatcactaacgtgacaatggccactgaccatttttttatttttatttttatgtgataatctaggccaaaatccgtctaatctgtgttagagctcgactaatctgaaaataggttcaagaacaacgaagctgttcaagaatgattttgtttccctttaacatctattttgttaaatttgttatatccagtttacaaaaagactttatcagtaaaccatatttttgacataaagtctacgtggagtggaggaattagtgggttccaacttacaattattgctacaaaactatataaattatgatcaaaggaatattggtataataaggaatattactttgtacttaaaataatcaaatacaggtcaatgctttgtatatttacaattattattttttattttttttggggtcacatatcatttttctttttttaacaactggggtctacatatcatacggttagaggtattaacgtagctcaccggtctcgtgaaaaaagaaaatagctttcactatcactctttccgcgattagtaatcgtaaatttttttgttttaagtacccaaacttacaaaattacctccttttctcttaagacactgagttcttgaggatatactttgtacataatgtaaatctcatatgtttttattttctctaagtcttctgaattaggccaaaaaaaaaagagaaacttagaaattccaaatcgacacgtatagcaatataccgccccgggaaaatgaaatgcacatgctgatgctatgacatattgacatgcgcatgtgagtcaccaaagattctcaagttgttaagctaaatatgattatgagagcggttaaggccaatgattaggaattaggatgctaagccgtatccaacagaaacaaatctttaatatttagctgtttcctaataattgtctatcttttgtccttttactcttgaaaatggttaattatgatactacttcatacgtattttagatataatattgttaatttacgattacaaaagtgttgaaaaaggactagtttaatggttttttctcataatattcttgttagtgatatataaaagttgttgtattagaacaatttgtatcaagaaattattaaatttataagttaaattctctcttatatgaagcaattatttccgacaagacatgcatatgatgctccaacctagaacgaaagctcataattaactgcggttaaatcataacacgtactctagtatattaaacaagaattgacatgtagcttttaggaagtataattacaatcatgtacacagtactaatgtatattgaattttctacagtgttttttttcgggttaagagaatcaaactgtattagactctgaaatggttgatgcagaacaaaaaacaaatttgtgggcttaatgggcttcgaccgggcaagttatatataacatgtaccgacaattgagttgagttcaattgtagcatgtacactaaacacattcgaaacttgattctgcccatatttaaataaaatgtatatacaataataagtagcatgtaatatatagataaaatctactctatataaaaaataaagtttttttggaagagatttttttatatacttaattacatgccatgaaattaaaatattttggtaaagagaaaattatttaaaattatttacatcaaaatttacatttattaatttcatactacaagccttaagatagctcataacttcatatcataaacctacagtaattcaacaaaataaacttttcatagtaacaaactaggtaaaaattaactttatggtaacaaatgatttcataatccattgatatcaattgtcttaattacattccaagataatcaaaaataaattatttacgaatcagttgatcaatgataaaaacatctaataatatgatatatgttttaaaaacgcttaaaaatcatgttatttattatataacacataaaatcaaaacttactcaattcagaatttgtacacaaaaccacattatttttacaaataaacctctagaagttgacaatttagcacaaatactaaatcaatagtgttggtctctcccaatatatacgcgcatatatacacttatatactccttagttcttatataattctctttctctctataaagtataaacaattgcgaaacctaaattacttaaaatctctctctcatttgaattcttcttagtgtttagattccaggtcaaactgtgatccatcatctttgctgctagactaaatttttttctctgatcgagttaaaaagttttggactttctaattttttaattcgacgaaaaaacctctccaacaatggttttatcggcgaagcaaaccccctctttgaagatatacatacagtaataagtagcatgtaatatatagataaaaccacactatatatcaaaaataaatatatttttggaagttttttttatatacttaattacatgccatgaaagtaaaatattcacgctaaagagaaaattgtttaaaattatttacgtcaaattacatttattaattccctactataagccttaatatagttcataacttcatatcataacctatattaattcagcaaaacaaaccttttatagtaacaaactaggtaaaaattaaatttatggtaacaaatgatttcatagtcaattgatatcaattgtcttaattacatttcaagataatcaaaaataatttatttatgaatcagttgatcaatgataaaaacatttactaattaatatgatatatcatatatgttttaaaaacactacaaaatcaaaactgactcaattcataatttgtacacaaaaccacattacttttacaaataaacctctaaaagttggcaatttagtacatatactttttgttttttctaataacattttcttttctaaaacataaaaccaaaaataccaactgaaagtaaaccaaaacctatttgcaagtacataattctttaacaaaaagtaccgaatttgttttattttgtcaacaagcttaacgaattaaaaaataaattaatagtgttgttctctcccagtatatacgcgcatatatacacacttatatactcaaaagtttttatataaatttttttctctctataaaatataaaccattgtaaaacctaaattacttaaaaagatctctctcatttgaattcttcttattgtttagattccaggtcaaactgtgatccattatctttgctactaaactaagttcttttctctgatcgaatcaaaaagttttcaactttctaaatttttttagttctaaggaaaaaacctctccgagaatggttttatcggtgaagcaaacactctctccgaaaatcggacttttccgacgaaacccttcatcctcactaggaagatctcctgtttctctctcgtttccatcgacggagcttccaaaacgcaccgttttagccgtgtcaaagccgcttcatctctcttcttctctgagagctaagtctccggtagtgagatgtgaagcttatgaagctgaccgatcagagcctcatccgatcggtgatgatgctgcggcggcggaaacgaaatcagaggcggctaagaaattgaagatcgggatttactttgctacttggtgggctttgaacgttgtgttcaatatctacaacaagaaggtcttgaacgcttatccttacccatggcttacctcgacgctttctcttgccgctggttcgttgatgatgcttatctcttgggctgttgggatcgttgagactcccaagacggattttgatttctggaaaactctttttccggtaagtgagttggtggcgaaattgagtttggtgggttggtgagaaaaattaggggaaaaaggttaaaactttaggtttgatttcgatgtttacgatgatgggtatttaggtttaatgtcaaattgatgcagatcttgcatgaatatttgttgtttttttgttacttgagtgatttgcatagttttgtttgcttcctaagataatactgagggagagagagagagtagaaagtgatgttttttggctgctaaattctgaaaattcaagtgtcaaccaaatcagcttgtcattatatagcttctagtatttcattctagtttaaagtattgaactttttgatattttgttgtactgaaagtggtttatgttgaattgcatataggttgctgtggcacacacaattggtcatgtggctgcaacggtgagtatgtcaaaggttgctgtttctttcactcacatcatcaagagtggtgaacctgcgtttagtgtgcttgtctcgaggtttattttgggtgaaaccttccctacttcggtttacttgtctctcattccaatcattggtggttgcgctctgtctgcccttaccgagcttaacttcaacatgattggtaacatatatcttcatcttatttgttagatacattgaggtgtaattgggattgagatttgaaatggctttgcatgtttgattttggcttcaaatctgctgctccttacttttcaggtttcatgggagctatgatttcgaacttggctttcgtgttccgtaacatcttctcgaagaagggaatgaagggaaagtctgtgagcgggatgaactactacgcctgtctctcaatgctgtccctattgatcctcactccctttgccattgctgttgaaggacctcagatgtgggtcgatggctggcagacagcgctcgctactgtcggaccacagtttgtctggtaatttccctctacaacgaaagaaaactcttttaaactcgaaagatagtttctttacgtgtttaatgcattcttgtcctgttcctagaatccgttgtgaaagacccacttgtcaatttcttgtctttagctctcaaattttgtttgttatcatctaaacgtttaagaatccttgagtctttttagtgattagggcaatgaatccatcccattcacttatccgattccacatttttctttaatcaaatttgcaggtgggtggttgcgcagagtgtgttctatcacctctacaaccaagtgtcttacatgtctttagaccaaatctctcccttgacgtttagtgttggtaacaccatgaaacgtatctccgtcattgtctcctccatcattatcttccgcactccagtccagcccgtcaatgctcttggagcagccattgctatccttggaaccttcttgtattcccaggtaaacataaccttaccttgaccaaaatacccttattatccatatcatatatgataaataaaaagcgtcttctgcatcacttcacacccacatgatgagacttaagtcacttacctataacttctttaacattatcaagaaaccgtctttagtttattggtttggtagcagattagaggtttcttgattcggcgttgtaatgtttctttgtcctggttttttggtgtgttttgcaggcaaagctctgatgcgaaagacataagagtgtaataagggtctggtgttgagctcctgacttcggttaaaaccgggaaaagagcttaatgtagatatttgtcctcaataatgaaagaaatgatgagattggacactaccatgtttagagtgtgttaggcagtttttttttttttacttttgagtttttttgaatttgggggaatgagaagattgcctctttgtaactaaagtgggaaatagatatttgtccccttgagaataagacaccctgcaactctctttttaacttggagagacatattataaaaagtagagaatatttatctcgagattattctcctttcctttgcataaaaagataaaattatgcatgcatcgattttcagtacatttaggttgctgtttaactttcatgcactagttatgtcggaaaaagctgatgttcgaagttatattttggagagtaatggagtattgagaattctattaacaaaggaaaagaaaccaaagagtgacaacagtaatcagctaatccttattgaattttattacaaaagtaatgttgatgcattagatttggttcagacttggaaaagagagagagcaatgtctcttgggacttcagaagaagtaatgttgatacattagatttggttcggacttggaaaagagagagagagacatgtctcttgggatttcagaagaggcagagagatatgtttggtgaaggatatactaaaagaagattctttctctattggattttgcaactttgcttatattattatttttcatacatcaaagtcaccacttctattttttcttaaatcttaaggatcacaattcacaaggggaacataactttggcagattggtatactatatgcgaatatatatgtcttctagcaatttggacctctttccaatgtaacatctcgtatgaaatttgagataaataagctattagagttctgagatcatatctcatgtttgtatctgcaaaagtaggatttcgttttgaaaacgaaaaagaaagcagattgaggaacataagactatttccaatatgaaatgttttttattttattgataatacatttattcaaatttcgttctcttcgtaatctttttctatttccaattttgttggaaacgtactgaccagagagaagtaaagtacaaacagattacaagtacaaaaaggatttcattctgtctgaataactgaaaaacaaacataagtgtttctctcttcaaacatcaagatatttagccactgtctgaacatctttatctcctcttccgctgaagttcaagaccactctcgtcccgtctgataatgtgggacatagcttctcgaggtaagctagtgcgtgtgaggtctccagtgctggaatgattccctctaaccgcgacactctcttgaacgctacagaccacaaaccaaagggaatgcaaaggtaagttatgaaacaaagaacagattttcaaatacagaactaaagactatgcatcggtacattaccttccaacgcttcttcgtcggttatgctatagtattcagcccgtcccatgtctttaaagaaactgtgctcgggtccgactccagggtagtccaatctgtaagagaaaatcaaaccatgttcatgcagccgtggctaactgagtagacttattatggttaccggatctgaatagagaatttcacttaccctgcactgatggagtgtggttcaatgatttgtccatcatcatcttgcagcaagtaactcatagctccatggaggacaccaacatctccctttgtcaatgtagcagcgtgtttgccactgtccaatccgaatcccgctgcttccacaccgatcatccggacctctgtgtcattcacaaattcatggaagagtcccatagcgtttgaaccaccaccgacacaagccaccaagacatccggcttcccgccccatttctccaacgcttgtttccttgtttctttaccaatcacagcgtgaaagtctctgaccatcatggggtaaggatgaggacccgccacagatcccaatatgtaatgggtagtctccacatttgtcacccaatctcttatcgcttcagatgtcgcatccttcaatgtcgctgttccagagtggactcctctcacctatagcaccagacacccaaaaaaaggttcagtaacaaagtttatcacatttaaaagagatggaaatgaatcctaagcatcacctcggcaccaagaagtcgcattctgaacacattgagtgcttgtctctccatatcttgagcacccatatagataatacactccaaaccaaaacgggcacacacagtagctgtagccacaccatgttgacccgctcctgtctcagcaataatcctcttcttccccaaccgcttagcaagaagagcctgagccacagcgttgttaatcttgtgagctcctgtgtgattcaagtcttctctcttcaagtatataagaggcccttcgccattctcgcgcctgtaatgctccgtaagcctctctgcaaaatacagaggactttctctacccacatagtccttcaagattccagccaactctctctaacaaagattcattcacacaaatacacaaaggacatgaatgagacattgaaccagaggaaccaaaaccatatttctaaccatttcataaatgaacagaaccaatttcattcaaatgccctagaatcaacatatcccatcaacaagatccgaactttatcacaacccgcaaatgataacgctacaattccaacgacccacaacgcaaaatgtctcatttttatctaatcacgaagaacaaggtctctacctggaaatcatcgtcggtggcaagagcatagaaagcggattcaagctcagatagagcgtgcataagggtttcaggtacatacttcccaccaaacttcccaaaccgaccgaacgaatcgggtcgttgccacagggccgggtcagatccggcggccatgagaacaggcgggtccttggcgatggtgcaggagacggagaaggatgatgacttggagcgagacgatggcagaggcgtatatttgacagctttgaagggtgatttcaaatgggtcaattgggaagaagaggaaggagctgaagaaacggaggctctgaaagtagcagaggtgcctgaggctgccattactgaatgaatctctctctgagtcaaatatattcttctccttgaaatatcctttcaaagtaacacatgtttttatagatagatttttttttttttcaaagagaattggtcaaaatctgaccacaaaattcatattaaaaaaatatatttgtaaaatcctaaatctgctttgatcagatttgataaatttggttatttgttgtcttcataaaaaaaaacaaaaaaaaacaaaaattaaatattgattaaaatttaacaaatcgcaaatatttaaatttgaatttttatatatctatttccttttggagatataagcagacacatgtaagcagaccaagagaagaaaaaaaaagttggtaggactggggtaagttggatagtattttaagtttttaacacatggttttcaaaaacatatccaattgagccatcacctaccaatatttttttgtgttcatctaattgtttattagatagatgaaaaaatgaaacacaagttgggaattgggatactatattggcaagagtcaataacactttcaaaaacaatgtattgaaattagaattttaaaagatttgtgtagaatttataaatcatatgttattcaaacatgtattttaaaaaatctcatgaaattcagtgttattgaactaattatttcaaaatccaccttaaaattcactgttattcagaacaatttgtggatttgaattttaatgattttggaggatttgagaggattttcttagttcaaaatacagaaatccaaatcccatgatttaaggtgagattttaatagattttacaaaaatcatacgaacttttttaaaatcgttaaaattatttaaaaactcaaagaactcaaatcactttaaattctaatttaaatacatcccccaagcctatatagataacaaaaagttttcataaactaaaccctaatatagagaataaaaataaaaataaaagaaaatagagaaaataaacacatataattgacggagaaaaaaaacataggagttataatccgcagaatgcagaaaacacagagaaatccactttacatgaaaacacttaaaaattttcaaaaactctttctttagttttcgagatttgtgtttaatctcttttatctaaaatcaccttaaaattctaaagactctaaaaatcttcgggtttggttatgttctgttaatttggatttagtaaaactataaccaaactcaaccaaaattagtttaattttggattgtatttggtttggtttagttttaatttgattaggttttaattcggattttaaacacaaatctcgaatcactaaagatttacgcgtgtgggcttgatccctccaagttcaaaaactcgggattgcctagaaagctctctattggttggatcaagctcacagaggccgagtctttgttatcaaactctcctacgctcaagagtctaagtcttagttactgctggagtattgatatcaagaactttgcaggagatatgaaagaattcgtattcgataactgcgacttcttccctaaaaagccttgttcctttgacctgcctaatgtagagatctttaagtacgatcaggctcaattctctccttccatgtcaagagaatgaataggaaactaaaacaagtctacttggacttctgcgcagagggcgattacgatgaaccgaatcaaataaccaaattagacggaacagttctttctggcttccttaacagttttcgaggggcaaggaccttaagtgcctgcccttatctccttcaggtatatttaagtcttaacatatttacaatacattttacattattaacatatctttgagaactgaagaaaatagtactagctaggtatgaaacttttcagtagtctagtgattaaaagtgaatggtttaatgtagtttccttatctaataccttcaatcgattacgttaaatttggtgtatatttaagaccgttagacattaatcttgagcggaatatgtgtatttttctttttgaaggctatcccagaatgtgaagatcccataagacggatcccagaatgtgaaggctcatcgtttatattataagtcatattgtggcatcagtccacgaacatgttggcaaaagaaccttacctataagtctcttcctaagacacttaaaacggtggtggtaagaaattatagtggtcgctttaatgagctaaatgtattgaagtttttgattcagtccagaagtggacatgcggatgggactatgttggaaacaatggagctttacatgcataatcgtatgggggaaagtcaaaggatgttggcacatgaaggagccgatatgttacagagtatttcaggggctgtacaggttcttgtacacaacccttgaaaagttgaaatattcaagacttctcactagtgtgttttgtttaaacatttagtgatgttcttggacgtctttgatttatgaataacttgagcctcgggaagaatgaggacttggacatcaataagattttatatatattttgttatatatatatatatatataataaagtttctttgattattgaaaataaaatattatttaggggctaacgaaactagaaaccaaaactgaactaaaccggtgtaaaagtaatcaaaccaaaacataggaataatttgatagtgacgaggccacttgagtctgaaccaaacactatcgatcttcgaagataagtcgtgacgatgtggcaagaaatctataagatgagagttcaaagattttccatttatattatcgattttgtatcaaccaaacttatgtgtctggattcatttacagttgtttctgactgtcaaatactaacttatagattcttatcctttttttgagtaaactttctatgttcacgctgattcagtggtacgacatatgtggaagtttttttcaacacgtctctctccgtttacttggttacaaaacttccatatcaaaaccaaaaatatcacgaactttctaaagaaaatatagaggaattaacgatttctgtcacgttcacaccattggatcaaattaaatcacaattcacaaacacatctcttctttcgaaactcatcaccacacttctgtttcaatggattcaattcaacaagacagattatctagtcttcccgacattcttctaattatgatcatctctttcttgccgttaaaggaatgtgtaaggaccagtgttctctccaagaggtggaggtatctctgcttggagaccacaaacctttcttttaaggaatctgattacgtgaatcctgatatcaccgatgctgaatattcgagaattgtagcttatcgttcattcttttgttctgtggataaatgggtctctataactcaacatcaagtcgtcgaaagcttcgagatttgtttctcccatctggtgggtttcgaggataagatcgacgctctgatcgaatacgctgtctccacacgagtgaagaatttagttgttgatttgtcaaacccctcttggagaagcaatggtgatatatcatatcgtcattttatgtatacattgcctaaaagcgtttacagtctaacaaccttggagtcactgaagatttacgggtgcaagtttgatccttcgaaattcgtaaaccctgtattgctaagaagcctctctattggttgggtcagactcgaaaacctccactctttactatccaaatctccttccctccagagtctaagtatcaaaaattgttggggcgttgatatcacgtcgatggccgggcagttcagagagctagtcattgagcattcagacttcagttacatgcaatgtgcctttgagctgcctcgtatacacagcttcaagtactctggggagttgttcgagttctacttcgacgtagtgaatgtgatcataccaaatgtgtacttggattttggagaagagcgagtatatgatctacaaagccaatcatcaagaatatcgggtgaggttatttcccgtatcattaacgaccttagagcagctgagactttaactgtctgcccttatatcctccaggtatatttaagtgttcacatttcacatttttacattacatttttatagtaaattataagatcatttaagggttcttgaaatatttgaattctcgcgatatagtagtagtagtagttgttgttggaactagaatagaattatcaggttgaatgtgcattaatttttagatcataacatatatagctaggtttatccagataactttttgaaatatttagtttatttattaaagtattttgaagatggtttattttattcaataataagtcacatagtgtataaaaatcatcttgaatgtttagttttactatattaaattcataacagctactacgttaatttgttgtatatattaaccgttaatccgttataatgtatttttgatattgacatgtgtttcttttcttatggaaggttatcccagaatgtgaaaagccatctgatttgcttcaacctatggaaacacgacacttggtgttaagaactaagatgcataccaaggagttcaatggaataattcttcttctcaacaactgccctaatttggagacgcttggttttgatattctaactccatgtcctttctcggtaagatttctacatatatatgcaataaagagtagtcacattttgtcattacttaatatgcatgattttcttttaatattttgtaggcaacttcgtcagatgaaggcatcgatcctaaaacgtattggatgcagaagagaacatgtaagagtctaaggaagacactgaaggtcgtggttattaggaacttttgtggttcctcaaacgagctaaatgtattgaggtatttgattcgatcagcgagcggtgctggagatgcgttggaaagagtagagctttacgtgccgaatgggatggaagaaagtcaagcgatggtggtatttgctaaagcggaaatgttacagagaacttcgaagcatgtacaagttctttgtgcacaactcttgaaaaaatgaccttttcaagagattgctcctagtgggttttgtttgcccatttagctatggtttttgaatttttatctattgacattaaggaagcatgcttccgtactttggtttgtttgatttatgtttaagaacctcggagagttgaggactttatttatgtgaaccagaaataataataaatgtttttgattaatatcaatttgataataattatattataaaatttaatctcgattttttaaaattacgggattaaattttaactaaatggttatggaaatctctggttttgcagtcttgtctgatgcatttgtttctcgataacaacattgatctgacggtggaatgtacaactcaaaacggtgaagttatctttgcatataaaccattccttcaccgccttttttacattttctattatgatctgcaaaataacgatttgagaaaggttagaatcgaggagtattaccattatatttgtttggtaagcattacatcaacatgacattttatttcaagcatatggataaaagtgaaagcatcatgtacttggaaatttgaaagccattgctttcaacctaagatgatcattatgtaattgctttttgccttcaatagtacaatgctactattttattttgtaattctattctatcatgttaggtatgtaaatctaatgcaggataaagtcttttgcaagagaatttctttcattggcaaaatttagcagctttcaatcaattgcttctatattgaccatgtcatgatcataatcggagcaactgtggctgcactattgagtctcatcaattctcttgtttatgctcccttgtttttttttttttttggcaacactagcaattatataggtctaacttttgttaagcctcaaacttcattcctaaatgatatttacaatttagcaaaaaataataatatacagtggtatatatatcatgaaaatcattattgaaaaatgaaataaaactaaaatatataaatacaaaacgaagactggttttaaaaaaatgggaacaaataaagacaaagtaaatcagtgtcgcttaaagaagttaactgttttttttttttttttttttttgtaaaaactgatagatacagattgataaatgataaatttgctataacatatgtaagtaacccaattttttttgtgtgtgttaaattaccataatttgtactcgaaatagttcaacaaaataatcatcataatataaaatcattacttttaaagaatcacattagtcaatttaaatcttaactcataagcgaaaatcacattcgcgagattaaagttttctagttatcagaaaaaaacgaaacctttctcagattgaaatcgaaagcacggatctttcttcatacctcaaacctgcaggatccattcatgattttggagatctgtttatcaaatctcaggttattaaatctccacttctcgtttaattctgttcttagcccacgttggtttaaaaatctagagttttgatcgcaatttgtgatttttgatttcagatcagaagcttctacgagttgattatatgctgtgtttgcagatctgggtttggttatatttctgagtaaatctctcacccaacaccatgtgtgatcaaagaccaaatcttttagggtctctcgtgttgttgggtttcttcatcttctttgtaaatggagaagaatgctctaattcgagctcattgattgggcatgagtctgagttcaagatgttgcaacatcagcttcgtggggttttcactgttgtcgatgattgttcgtttagggtttctcgttttgatatgctctctggttccgaggttcattggtggggtgctatgtcttctgattttgataatatgactaatgatggctttgttatctctgatcagaagcttaatcaaacattcaaaaactcatcttttattgttcggttgttgggtaatgttacttgggataagttaggtgtggtttcggtttgggacttacctactgcttctgattttgggcatgttctactctctaatgcgacggaatcagatacttcaaaagctgaatctcctccttcagagagcaatgatgttgctccagggaaatcgaataacagtgagccttttaaggctcctactatgtttgataattgtaagaaactttcggataagtataggcttaggtggagcttgaatgcagagaaaggttatgttgatattggtttagaggctactactggtttattgaactacatggcgtttggttgggctaaaccgaattctacatcgaacttgatgttgaatgctgatgttgtggttactgggattagagaggatggcttcccgtttgctgatgatttttatatcacggagtctagtgtgtgttctgtgaaggaaggtacagctactggggtttgtcctgatactgtgtatgaagaggcagattcagttggttcttcggtgaataatacaaaactggtttacgggcataggatagatggagtttcgtttgttaggtataggagaccgttgaatgatagtgataataagtttgattttcctgtgaattcaactgaaagcctgacagttatttgggcacttggggtgataaaacccccagatgttattaatccttactatctccctgtgaatcatggcggtgtggaatcagaaaactttggacatttttcgcttaatctttcggatcatgtggatgaatgtttgggaccattggatgcagacaacaagtatgatcaagatgtgatcattgctgatgcccacgcgcctcttgttgtcacggctggaccttctgtgcattatccgaaccctcctaatccttcaaaggttctgtatattaacaagaaagaagcgccggtattgaaagtggaaagaggggttcctgtgaagttttcaatagaagcaggacacgacgtttctttctacataacttcagattttcttggtgggaatgcttctctaaggaacagaactgagacaatctatgcgggtgggcaagaaactcatggagtactatcgagtccgtcagagctggtttgggctcctaatagaaatacacctgaccaactgtattatcactcgatttttcaagagaaaatgggttggaaggttcaggttgttgacgggggactttcagatatgtacaacaacagtgttaatctagatgatcagcaagttaagttcttttggaccatagtaggggattcaatatcgattgcggctcgtggtgagaagaaaagtggctatcttgcaattggttttggtagcgaaatgacaaacagttatgcttatattggttggtttgatagaaatggaacagggcatgtaaatacttactggatcgatggagaatccgcttccgctgtgcatcctacaaccgaaaatatgacatacgtgagatgcaaatccgaagagggaatcatcacactggaatttacccgtcctttaaaaccatcatgcagtcatcgagatagaccagaatgtaagaatatgattgatcccacaactcctcttaaagtgatatgggcaatgggtgctaaatggacagatggtcagttgactgagagaaacatgcactcggttacaagtcagagacctgtccgtgtaatgttaacacgtggatccgcagaagcagatcaagatctaagaccggtcctgggggttcatggatttatgatgttccttgcttggggaattctgcttccaggtggaatattatccgctagatacctgaaacacataaaaggtgatggctggttcaagattcatatgtatcttcaatgttctggactagccattgtcttcctaggcctcctcttcgcagtagctgagctcaacggtttcagcttcagttcaacccacgtaaagttcggtttcacagccatagttttagcttgcgctcagcccgtgaacgcttggctaagacctgcgaaacctgctcaaggagaattaatctcttcgaagcggttaatctgggagtattctcattcgattgtcggtcaatcagctgttgtagttggagttgtggcgcttttcacgggaatgaaacatctgggagaaaggaatggaactgagaacgtggacgggcttaacttggccctcgggttatgggtcttcctctgtgtggttactgttgcgtatttggagtaccgggaaagaggaagaagaagagcgaggaatctaagcagaggaaattgggttttggggaatgtggaagaagatgattccattgatctaatagactcaagaggaggtttcagagataaagatgatgaagatagaaatggagggaggatggaaattcagttagagccgttgaaataatagtaactttttttttcagattctttttttttgtttatgttttttttttcttcattaccgaacaagaaaaacacacgagaggagttttgtcttttacttataaaatgcaacggtcgatatattgtatctatgcattagaattgtatacttttgagaatttgagttttatatatactacacaatcagttttgagtttttttttaactcgagtcttcactcattagtgttaaactttgggtcgagccctcttgaaattgtatagtaccttcgaatcttgtaaacattgactatatcaactatttgttttttaaattcaatttttctgtccaataaaaacaagaacatccaagcatatgactatcaacatgaaaatgcacacaaaaccaacgctattttctttcaactatatttttttttatcgacgatattcgttcacctctttttaaaaaaaaaaattatgtacaaaaatgataaataattaaagtagactaaattaggaatcgtagtcgataatgggttcacctaaggtcaaatttctgtcaatcttccaaggcaaattaaaaagtctagccaaaatgaatttgaagatcttgttcacatttatgttgtgtgtcgcacttgagaagaacaatgacgcattcatcaccttcgcatatgctcttgcctaataaatcatatagaaccaaattaactatttttttatagaaatgaattatcacaataaatcgaaatgtctaaatcatcatgaaaacgtaaaatatgaaaagggtcttaattggtaacgtggtatgattaagttgtatgattggtattacctgagtgacgatggtccactgaagattgggtgggagccgaacaaagtcatcgaattttgttcctattagaatcggaattgccgtctgattaaagaaaacacaaaattataaaaaaaagttttaagataaagtattttgttggaatcagattccaaaaactttataatatactccttgaatgttaacaactaataagaaaagtcgacgtgctaaattttatttagttcaggcgaaactaaaacgaaaaacaggaaccaatttgtgtataaaaaatgtaacgcggaacaacaaaaaaaaaagtaaacgtaacgtaacaactcaagttgaacttggtttctttacttactataaaataaaaaattcaactaaaacatatatagatagaacaagaatctaatcaacaaaagatgactgatgtgatctttttattattcgcttgccaaaaacatagatattaaacgtaccttgttccattttcttgcctggctataccacccgaagacactgcaaatcaaaacaaaacaaaattactacatttttaaaaataaatattgttacagctaataaaaaaaaaacaggcagattgatgaagaaatttaaaaaaaaaaaaacctgttaagagtagatcgactggttagatcaaacatgaacaagattgctactgcatctttacaagcaattggtatatgatcttttgatctcttttcatcacctacaacaatcatttttcaatctcctaattaataaattacaaagacaaagtacgtactgtaattgccaatacactaatcatcatatgattaattaatatttttaatttgactcacctcccacatcccaaatgctaaacgaaatagtaactccttgaacataaaaagttttgtccatcaaattcaaacccgtcatctccaagaaactttgattctcatctccaacatattttaccttcaaataaaataaaataaacatatgaggattagtcagttaattaaggtacataacaagacagtaattaatacttagcacaagaatccatacttactacaaaagtagtcttccctgtttgacaatcgcctaataaactgatcttgagactaaccaaatccgaatccgaacttgaaccaaaccttctaccggaaacagtaggttctgtcgtagtatcgtcgtctccgtcaaagatatcgcccgcggtggaagaaatcttgtgaacgattcgccggtaaagaataggtttttcgatgatacttgaacaagaaacaatttttctccatagaaacctaaagaaatctccaaagatcgataccctctcgatgattctccattttctgttcacgtgaactattttccggcagaaaggagttatctttccggcgatctcatggactttctcggccattgatgaaacagagagaaagttatgtgatcttttggcattcacaagctcacatcttctttttgcctttccttttatgtttttcttttgttactggctaattggtagtaatcggtttatatggattggtagttgacccgtcgtcttagaaaatatctatattacccctagttgatgcgtgtgttccttttggtttttagttttaagctcttcgcgtgttgttatggaagggtaatatagtcaatttagaactaattatctttccatgaagtatagtaaacccaaagtgtacgtgtcactgctcactagttatatcatttgattgttcagcttttgttcttttgtcaacatttgattattcgtctaaatttaatcttcattgatagcgttctcctatagtttgttcttatttgaatattatttattcgtgttgtttataaaaagaatgattattgttcctacaatgtattgtgatttgattattccttagtatttcaatatgaatttgactatgtaatatattattccttagtactgagaaatgaatgataatcaaatatgttatcagttgttatagtaactccatttgaaacacaaagcacgagaatcttgagaagcgttttgttgaaggaaacaattttgttatttttgatattttcttttaaaaatgagcaacaaataaagtagtttcttaaagaatggtaagtaaagaaacatttgtggtcgaccatcgatgcagttactgttgcttggatctatgtcacattcattactttttatttattaatctcacgaaagtgttcattgtttttttttaaaaaataatagatattccatctaacaaaaagaaaactatttattaagaattttttttctatttacttccaatctggttaacatttatgtttaaatgcatctccatttatgaacaaataacaatttgtaagaaaattatagactttcaaaatcaatagagaatctaaaatttaatcatttacaaaaagtattaatggcataactttgtagttcctaaataggacatttcaaacacacgcacaaaagaagaatttgttggcttgtccctctcgcttcttcttttataacacttgttgaatttagttattctttagcaataactatatttaagaccattttttgtttcatgtttattatacgtcaatgcatatttcgaaaccatgacatattaaagcttttgtatcttggacggttttagtaaaacaattagatatatctgatggttttcccacacgttaattttgtttggaaatgtagaacgaatctagataacgtgtttgttgtcatggaatctttttcttcaatcagaaacttcgtctagatgatatagtttataaaaattatatcgtttagtcatgcatggttcaatatatatacaggccacaggtgtacgtatacatacagatgatggtctaaccaaccactagaaccacccaagttattatatttttgattacgaatcacaatacaacacatatttttttcctagagtatatgtttattgtaactggagttggttgatgataatagattactatttctttgttggtggagtctaacatcacataaatatttaatctcaacacttgttaataatttgatctttgtcttaaccaaatatatgatatattaatgatatgtttagacaaataaaataaactaaaatccactgaaacatgactttactaaaagttcatctatcaattaccttgatacgtatttaaaaattctaacattttaattatgattcttttcaataataatcgttcactaatcactataaacagttcaaactatccacaaataaatgagtatttatattagcctataaaaactcaaaaaatcacgatataaaatacaaaatacgaaggaaccaattgatgtgttggaccacgtggatgcggatcaaaagagacttgatcaacttatgggaaactcatgatgataggtgtttgttaccgaacattcaagttcaatgatgtcgctggtcctaactaaccatatctatttaatttcttgtttttttttcacttaccaaattcggaattgtcaagaagaagaacaaagagaatgccaatatgacttctacttgtcaaactaattctctgcacagtctctctctcgaaagctcagtttcatctactcgtcttttcaaatatatatacaaaacacacattagtgcgtttattcatgtatccgcccattatagtcatgtcaatctaggtaaattagcctgttgataaagatagatgccaaaatacaaaatgaatgtaattgaccaaagctttttggtttgacaaagaaagattacattgtgatttggtttaaccggttcatactcgatgtacaaaccagatgtgtcacagagtatacaggaaagttttgcagagctcttaaccaatgctctcgttgagtttagagaatccaagcttcttgagtctactagttatcggattagcccaagctcgatctggattcccacatttcacgtccacaatctccacaatgttcattctcttctctcttctcggggttccttgcaacgatacattttcagagccaagcattggaagctgatgagtgcttttggtattgtgatgaccctttggtgttctaacattatcagagccgagcattgaaagctgatgaatgcttttggcattgtgaccctttgatgttctaacattatcagagccaagcattgaaagctgatgggtggttttggcattgtggccctttggtgttctaacattgttaacattgctgctgctgctagcttcgtctgatgattttcttggttttgttcttcttggagttgaagaagatgtgccacagtctactgagacagggattgttgttctaatgggtcttgttgtgggagtcttaggcgaagtttgtttcatggagtctagctctcgtgtcattagagtagcgactgttcctgttgctcctatttttatggatcctcctccacctttgatctgttcaagcttctgaaccattattgtaaattttatttcgcctctgcaactctctaagaagacacttcttgagttttacctgcttcacgggtctggatacaaatctgaataaacaaacaaaacatcaaatctaaatgaataagtaacttttttataccaaaaagtagaaaaccaaacaaatgcaccactggcttccaaattggggtatatgcgaaacgatttagtagcttaagtttctaacttagcaaatttgaagcagaaaagaggaactgagagttccatgataaaaccaattgtgaaatgagtcatttcaaatgagagctgagaattagatgttgcaaagctcttcacaagcacaatctagaggaacaaaccaattgtgtactgcatcatcataactaaagtctttggcgttcactttcaagccatatccagcgtataaatgtaaaagaaaagaaaaaatcaaatcaaagcaccaagatcaaactctaaccatacttataagctgagaaagaaaaacatcaaagctagttatagatactagacatgacacatttgaataagtgcttaaagcacatcattatcataccactggttctcttaactaatatcaaatgtttggtattacgtgtatctatcagattgattgaaatagaaggttgaaacataaagcaaggtaatgtctctcagaaacgattccacgttattatcaaaatcaatctctatcaatcaaaagcaagaggcaatcacaacaaaaggaggaaaagaaaacctacgcactagtgatttgaagtaaaacaaacatgagaacgacatttttgtgattctaatccttgaccagtcacattcaacagcgaagaaacaagtcccagaaaaaataggccaaattcacataaagaacaaacacaaattcccttaattaaaaagcaacctagctaataatctcgatagatcaccaaaccatggattcgcacaaagaaagcttaccgatttataatggatcaagtgatcagaagaaagctaaacccttttcaaatttcaaaacttttagaactccaccatgtaattgatctaattggattaaggaacagcattgaacatttaggtctacaagaggggaaaataaaaatcaaaactttggtcttttgattggttttgaaatctgagtttccttgttggggcgtgatgaattaagcagcgactagtcaacgttccttgtttacagtgtagagtagattgctccaatcatttttattggactcggaggtaataatgtttcactttttttacgaacaggaagaaaaatatgcaaattatactgaaagccctaaacttttgagtttatcacatttttaacctaaagttatcagttgtatcaaaatgatgtagttatattgaaactctcttcaccagttagaggctttaaagacttgccgacaaaatgtagaagtaggtgtatatctccggccatttcagtaactagttctgttcttggatgtcgtgtgttttgtctaagggagaagcgagaagagattaaaagattagaccttttcgcattcatggattcgaagttgagaaattttgtgatgggtctgtttgtgatgactgcgatcttgaataattctggtgttggcgcgtggactggagagattcgtggtagagttgtgtgtgatgtctgtgctgattcttcaattggaccagaagatcatgttcttgaaggttagtatctctgtccctcttctttatgtcttctctttagtcagttttagatgttcgattgctgggaagaagaacaattgtctgattttgagaaattctttggatttaactgtgtagaactctggattcacttttaagtagtgcttcttcagaaagagtgttgctttgctaatgttctgatggatttcttcagagtgattactgttcaattcagtagtagttgtttctcactcatcaaattggtgtgaatttcttcagagtagtttattagcccgaagcttgttggtactgtttgttcttatttcttgagcaaatggtgcatatcttggtgagtgtgtgtctacagtttttgcagattcttatttttcttttttaataacataaatcaaagttagaggggattttgtttagtatcatctctggtctctctgcgacataaaaatctgttatgttcattttccttatgtttttagctgcgcttttgtatatatcctatagtgtcaaatgttttttgcagattatgttatacttctatgcgaaatcttttcaagttttctgattcatatttggttctctgaattccatgaatcaaatttaggagagcttatggcttggatcatctcttgtctctccggaacttagtaattagtttgttcatccttgtgtttccagctagttttatgtattatccgatagtgttaatgatttttccacactgcttcatattccaaatagtcttgttgataactcaaaaccgggattgcttagaagccactcggttttatgtgtttaccattctgctagtgaaatgatctctttggcacttttaaccgtgttatgtgatccagtcacttcatatcattgacgtatcaatcacatttgcgagctgttattgttcaatctttacaggagctgaggttgcggttctgtgcataaccaaatctggagaagttgtgaactaccaagctttcacaaactcaaaaggtgtctacacagttgcagagacaatgccagagagcgaacgttgggacgcttgccttgcaagacccatcagcagcttccacacaccttgcaatcgcctacaccaaaccaataccggaatcaaattcacttataaccgcccttccggtttctttcatgccgtgaaaccatttgtgtatcgacctcaatatgcaccttcttattgctgattcaaagacaccttgtaaaagtccttgtaagttgtaatactaactagtttggatttgtgaaatgctaatatggatcaagcttaaagtgttttgatgtaaggataagagaagtttgtttatataaaagtctttagtcaaaagtcaaagggagactagtctcacaaggcggtgacgggggaggtaaagaacaattaattttgaatgggtcctacagatgacgtgttcaaatgttatagggtcaacaacgtgtctcaagtattttgctgggagaaagacgaaaatatccctatcgtcattctttgcgtcagtcaactgaaaaattgaatttcgtctagacgaggaaagcaataaatctaggaaatcaaaaatcgttataagaagaaacagagaggttgcgacggagacaagattcttctgatgaaccggagaagataagaaacgtgttttgtctaatttcttgcgattaaggatgatacattggttgaagcagctgcgatcggcgtttggcgtcgcgtttctgtggctcgtttgtctcatttacttcactcaggtttgttttggattgttgcctttagtttttggcaaattcatatgaaaatggcgattctcgcgttgagccgaaacacaaaatggtgattgattctcgttgcggattattgattaagcagagaacgcattttttttttccgttgtcgttctaattacgctatatcgtaatctcgtgtatcaaatgtaattagggattcgaaacttatgattttgagatgtttttaaatttgaaacgttactggatcaaaattatcgcgttttcctctgttttcgtgtgttttgagacgatcacagtatatttgttgagatcggtttggttaatttcgtgttatttaggattagtagctatactgaaattgatttttgtgatctttgcttatatagggatttagatcgtttgtgtggacagctgtttcgtaccagctcaaagacaggctacagttatcaccatcagcttctcagtttgtcttttcggttgccttttttccatggagcataaaaccattatatgggtatgaatcttcatgaattacgaatgatgactcaaagtcttgattcaagtaggagctttgtagtaatgatatgtttttttttctcttttggtttttggtagaatcatttcagattgtataccaattggagggaaaaagaggacgccgtatttggtgatatcgactgtgctctctcttgtgccatggctcgtgcttggtctagattcaacctcgagaagttcaagtctctatctgatgattttcttgactgtacaaaatctaggatcagctatggctgatgttgtgattgatgctatgatagctgaggcagtaagacttgaaaagtaagattctatgttctttggttttggatccgcacttagatcatagtttaatgcacttagttgattagttgagttattcttttattgtttatcagggcttcgtttgctggagatcttcagtctgtatcatggtttgcaatggctgtgggtggagtatgcggtagtttattaggaggctatgcgttatctaacttgaagatagaaacaatattcctccttttcacggtactaccagcgttacaattactatcatgtgctctcgtcgaagaaagtcctgctaacaatgaaccattgcctgagttgttggattcaaacgagtttgaagagaaaagcttgacgagcaatgataactatccagatacgagtaagtccaatacaagaagaaggaaggggcagaagaaaggtaaaaaaggagattccaacggaaagtctgagacacagaagaagcaatcgaagtctttagcttcacagtggttccagtcactaaaagcagccacttttggtttgggccgtgcgtttaagcaaccgatcattttgaggtaatgcaggctctcttaattagtcgctttcgaaatttttcttcaagtgttgctttctcatttacttttctctggttttacagacctatggcatggtttttcattgcacatatcactgtgccaaatctctctaccgtcatgttctattaccaaaccgaggtcttgcaattagacgctgctttcctaggaactgcccgtgttgttggttggttaggtctcatgtttggaacctttatctacaatcgctatctgcaagatatgactctacgcaagtctctcctgtaagcctaaatatctcccacatacacgtcattgctttctcaatatatccttcttttaagtgatctaaccaacaaaacatcatcacaggtttgctcacatcgggctgtctgtaacgatactcctagatatggttctagtatcaagagctaatgtgggctacggagtttcagacaagacaatggtgctcttcggatcagctctaggtgatgccatcaatcaactcaagtaagttgcttttacttgtttatttcctctggtacatttcttccaagaattgcaactcaataatcattctttgtcgcagattcatgccgttcctgatcttgtctggtcgtctatgtccacctgggattgaaggaacactgtttgcgctgtttatgtcgataaacaacctaggaaacacagttggatcgttcatgggagcaggattggcttcacttctgggaatatcgtcagggtcgtttgacaatatgtttatgggcttagccattcaagtgttttgcacttatatacccgttttgtttcttttcttgattcccaaagaagctacaggagtatcagcatcatagggcagagagcaaagagcaaaggtagtttctcatagaacagttttagatcagaatttttggataacttttttggcatcagtttttgactttctttaaacgcttggaattgactacacatcagacagacactcggtggagatttgttatatatactaaatatatactgcctcatttttctcttgtcaaccttacagtcttaattcactccaaaatatgcataatgaacatacaaaaactaatcattcaattcgatttaattgttctatatttcaatgataaatggtgcaaaaaccaaaaagaaaaagaaaattctaactgttaattgtattgatactcttaatatattaatctcgaaagattttatggtttgagtctgaaatgtaataaagtgttttacagttcatttcgtccaattttcaacttggggaggagaaagtgatatgtatgccggcaaaaaaaaaaaaaaaagtgaaatgtattggacgaaattagataactagtgttaaaaatagtaatgaagctgaagcttaattgggccttgtgggttatattaaatgggctatgaagttgggaacaaaaaaaaaaaaaaaaaaaaaaaattatcagagccaggtttcgatcctgggacctgtgggttatgggcccaccacgcttccgctgcgccactctgattttttgttaatcatcatacaaatcatttaattaaccaaataataaatccgtttgaaagaggattttccgctgggactcgcacggtgaataaaaagttcgacgatgaaaatgatgagacgacgataaacaagaatcggaggattacaaaacgctgcttcttaaatccggtaaaaaaatggttcttgatgcttatgtaaagttttttttttttttttttttttggtatcaatgttaagtaaattgtttgcgtctatgcttatgtagtagagactcatgagataataaagttttttgcttttgaaggtaaagctagaggtgggcatttcaaaattcggtttggttctggtaatatgttatataccaaattagaacttaataaattacataaatttggttcggttaggggaaagggtagtgaataagtaattgaaacctacgaagtttctaatttgttatggtgtcggaccatgtacataacgttaattgaagatttgatttgttgctttgaaaactcgcattttacaaatttgggagtattatgtaaattggaagaaacggcgacgtattcttttaaatctgcacgccattgaaacatacttcaagtatgtacacgttagttcattgatgacgcaacgtaactagatgataacattgagataaaggaactaaaatgacaaaaattctgttaattttctgtgttgtggtatacgctaaattatctatcgtgaatctgtgtataatgtgttgtatagaactatagctcatgtaattatcgttgccgtcgaaattttatacaattttagaatactttgatgatctgatcttacttttgtcactatattttgggtgatgttttttttttacgtaaacgtaatatttgtgatgaaatctaaaccaatctcataatcgttgtaaaatcttttaaagaatagtaaaaaactatttgtgtccaaacgtagacacatcaaaaagataaaaaaaataataattcagtccactatccatccaacctttaaatcacatacacatatcatcttcatgatatttttttaaaaatttacaaatactttagagaaatctttttccttgctgattctaaactttctgagattaattacctaagttagagaatttgtgattcttggtcttggatgatatttttacaaaacactcaattattcaaacacaatagcaatatatcatagaacaacatatgcattcattaaacacgaaattgtttttaagaaacacctaaattacttaatacaagtcacattttgataattagaatattacagatttagttacaaaataatcaaacttaccactttaatacggaagttattttttttttttttcttttttttccagcgatttatttattctgtttttttttccctgaatataaataaaatagagttaataacgtggagagacccaaaaacagaaacatggcgtcttcatcttcctcatcgtcttcttcttcgctttcatcaattctctccatcgtcgtagtactgattctaattgtatcaaccgctgaatcagtgaaatcaccgtttcatcctcgcgatttgcttccgcatttgcccagacaagtctcatggccgattctcaactctctttacggcgccgccgatctgcttcctactttcatcggaacagcgagttctgggaacgattccgttgactggaaaggtgcttgtttctttgagaacaccgcttggttagagtttcataacaagtctggtagcgagtttggtggaggcactcttcacattaaggtgaaattcaaaatttgtagtcgaaatcaattttgttccttagatcgttctgttgcttattgagtgatttatgggaggtttttgtatatgggtcctcttcaattttgacttttgaaacttctattgttgaccgtgaagtctagaagttttgggatcctgtaatttaggagaagatttcgaattgtatttgatcttcttctctagtggatactcttagaagatgatgcttcttaattcttacacaaagttttggatttttttttttttttttgtattctaagtttgattatgttgtttatgaaggcggataaggcacatagttggacatgtatggatctttatgtatttgcaactccatatcgtgttacatggacttggtacttcatttcacgacagcatactgtggaatttccggagtgggatggcaaagctgagtatgaatatgtaagtttctgttgctatatctttggtttctttatttaggatttagtatctgtgtttttggttgatgtgttttgcgtactacttattggatcaggttaagaacaaaggagtttctatattccttatgcacgcagggatgttaggaacacttcaagcactgtgggatgtttttcctctctttagcaatactggttggggggagagctctaatcttgcgtttcttgagaagcatatgggagctaattttgaacctcgtcctgaaccatgggttacaaatgttacaactgatcaaatccagtctggtgacctcttagctatttcaaagattcgtgggcggtggggtggttttgagactcttgagaaatgggtgagtggggcatatgctggtcattccgccgttgccttgagagactctgaagggaaactttgggttggtgagtcaggaaatgaaaatgataaggtaacaacaacacttcaaagtgctgccctaaagttaagttgcaagattttttttgatgaagtttttttttttcttgtcatagggagaagatgtaatagcaatcttaccatgggaggagtggtgggcatttgaacaaacaaaggatgactcgaatcctcagattgcactgctacctttgcatcccgatgttcgtgctaaatttgatgttgctgctgcttggaaatatgctcgcagcatggagggtaaaccatatggttatcacaacttgatttttagttggattgataccgttagtgaaaactacccgcctcctctagatgcccatcttgtaagtttttgtttttcatttctcacaatatagttcttgatgaatgaatacactttcaaatcgttttaacttcgggcttctctttctttcaggttgcatctttcatgactgtttggagccaaatgcagcctgagtatgctgctaacatgtggaatgaagccttgaacaagcgactgggaacagaggtattaacatcttcatgattcatagatgatttttttaattaatgcttatccttattagagatggtcctaatatctgattcttctgtactatcgtatccttcatgttgtatacgattctacatttttctctgctcttatagtttgactctgttccttgttcttcgttttttttctcttcttctctaacatggttaaaattgcagggtcttgatctttctgatgtactggtagaagtagagaagcgtggatcctcatttgacaaattactggcagtacctgaactagacgattggatatacagcgatggtaaatcaacctcatgcatcgctttcattctcgaaatgtacaaagaagctggcctattcggtccacttgctagttctattcaagtcacggaattcacggtaagaatttgtacacagtctctgcttcccttcatgcacgcaagctcatgtgaccattttcatttcttaatctcttgaatctgcagataaaagatgcttacatgctcaactttttcgagaacaacgcaagtcgtcttcctacatggtgcaatgacaatgacagtgtgaagcttccttactgtcagatacttgggaaatacagaatggaacttcctggttacaacactatggaaccatactcgcacatgaacgaacaatgtccaactctgcctccaaagtacaacagaccagataactgctaaaagaattctcctccgatgtctgtttgattttaggaaaaaagttcaaatgtattaccgttgaaaactcaacaattactttatctgtttgtatataactatatatatatcattcaggtttgtagcaactgctcatcatgtaaactgtgtttggatatgatacacacaaatagaaattacaagtttcatcttttggttatgtttcgtcttccggtttagtttggtttatctggattaaaccggtctcatcttcatcgtaaagaaagaaagtagaagcaaagcttgaagcttttggatttctaatgtgtgtgaatcgtgatgttgtcatcaggacagatgatgggccatgtcgtggcccgaactcagatgatcttgtctcgaagtaacttcgccgattgtatacggtgtcagggcgtgagagtttcaaaaaccctaaaaatggggacaaagcgacccacttgcccttcttgcgataaacctagccagctctgtctctgcaagaagatgagatctccatgttttgataatcaggtgagtattactattcttcagcatagtctcgagagaaaacacgcgctaaattctactcgaatcgctagattagggcttaagaatgttggtgtgactactgttttcgatgttcatgatgaggcagagttcttaatcagggttattggatcgggttgcagcaagattgacacgaatcatttggattctgagtatagggtagagaatgttgcttctttggaacttgatgatagctttaagttaggtagtagtggcaatgtggagaacttagaatctgagaagaatgtggtgcttgttgatcatggaagcttggaaattgctgaaagtttgaatctttctcaacatttgagtgaaatttcttatcgggattcgcgggttagggataagataggttcttatgaagaagatttgataaaaatctgtatgaagaaacatggtgtcatcagcaatgtctcacactctttgatgcttgaaaccaatgtgaaggttcttagttttgatcatatattggcttctcctgcagccatggatgtcttggcaaaaggttttatggtaacaaagttttcagaaggaaagcaagagtttgagctcgaggttcctcctggatcagctttgttgttcccgagcgaagaatcggtaaagatcaattatcttaaagagaaagaagagttaaaagtaaggaatctgattgttcttgatgggacttggtcgaaggctagaagaatataccttgagaatccatggctaaagcttttacgttgccatgtgaagctagaaatagaaggtacaagtttatacaaagaagtacgacggcagccaagagcgggatgtttatccacgatagagagtattgtatacgcgatgaaggagatcggtgaagatcctgaaggtttagataatatgttgaatgtttttgaatccatggttgaagatcaacgaagatgtaaagatgagaactttaacaagattatctgaaagacaaaattactctgctgttgtaacttgtaagctgaatgaattagattcttcaattttgataattatgccgaaagttggagtcgtttttggcaatttattaaaacaattgaagatataaatgttggggtgtgaacaagaaaaattcatagttctgggccaatatgtaaattaggaaatataagttttgttgagtaagacttttgttaattttgaactcagagtgtgttttcgtttccgaatgctttcaattcgcagaagcttaactctagcaaaagagccaaaagatttgtttttgtttttgtgtaatctccgagctcgatgtgtatctacagatgactatgatccaccattttcgcctctctctaaacccactaaacctccaaaagagaagaagaagcagaagacgaagaagcaagaccagtcgtcggagctggtaaatgacctgaagattccagtgatttcagacctccctttcgattttaggtattcgtattcagaaactaacccggaaattgaaccgattggattccgtgaaccgaaacggttctctccatttggaccgggtcgattggaccggaaatggactgggactaccgcactggcgtcgccggagattgatcagagtcaatgggtggaggagagagcaagagttctcggcgagactttgacagaggatgaagttacagagcttattgaacggtatcggcatagtgactgtacacgacagattaatctcggtacaattttgaatcttttgcctaagttttttagctttgaaattagtttgcttgatcaaatcgaatcgtcttcaaagttaagagctttcgtcatcgttgatgttgcagattcactagtggtagaaacttctttgtgttgacatcacttgtagatttgtggtcttgatgatgatcatgttgtgatataatcaaattatgtgattggtctcttcttataaactttgtgatgttatcagggaaaggtggtgtgactcacaatatgatagatgatattcataaccattggaagaaagctgaggcagtgaggatcaaatgcttgggagtaccaactcttgacatggacaacatatgtttccacctcgaggtgtctattattagatctccagaacacggctctgtttttctttcggttgatcttactatagttgtgttcttgataggaaaaatccggtggaaagattgtatacagaaacataaacattctagttttgtaccggggaaggaattatgatccgaagagtcgtcccatcattccactcatgttatggaagcctcatccgccaatatacccaagacttgtaaagaatgtggctgatgggttagaatttgaagagaccaaggagatgagaaatcgtgggcttcattctcctgccttaatgaaacttagtaagtagtatatacatcgtcaagttctttgtcatttttctagtatttcctcgtttttgattggcggattgtattgtgattcagctaggaatggtgtttatgttaatgtcgttggaagagtgagggaagagtttgaaacagaagagattgtgagactagattgcactcatgttgggatgagtgactgcaaacgaattggtgtgaaactaaaggtataataaactgtaaatggtttgcttgtcttatattgtctgtcagattctctagaattgatctatcttgatgctgtgatcaaaattgcaggagatggttccatgtgttcccatattgttcaaagatgagcagatcatactctggagagggaagaggactggtgaagaagagcttgttactctatgaatctttgatctagaatcatgatcatgtgagtgatgtgacctgaacaaatccaactgtagaccaaaacttcttcatcgatacaacagatactaaagtttcacatgtctcagaagtagtcatagatacaacaatcttggttgatttgtatattcgattatgtacttcggtttgatttattgaactaaaattggatcagtccaaaattgttctttatgaaattgactaattttattttatttttttgattaagttcataatttgatttttagagtaatccaatttactgttctgttgtcatcattcttaccttagaacactaaccatgttcaattactcaatatcatggcccggttcaaaaccaaaccggtcaatggtagaacaactaatgggctgatataaaaattgggcctataaaaaagcctacaactgtatatcataactataaaaatgctttattttcgaagcgaaagtttaggttttggtttttttgtccgtcgtagtgatgcagcaaccaccgtcaaacgccgccggagctggacagataccatcaggacaacagcatttgtggatgatgatgcaacagcagcagcagcagcagcagatgcagttgtctgcggcgccactaggtcaacatcagtacggtattggatctcagaatccaggatccgctagcgatgttaagtcgttgtggatcggagacttgcagcaatggatggacgagaactacatcatgagcgtctttgctcagtctggcgaggtaattttacttgactgtttatcaaaatcgagatgaacatagtcttttgcttatcatgtagaagattgattaagtattgttctttgcaatataaatcttcattttttatggttagtgaatacttggtgtttttgtttggtggtttcaggctacatcagctaaagtcattcgtaataagctgacgggacaatctgaaggttatggattcattgagttcgtcagccactctgtagcagagcgggttttgcagacttacaatggtgctcccatgccgagcactgaacagacgtttaggctcaactgggctcaggctggggctggagagaaacgattccagactgaagggcctgaccataccattttcgtaggtgacttggcacctgaggtgactgactatatgctctcggacacattcaagaatgtgtatgggtctgtcaaaggggctaaagttgtgcttgacaggaccactggaaggtccaaggggtatgggtttgttaggtttgcggatgaaaatgagcagatgcgtgccatgactgaaatgaatggtcaatactgctcgacaaggcctatgcgtattggtccggctgccaataagaatgctcttccgatgcaaccaggtatgttttattatgtaggaactgtgtatattgagtatgttgaaagttgatatgaagtttgtttgtgtttgtttaaccttctatgttgagcattatatttgagtgtctttttgggtgctgtatttctctctgatcagtttagtttcttctttcaattagtgctcaaagattaagagttctcatctgctctttttcctttcggttttggattttctgcaaaataaattttgatatcgtaaagcatccaaaaacttataaagatcagctcatgttgtcttaaagcaggagaacaagtggctctctttgggggagcctggaactgatttcagctgaaaatgataccactttaatgcgtggcctcatttaggtcagtcggttatgttatcagaagaagttacatataagtggctattattagcctacagtttcaaattactttccagttccttacttatatcacttagacatatttattttgagccttttaccttcaaattcattctttttatattccgtagctcatttttccccttattttattttcacctttacctaaaggctaaaagttaatacttcttctctatgcagactgttgccagtattttttcatcttttgacaatagttttcctctctagatttatactattaaacgttggccaaggagttgttatgtaagttgattactaggaacttctaatattgaagaaatttagatgtaggatgaagagtttgctttcgttattctatgcttcggcgttaagtctcacatggaccgtttgatatgtgcttaacgatttgtacatcaataatcaactgacttcagatttttctgatcttgatctctgtatgttatttggtttctttgctggtatcttcttaggtgttgatgtgaatgatttttgcaaacgttgtttgagtgaactgtctgttgttctgcagtttagttttgtagttttctcaccatgtcgagtggggcgttatgcagtatccatagaaattttatagccatctctcttgagctcacccatctgttatttgcagctatgtatcaaaacactcaaggagcaaatgctggagataatgatcctaataacacaacagtatgtcgctagttttcgtttgttattctccaaaatctttagtctgttgtttttgatagactgcaagtttaacgcgttctactttcagatttttgttggaggtctggatgctaatgttacagacgatgaattaaagtcaatttttggtcaatttggtgaacttcttcatgtgaaaatacctccaggaaaacgttgtggattcgttcaatatgccaacaagtataaaacatcatatcagccattcattatgaattccattttttcttgcttacttcattattctctttgttgtgcttcagggcgtctgcagagcatgcactttcggtgctgaatggaacacaattaggtggacaaagcatccgtctttcgtggggacgtagtccaaacaagcaggttagcttgttacctgttctcccacaatttctcaaatctatacgtttcaatcttattagtgatattatgagcaaaatcataacttaaaactttgtcgtcacagtctgatcaagcgcaatggaacggtggtggatactatggataccctccacagccacagggcggctatggttatgcagctcaaccaccaactcaagaccctaatgcgtactatggtggttacactggctatggcaactatcagcagcaacgtcaggtaactcaataacactaataaacaagaataatattttaagatatgcatcatgtgaatatgttcttacctttcttgtttttgcaattgcagtgaaacatcaacatcagctatttctaccaatgtcttggaacaaaagatgagcgattgtgtcttattaggacttctagattaaaagtgctctctttttgtttgagttttattttgcaaatgagtcgatcttgaatttgctatgaacaaagtgtttactgaatgttgaaactttattctgttgttttttaaaataaatatttatccaaaatcaatcgtatttaccacttgctattggtcaaacggctcaaacctatagagatttggttaaagatgcactcccaagtttaaaagagtccatggcctgatagaaaatcttgttataaaacttatctgattactgccaaaaattgatatattatggaatttacgaaagaagatgtaaattttcttcatcgcctaatacaacaaacaaaccaaaagctaaaatgcaaatccttcttttcctcatagtaagacggtaacaaacgtgcaatcgttaggtggaaacaaatcacaaaattttccacagaactgatgtaaattaactacacgaattaagatcttatcattgcgttatgaatttgagagccatttcttcaagatcagctacggaaagagaatctgtattgatttttcctccattttcttcattgtcagagacgattttctttgctcttttgctgtttcttccagtttcatcatctgatgatccagaaccatcatggtcttcttcttcttcttcttcttcatcctccatggctcctctcttcctcttaatcttctgtttcattctcttttccctcctcctttccttgtctactttcttgtcctctatatcagctttcctcatttccgctcccactttcttatagtaatcattcattctctctgcaaaattcaacaaccaatttacacatgcttttttaaaaactgattcattgctcgtttgtgtgaacaggataatagggattcatgttcctttaccttcatcaagggctacttcagtccctgcttcagcagctacacttgctaagggagccaaagaattgccttcctcatcaagcacaaccctcgacccaaatggtctgtgtagattgatcttcagcttcttgtttttcaaaacacgatttcctggtctgaaaattcaacagaatttatacacataattaagcgtgaaaagactggatcgaatgaatggaaaaaatgttaacggaatgcgaaaaccatacatgagaacttcttcttccttggttgatttttctactactttgccctctttacgtggcttgagagcaaaatcctcttcttctaaatcttcaccaagaagatcttttttgacaaccagaggtgcttcatattcctgtgcattctcaatctccatagcgatagaactctcatataccccctttttcttcgttttaaggtttgtgaatcggattctgggagtcattggcagaccaagtgaagcagaaaagttttcaatcgacagctttgacacatcaaaaatctctttgtcccttcttttgtggatggacctcaaatatgtgatgaaggctctctgagcaacaccttgaagatctggatacttgactaacaaagcagccaagagcctagaaacctcctgcaacttttggttgtttgcctgtgtgacaaatttttttacagtcaaatgtttccaaccacagtcgaaactcaaagaaaattgaggacgggagctactaccttgatgagttttataggcactttagcttcttgtaatttctcaatcattttttcctctgaaggtgtcagaaagaggagcgacttcccttgagtatagaaacgagctgtacgcccaacccggtgaatataagaagctacatcttcaggacaatccacctataaaataaatatgatgacatcacacttcagcccgacaagatcatagagttttgtaattctggatgtggattcatacctgaacaacccagtccacagccttatcaaaatcaagacctctagcaagaacatcagtacagaacagaactgattgtctctcaatgaactgagagtacactcccatccttttttcctgactcatttttccatgaagactcttcaaaggtattccaggccggagcttgttgaatgcttcatgcacaaatttgacctgccaggattgtgatccgtttgtcaatctcaagatagaagaaagtggcagaatgaaagtgaacacactatctccatgtagattattcaaagaggaagagaggtaatataatataacctgtttcttggtggagaggaaaacaagaatcctggaattaaggtgagttttgatgaaactccataacatgtctaatttcttttcaactgggacaatcatcacagtctgcatcaaggaagttggagtagctgtaaccgcctctgcatgtacactaatgtactcaggatctctcaaactgagtcttgctagatccttgactttcttagtttgagttgcagagaaaagcaaagtttgtctgtgcttaggcaactgtgagattataggatccaactgccccttgaacgcagaatcaaggacacggtcggcctcatctaaaatcagaatctgcagcaaaagagaacacttactaggcatttgtaaacaataagactgaagaaatttggcagacagaaacatagtcgaagtggttttacggtatccttatttgcaaatataaccatcctaatgttcataaacgtgtaggagaaaggcatcatggacaagtattatagagttaacaacacaaaatgcccaaatgttctgtagctgaaacatttcattaaaataaggatagtgaaaacataaacaaatatggtcatcattacctgaagctgtggacattcgaagtttggagtctcatccatgtgctgaagaagcctaccaggagcacacaccaaaatattcatctcatgaactctctccttctcaacatcaactccttcacgaccaccaattaagagccccgcactaaacttatgaaactttcctactttattcaaaacaccgaatgtctgggctgccaattcccttgttggagatataattatacatcccacaccatcttcaggactccatctctccctatgtaacttctccagaatctaaaacacacaaaaataatccattagcatctatcaaaaatcaaagctgatcaagatacaaagctacacacacagcaataaactctatcgaaaaatcgaaactttaccggaataacaaaagccagagttttgccagacccagttctagcagcaccaagaatatctcttccacataaagcatgaggaatagcagcactctgaacatcagtcatatcaacgtatttcgcatctttcaatcctcttttcgttttatccgatataggtaactgagcaaacttcctcacacctgcataccgagagaaaacggtgccgtttttgccgtcttcggactttccgatcttcgaatctttaggaagaggacgcaatgaaagtggattgaatcctgaatccggtttctgtgattcgatccactgcttcagaagatttatttcttcgacttcgttgagacgaatctgcttcctcattcccttagtcttcttaatttttaccatcttgacacaaacacgaagttagagctccagatatggaaagcttacgacttgagaggctagaatttgcaaaagagcagacaaaagttagggttttaagatttgatagatacacaagaagatgttgaagcagccaattgaagggtttaacgatgagtgacgatgctttttttaattaccaaaaaaactaatctaggcccaataaggatacacaaaggcccaataacaaagcattttttttttcgcttccctcgtctatcttctctggatctcttctgattctcgaatccctatttgtcttcgtcttcttttgttgtgaacttgcgatacatatatatatagatgcgagtacaccggactgtgaaattttggaacgaattgatttgatttgaatatggcaatcgcgaagaaattggaaaatgagatctcacgctcttctccttcgtcatcatcatcatcgctgaacgaagctctgttaatctctactatgtgtatcatcggcttacaagtccatgtgcatatcaacgatggctctgtgttttctgggatattctacactgtctctcttgagaatgaattcagtacgtttccttttggtttaatgtggttttgatttggtaatttgtgttttcgttgatgaaattggtctttgaatttgtgtcggagatcacagagatttgattaggatcttacgaaattatgctcattacttaattggtggtgtgaatcattcattgtaacattgctagttttttttcgatttgtgtagcattttggtctgtttgactgtttctgaattttactggtttgattctgaatttaggtattgtgttgaagaatgcaaaacttactaagaagggaagaagtaaatcgaatgtagaaagtgggaagattgtggagacacttgtgattttgtcttccaatattgttcaaattgttgcagaggttggtctttttttctatggtgattttacttgtagagattcgtttaaagccagattgtgtgactttcttatttttattttcatagggagtctcgctttcgtccaatgttgcaggggagattgagggtgaaaatgtcgtgtcggccgtggcagtttcttccttcaattctggcaagaacagaaggggcactaatcgtagaaggtaacctttgtagttaatgttgttataagttcatatttagatagaaaagttagaaggttaaggattatgaatcttgttttgctcctcgcagtctcttgtcttttagttttgtgtcgatttgttctatggctttatgatttttttttttaatctctttaatttatgaaataggaattccgcgaaacgtgaaaattgtttggaaagtaaagcaagaaccttgacatctggggagaccgcaggtgccatgaaagagccagggagaagagatgaggttggtattttacaggtagctttgtcttgtttgtattgtggaatttaactaagtaattctcctattgttgtgggaactggtgatagagttgatgtctagctcacaaggtccatgggcccttgtgtctccccaagatggaagttaaagccagcctccatttagtaggatgtaatgggttgacattaaagtagatgacttggttttcggtttctgtaatgggttgactttaaaatagatgccttgcctagagtcattagttaacatcttgtcatgttgtttaattcagctttcacagtctgagtccctttcttggttttcactctcttgattccttttccaatttcctcttttgcagaacaaatatcatcctagctcactgaaccatcaacggtatggatcataagtatactgtttttggtatataattagtgtcctgttaaaatctttatctccgtcttaatatttgccaatatgtaaccaaacttctacttatatatcagttttagctatctagttttctggctacaataaacctctctgtgctcagtaggtaactctctgattcttgtatattcttttgctgacagacaggcaggagtccgcattttgaagaatagcaaaaaaattactgatgttcatcaggaggataacgttagtcttgcacataattggttcattctgtttttcaagatattgctcagcagctgcttattattatatttacctattgcaggttgaagccagaagctcaagttgtagctgtgagttcctttttgggaaaaacttttttattttacttacagaaccatgatgaactcttttctgcttcctttttgacaagaaaatgtttcctgacatgtgtctcatcacgtgttataatgacagtggacaacatgtctgaacgtgtaaagccgatagaacaagagaaaatgccggaaccttctagtaatggttttcacgatgctacggagagaccctcgtcaactgaaaattcttcatcacagagcactactgtggatgaaaactcagaagtgagtctggttttggtggtatctacaaatagcttaccacctacgcaggcaacagaccctgacaagaaggctaaggtgataaagaattcgtattggtttctcatattcagaatatatgttagtttgagatgctcgtttcttggttatggcagcttgatgacttgtgcattgtttcatcttactttatttgttactcgtttttgaattcaggagtttaaactgaatccaggagcaaagactttttccccatctcttgcaaaacgtcttacatcagctcatgccggtatgacgcctgttgttgcgaatatgggttatgtgccaagcaatactcctatgttaccagttccagaagctgttcaaccagaaattggaatcagccctttcttgtctcatgcatcttcaccttccaagtttgttccgtacactaatttggctactggaaatgctggtggtggatctcattttccccaacatgtaagtattcaaccacaaatgaggcatcttctattctctctctcttttaatatatcacattttttgggaacctttattcatctattagctcaaatggctgaaataccaatattgcatgaccagattgtgaaactgagtattgttcgcaaccggtgattcaaagttctgtgcaatcaatggattatttttttcatttgaactcatttttctgcagatggttggaccaactattaacaggggacagccacatagattcaccactcagtaccattctgttcaacccacaccaatgcttgtaaatcccaatcctcaggttgcatttcattaacaacaccatattctcacttctgttcataaaattgtttataagaattgagtgatagtgtatgagtttctaaatgctaattgaatcgtatattccaggtgatggtcgggagatcaggacagcttatgtatatgcaaccaatttctcaggtaagaagaacttgaataataatattattgtgtacataaacaatcacattagccttttttgcttacaagaaactcaaatccgcttcccttttatgttcttataaggatttggttcaaggagcaccacataactcacatttgcctcctcgtcctctctttactccccaacagtttcagtatccaaagcatcagagtaaaacattcttctctgtccaattatggtttcatgttaagtaagaccaaagattttggttttcactaaacttcactttcttggtaattcaggtctaatcgcaactggtcaaccgatgcatctatatgctccacaaccatttgcagccaatggacatcagccttacacagtcatgcctaccgatattccggttatgcagtcaccttttcccattaaccgggccatgccaattccggttcctaatggtttctatggcacaaagtttctatagaaagtcttgtttttcatcttcattaccttattatttgcctcccagcttaataagtttttgatacatagttaaaaaccaaaaattatagatccgtctgatgacttggattttttttctttctcaatgatatacaactactagctaaagaaaacagaaagaggaagttatgagcattttatataatgaatcacgataattttgctgacatctttaagctagacaatagttagattctgttttcctatttctgattacaataagattgaatcagactttaagctcttaagggtttgcaagaagaaataatagtcttcagaagatcaatggccttgagaaaaatgggtctctctcacattctcctgcacagcctaagacaaatcaaacatgaatctctatagagaaaaccaagtaagcttgggatataatcattggtatggttgggtttagtacctgaaggagttctgtcatcttgcctcgtccgtaactcggcatgggtttcagcatatgtactggatggattgggtgtatcgcctgcaatggctcaatggacagagcttgctcatctgactcgggttcaacggactgtgttgtgtgctggacttgacctttattcatcacctgtgtgagaagcgtctcaaaaggcttgccgttactcgctccactcgcttgagaccctgtctcggtctgcatgggactgtggtcgatcgggacccgctcaccaccattctctagatgggcaggctgaagcacaacgggaacaataagattatttggtattgttggatgagccggctgaatcgggacaggaaccaatgctctgcttctaacaccactaccacgcttctcccggaatctagatttccgacctcttttagctgagccatcatgatgcatcacatcactgtttcttcttatcattggaacatcaggagcaacatcgttatcaacagatacaggatcacagtgaccaggcttgaagaccacacctctaagcatgctatctgaattcccaaccttaacagaaagcaagaacccggcttcaaatgtcgcctcaatcacaccactaatcggctgtccaaccatagcttcatcgtcattcctctggcgagactgctgctgactcctgctaaaacttggagaatgaccaagagagtgctcattcgattccagcttcaattgtttcctcggacgacctcgtttccgttttgccgttaaatcacctgagatagtgtggttgttctcctcatggctttccttctccatttctccaagctcgatattgcagtgactagtgttggctatagttcctctgagacagtaaatataaaacacaggtgaaaatcgtcaatacacacaattgacagtacaacaccaaagatcatcacagtaacgagaagttaaaaatctcagatgttctataaacaaaatctttaaccaaaaccaaaacaagtttcaaaaatgtaaactttttttttttacaaataactttcacaatccaagaaaaaaactgaataatgaaactgtaattttattcacatttctactaaaaacctgggattaaagcagataagatccagtaatccaaaagaacatgcaaccatttctaaacccttaaaatcaagactcctaattacaaattaactcaaaatcaaaccactaatcaacacacacaagaaacaaaattagcaatctctcagtagccctagaatcaaatcacatagacaaccccagaaaaaacaaaaaatctcggatttcaaaaaaaaaatcgagtgaagaaacacacagtattattacccaaaataaccaaaacaaagcacgacacaggaaacaaaagctttaaactttttccgtcaatttcggtgtaaaacacagagacatagaagacagagagaaaaaacacagacctgcgaatttttcgtctccctttcttcagctttcttcttgtggcatttaacaacgagtcaataaagggctaatgcgaaaaaagacaaaaacatttgagagggccaaaaatattttaattacagcaaaaaaaattgtggatttgtttggttataacactttctctgttttgttaaattaatggtttgtttttgtttgggcttttagataatatctttgcttaaagatatttccttcttgcttttttattatgcttctgtgatcagttacttcttcttttttagaggtcacgtgaaaaccacgtgtctgctatgcaaagatctttgatttatcaggccattagcgaagtaatgtaatccttcttcttttggattagcccaaagatactactttaaagcccattcaaccttggacttaatttttgcaaagaaaaaaagttgggtaactagaaaaatgtactaacttagtattggtatatatacaaatttcggtttaacttgagattggttgataaatattctgagtctaattgcaaaattattgtttatctgttctctgatacgttcgttactttcatacatttccaaccatacaataaacaaaatcatatttcagatttattccaaatatagtggacgacattcaatttctcaaagtacatttgattgaatgctctagcttcttatctcatcccttgatccatcaaattatcagctttttctaaccattctatttcgtttcaggaatcttatttccttcttttgcaagtaatcaaaggaagagcttcagaaattagaacaatcgaaatatttcttatcattgcaaaagtcaataacaaaaccaaagctttaaaaacttgtaatggtcacaaacacaccacaccacaccaattattcgcataaatagtatagatatatcaaacgatccaattcgggttcagtttagaaaccgtggatcttgatctgatccttcttagcaatcccagtttggaccaagaactgagacactttcttcctttgatcaccttgaagctggatgatcttgcctagttctttgtcctgcacaacgttaccgttgcagcagaaatctttcttcaaatccttgagaatcctctcgtagctgtactctttcttaagcccttgaacagtcgtcaagctctttttcccattcctctgctggattcgaatgtgaatgttctctttagctcctggtgcatctgaatctttagcttctgcaaatggatcgtatgctgatggaatctgaatgtctagctcaaccatgtaaacttggttacttttaactaagaaactgcccttaagctgtttgattctctctgcaaaacaaattgagaaaacccaagttttagactccaatcaacaataaacaaatctagtctttatcaacaacaattaatcaagaacagagcatgacttaaccaaatagatcatgtcatcatgatgttcaacatataactagattataacatacgaaaagtccctatatagatcaattactggatcatggatatattcgaattcaatctcaatccaaaccctaaagctgaccaataaaatgatttgagaggagacaatccaaaatttagatcaaacttctcaaaaccataacaatcaagtaaatcaattcgctttaatatgagattcgatagtttatgcagagattatatccaaatcacacatcaaaaccataagataagaaaaacagaacgcaaaatcataccaatccgattcgaaaacgaaacaacgaacaaagagaaagcttcaaaaccctaaatcgaattaaaactagagagcaatcaatcaaacagagaacaacaaacaacgaaacgatcaaatctacaaaagaaagaacaaatcgtacctgaaggttttgttcgatggagtctttggagtttttgttaattcaattgatgaagaagaaagcttaaggaaggttttgtatttatagaccttttttttttaccatagatcttctttttatggcggctaaatcttagccgtagatctattattttctagacacgtggatggataagttcgaattagtgaccaagtggggaaggtttcacgtttagaataactggtgtgagacgcagagaataattatctattttctttgcgtataatggacgcgcaactctcatatccgtgtaggcccattaagagcatttattaaaagaaagataataagagccacaagtgggtccaataacaacacttgcgagaagaatctcgaagtcaatatgatttcgtattttattcgatatctgtggttgtctgacaaaagaagagacgtcttattgcagattgttctgatacattatgttgaaaacgttttacacattgtcactcaccgaatttacttgctttttgatgaagcaaagaacccaaatctagatcaagcgaggagatgtttttaaatcaaaatcactcactcgttgctcaaacttcgaatgatatacgaaagcataccgccatgattatagtatgttagttccacttgatcaattccaatcaaccaagtcagaccattaaatatatggtgacaatcaaatctaaacaaaagcttttgtgattacctctgtgtctaaccgcaaagtgcagacaaaagatttagcagtgtcagtagtcacagttatgtcctggcctggttttatctcattgatattactaggaaggtggattgtgtagagttcatggccagttagtccaagggtttctgcatcttcaccggacttgaaggccattaaccccaattcctgtcgaattcaagctgcatcacaaatttggacaggtttctctatgcagaaatttaggggagttactatggaataagctatttaatcctacttaagtcataaattatggccaacagcgaaagattcgtcacattacaacagcatagcgatgaagtcgttttgtaaaccagtggatcactcccaagacgcctcactgcattcctcatagaaacaagatcaaatttagccatgaaccaaaaaaacagaaagcaagaaaaggtaaaacaaaagttagtataaattgggaaaagaaaggactctaccaactgcctttaaagtaatcatttggcatcttgggatgggatctcaactttcttaagtcaatcaacataccaatccaagacacaaagactatagctctgataaatctgcgtaaaactgaggacgaaagatgaagcagaggaaacaagttcttatttaggcactcaaacagtttatatcctcaaggggacacacatttttttcccatccagatgggtgtaaaaggatccacactactttacatagaacggtgaagacactaccaaatctgaaatatatataagttgagtgcatttatatactctactgcggatttgggggacgactattagcagcagagactctagagccccactccaaaagttccttgcttgtatcgtctttgtgcactatcacttcaatgaaacaaaagctctctttttcctcattggttgccgtgttgattgctttcactaactcctcctcgcatctcaccttggcagtccagcattttccttctccattgtgtatggcctcaacaaaagctgtgtagttccagttctttatgacattgtaaggaccatcgtgaatttccacctcaatggtgtagcctccgttgttgatgaggaagattatggtcttttgcccacaccgtatcatcgtagatacatcctgtgcggttacctggaaactaccatctccaatacaagcaatgacacgcctgtttggcatggcttgagcatagcctagagtagcacccactgaccagccaattgatccgtactgcatttggaattcgtaaccgcatccttcagggagcttcagcttctgacagttgaaccaggaatctcctgtctcagcaagcacagcagactcagaagagagcatattctgaatgtgttggaacagtacattaaccctcaaagactcattcgggttatctctcaaaggctttccttctgggacatagatcctgtgataattctcataagaagtgttgttgtgcttaattcgtttagccaactcgcttagaaaatccttcataagaacacatccaaacgcaggtccgttaccgatagtaacccgatcaggctgaacgatgattgccttctccttcttgagaagcagagaatacccaacagaactgtaatcgttgaaaatcggacctgcaaacagataagcatccgcagattcaacgatttcagcacaaaaagctgtactcacagctccccaatacgtccctataaaatgcttgtgatgctcaggtacttgtcctttagcagaaggcatcacagcaagaccatagccagaagcatcagcaagctcaacaaaagcatccgcggctttcgcaacccgcattttcggcccaccaacaagaactggcttcacagctttgttcaagaactcagcagctgcctccaccgccgcatctaaaccaatctgattgctaaccttcatcggaagcatgaacggaacaggatgacgactaaacgtcggaagaggaatcgccggtaaattacagctgatactgatataaacaggtttgctttctttcaaagcagttgaaatcgcagtatcgataagttcatgagcctcttctaagttattaatcacagcttgaaaacaagtaacagcttgaaaacacctaagctcttgagtgaaatcaggtaaaccaattgtatgatgaagaatcctattggtaccgtaatcgttggagtttggaccaccgacgatgcaaatcagaggcagattctcactgtaagcaccggcgatcgcattcagaacactcaatccaccgacggtgaacgtaacgacgcacgcaccaacaccgcgagatctagcgtaaccgtcagcagcgtatccggcgttaagctcgttgcagcaaccgatcagcttgaggtttggttcggcgattaggtgatcgagaagcgtcaggttgaaatcaccaggaacggagaagacatcggtgacgccgatttcgactaaccgtcttgctaggtaacggccaagagtcgcgtcgcaggggctgacggtggtggagtgaagtggacttgtgttttgaacggtggagactccgccgtttggaggaccgccgatatcgtggttggtcgggttacacgcgtcgatagatccgatcttagtgtccatagtggtaacgttcgtttcagaattttcgaacaatagagctatgagaaaattggagagagctcgaggtaaaagtacagtttgaaatatgagattagtggaagatacttaattatagacgtaaaacaacggtggctaaagtaatcaaacggtggtatgaaataggcggctaataagatatttttagccgcagatatttatgtgtctctgagattgacacgtgtccttatatagttggatattggagaacaagttagaaagttcacgttgagaatagttgtgagtccgcagagaataattgctctcatgcgcagcccacaagggcatcataggacccgattggatataggatccgacccggttcgtgtcaataccacgtgactcaaaaagaaactcccgctcttggcgacttttcgaaaccctaaagagactcgtatttcccccctaacgccgattttcccgccgctctcactcaattacaaaaatccgtagatccccaatctccaatcacatatctcccacaatctctttctcgctctctcgatcatcagattcttcaatctctttcaccaagcttaaccaaatcgttaccatgaaggatatctctaaatctccggcgagaagaagcgacggattccaccgctacttaaaaccaggagcgcttgctcagatccgaaactcgagaatcaacgctagatctactacatctctcgtatctcgctcctccctctcgcagctagtagatccgatttcaccatctgagaactcggttgatgaagcagcagcggcttcgcggaatctgacgatagatcaggtaccacatcttctaagaaagatctatggtccttacagttatcagaggaagaaattagccgctgctagatctgtctcgtcgatgatgatgatgaatatcaatcctcctataaactcagttcttgttgaacccagtagtgatgttattgctcattgagttaaactagtttctaccaaatctgtaatctgatgatacaattcgggtaaaatgtttaatactatcataagactcactatatgaatcattaaattatcaataaattgtgtgttttcaattgatgagtttatctttgttaatttaatgtttgtgttgatttgatatcttacgatttggatttgactatagattccttcactacatattaatgaacacttacatgagtatcattttgggattcttaatgatgtatatgtaactcttaagtgttgtaactgttttgaaagattagccaaacacttaaagattcgaagagtaatgatataagactacatatatttttctcaaatttgttatcatcttgttagattgtaattgacataggctatgttacctcagtcaattctctgctttgcttaatctaaacatctcaaatctataggttttgattatctctctgtttgttgtgatgggtaaaaatgtttgccttctgctattatcagacgctattgtctcagaccaaatggttacctatgtttgtcgatgggtgttaacagatttcatttgcttggtggtattaccgcatatggaacattggtcttggtttatttagtctcatcattcgatgttaataagttttatctatatgctttctttcatttgttctaatgggtaatgatggttatctatatgttgcctttagcaaacgtcgctgcccatatggttgaacttgaatcctgatccaactgaacctctttaccctctgattatgcaatcggttattaattgatgttgatatccccaagtacatatgtatgttatatgtaagagaccattcataactttcactttctacccttcaaagttttatttaactctcttcattgtcaaatccttcatctttactactttttcaatatctccccattatgtataaatttaatgcatcaagtactacaactattccacatgtgcattgataaatcaacctcaaaatagaggtaaaagagagagagaaccacttttttgaaaggagtggaattgttctcgtatcacgagattacataaacgtgagtcgtccaaactactagattcgaataaaccaaccaaatcacaaattgtttcttttaaaataatgaaacatgatgtgaaaacacaactcgtagcctatttgatattgttttcgttcatgttttgtcgacgtagacccatatatcttagtaggttttgaaataaaccaaactgagccccaactaaagctactaaaccacggtcgatagaaccaaaccgacgtaaattcaaagctataaactcaaaccgaattataaaatatgaagttatgtttgattttgatatttttctcactgaatcaaacctaaacttaaaccaaaatggcgaaatctgaaaacccaatgtaaatgcagactccctatggtcgattaattttgttgttgcagaattctttagaagtatgatgtgacatcaccttgactaatgctaatgtcatcacttaatgtaaagaacgtactaatatttagcaacgattttaaaaataataagcatctcaatacttaagattatctcaagtaaaactaataatccaaagccatgatgattcatatgaagcccactgcccaccaaggcaagccaaatgtcgatctctctcgctaccagcaaccaccgcacttgcctcgtccatgtcacttccacaaccataaatttttttggtgccactcgaaataaaataaaaatataaaatttatcaaaatcattaacgatttaaagcaaaattctaactttaataagataaagctacaatccggagatggtgaaaaaactttaatccatattcacattgtaagtttttctatggaaaatcacttcttctttttttccacgcggtttcaaaggttaatcataaaaagagtagaagttaaaggaacttttttgtatctattatagtttgtttttatatgtattgtgaccacaaacacatatatctacatatttattttatatataaagagatagataatctaactgagaaatccacttgaagctattcaacaatttttatagctttcttcctctccaaaaccacaccaaaaaaaaaaaaaaaaaatttgattttcagatccaatcaaccagagatgagagataacaacaataacaacacaagagaagaagagagaagcagttcttcaaagcagcaacaaccacaagctcctatgtctttgaagatcatagattcatgtctcagactaagtgtggttcctctcagtgttgcaaccatctggttaactgtcactaaccacgaatccaacccggactacggcaatttagagtacaactccatcatgggtctcaagtaaacatatactctttactttctttcaactttttagtaagtattttataattattaattaattagttataatttgtaggtatatggttggtgtgagtgccatatctgctatttatgctctgctctctactgtttcttcatgggtcacatgtttagtctccaaagcttggctcttctttattcctgaccaggttttttaaaattatcttctcaatcatttatcaaatatctagtatgcaatttcttatgttagttaataatgtttttatatttttttgggtgtatgaaggttttagcttatgtgatgacaacatcagtagcaggagcaacagagatagtgtatctacttaacaaaggagacaaaatagtgacatggagtgaaatgtgttcttcttatccacattattgttcaaaactcacaattgctttgggacttcatgtctttgttcttttctttttcttatttctctctgtcatttctgcttatagagcttttagtccctttgatcctccttgtgattctcaaaccaataatgatgcttaaattagtcagttttggattcaactttatcaaaatgttgcagcagtttatggtgttttaactttcttctcaaaatattacaaaatatttttttttatgccgccaactgttgttgtaggcaccatactcctacaaagaacaagcgggttaggcagccgtttagaaataccaatttattttatgttttttaaggctaccaaattattattttactttttaatgttaatatataggtgtatcttaaaatttttgtttaataaattttttaacacaaattttgcatgattttaaactaattttgaataagggatagaaagagcgctacaaaaaaaatcttgactcggaccatcatttttgttggaccggcacatcctgtagatgtataaataacttattttgcggaaaaaaatagatgtttacatgattttacctaaatactaccatttatgtaaatctataaatatcagtttatagcaagttataaatccttacatggattaacaggtgtacaaaattttacaaaataataaatacaaaagcattgaaatagtgtttttaaccaaaagaaaaaaaagatactgtaatctatagaaagaatcaaagtgaagttgcagaaataaagaccaaatcaaatgaataatttattaaattgataaggtggcaaccaacaaatatattgcacttaatatagtaaaaaatcatacattgctgtcagtgagtagtaaaccaagtagtcacccatatataaatttcttgaaaatatgaaactcctaatcctacatgacttaaaccttttttagataatttcattatcaaatggctattctttcaattcacccttatatctttgcacaacaatagagagagaaaaagaagttcaaaaaaaacataagatctaattaagagaggtttttggtctagttcctctggttcataccacaccaaccatgaagaacagctacaagcatgaactcatctcaacctcaacgaacgaaactgatcgagtcattaatcgttgctttctccggaaaaagaccacaaaagaagtcattcatctcaaagcttctcaggtcgaatcagattcgtattccttcatcgtaacttaccagccaaatcttcggattcgtcatgaaaatctcgatggacaccaacttaagaccactcttgaacgtcatcccgatcgtgtatttaaactcgaagacaacatcccaaaacagtttcttgtctctcaagaaacatgccttgaacacgtcatgatcatcttgtcggcgatgtatctcccgcaaactattcaagaacgtcttgtccgttacatctcaaccgaatccgtcaagttcagaaaccgccgctgcggaacaggaggaggtttgaaggtagaagttgacgttaaagtcgacgtggaacaatgggtgaggattgattgttgttgtaaacaaaagggtacttgtctggtcccggcgttggattgtccgatatgcttaacggagttatctagtggggtgagtcgcatgaagttaccatgttcccatgtttttcacagagactgtataatgacgtggctgaaaaagaacccttcttgtcctatctgccgaaccaaagctcatggcaaaactgtttctatctattaagctgtatgtgaacttttgtattgggctttaatatgtgaattgggcttttatccaatccatttaagcccatttagtttccttggtcggaaaaagcaataagaatcattttttcttagtctcttcgaccaaaattctcagcaagaacgaagaaagacgaaatattcgcaggtaaaaatcacactttctacttgtgtaaatcaaaaccatttttcattcaatttgtttacgaaatatgagtaatcctcgtttaacttatgaatttgagttactggatcgcagtatttttgctatgaaacattcaaaattttcaatagaattagagcgcaaagattcgagattttgtcaactctagttctgtgtaggccttaagttatgtttacatcatcatcatgatcatcatcaagtgatagtcttcttacaggtcaaagcttggtgttgagttctcttctatctttctcatggagacgagctctaacttgtcttccatggttcgtcttaacattggtaaatttcgtccttttatatattttcttgcaatcccattactcatcacttagttaaacgtttaaattcctgtgaaaaatcaatccttttttatccacaatgtttaactttgaaccaattattgattaactaaaactggtagctagaatcgtgtgagaaaggatgtgcttggtcatcttttcctagttatgtttctgaatcctgtgattgagatggtgaatgctctagttcagcaaatgtttctcactttgaggcttaggtttcgttgacctctctggtttcagttgtaaacttcaatctttgttgggctgatcataattaactgtgatagctaatgttgttttcatgcaggtggaaagaaattttgtacgaccattgatactttgactattcgtgagccagactcaatgctcgcagcgatgtttagtggtcgacatgcaatgtgccaggaatccaaaaaggtaattgttgcattctttattacttgatttgcaccccaatattttgtttcaggatggtgctagttcagaacctgcatatttataggcttcactgagtgtaatagttggtccttggattgagtagccttcattgaatgatattttaaaatttagtttacaacagagactgtgattttagctaccgactataagatttgcttcaaaatataagaatcgattcaaagttttgacgccatgtaccagaaaatctgttagacataacaatatactgtatacactcacatttatatgtatgagtatgctttttccatttagcagcaccttaggatggcataatagccttaaagactttaagttaagggcgaggttcaaacgaggaaaggcttgcgctgtatgcatacatggatgtgtatttccactaaactagttaatttttattgttgcagggatatgtattcatagatagggatgggaagcacttccgtcatattttaaattggttgcgtgatggcgttattcctagtctgtcagatcctgattgttctgaacttttgcgggaagcagactactatcagcttcttgtacgctaagtttctctcttaccttactattctcgtttttgtttttcatttcttagctagtaactggagttttactttctgtggagtacagaaataatttgtgttggagatgtaatacattgcattctcttcctatttcagggactgaaagatggaataaaagattcgagaaaagaagttggtgaagtagaagctgaattaacgcgtatagatatcatcaaatgtatacaaaccgaaagagtcaggttccgaggagttaatctttctggaatcgatctttctaaactggtaatatttcttaacctcatattcttgtagtttacaatgctgctgatttgaaaccactacatttctgatccccaaatcagttccttcagatttcatttgtgggtttgattaacttctatgaaggaaaattaatagaacgtatggactaactgattcttgttgttttaacctggagtttaaaaagaacttgcagttacattttaatttgattttttcaactggaatacacatctgctgtcttagtgagtgtctttatttcttgtcaacattaagggattagtaaacctatccgggaagaagagcttcttcgtcttagtcagtgtctagaagaaaccatttcgtatttactgtctgaatgttctctttgaataatgtaggatctatcccttgtggatttcagctatgcttgtctcaggaatgtgtttttctctcgtacaaatcttcaatgtgccaaatttcgggtaaatatgttgtatcaactttttttctgctttgcgagacgaataatatcatcgcatcaggggagtttgcttgaacatctgctgaattacttaatgcttaaacagaatgctgatgcagaaggctccatctttcacaatgctattttgcgcgagtaaggaatttgttagtttctcatcgtatattggacaatttttacttggtaacactcacctgaaagatttaaattctttctttcctataaaaggtgtgagtttaccagcgcaaatcttagaggagcgttgttagctggtacaaatcttcagagtgcaaatctacaaggtgcatataagcctatcttgcttgttaacgatcttttagactgtcatgaaatgaaatttgtacatacatataaccataatcttactaatttgttcctacttgtgtactgtagatgcctgcttagtgggctgcagcttctgtggtgcagatctccgcactgcacacttgcaggtgccttaagtagttagtctgtgtagaattagaattttagcttagacttttcaccatgacaattaatggttatgaattgccggtttaatccccacctttcaatcccacgtatccagtaggtgtttatgagcatagcgtgattcggtgataatgtttgattctctttcttacctaacagaatgcagaccttacgaatgccaacttagaaggagcaaatctagaaggtgcaaatttgaaggtaagcaattccttttattgacaatttatattcagccttatttgatttgtgctaataagtgtagtcttaaatgagtagtgtttagttacggttttaactggatc

SEQ ID NO: 902 - DNA, 19971 bp, Arabidopsis thaliana
ttatatgtatagggtgcaaagttgagtaatgccaacttcaaaggagcaaaccttcaacgagcttacttgaggcatgtgaatctgcgagaagcggtaagtccaaaaccaatacttgggtattgaaaaacatacatgcgcagattgattgatataggccagtaattggttggctcttatacaagtttctgagtagagtttaaatggttaatccttgcgatatgtttatgtaacagcatatggaaggagcaaacctcggtggtgctaatatgaccggtgctatccgataaactccatttgttcagactgactgtaagtctcgtctttgtaactgattatggcaaaacgtgaatgtattggccatttctcaatgctccttgttgttgaaaattgaaataacaaaaatatttctttttttctaagaggcattttttctaataatgttatctttctctaatcccaaatgaatttggaaattataaaccttctaatcctacatgagtttgcttacgttaaacaacaacaaaaggaacactatatatatattcaggtagagagaacgaagttacaatcataagacaaacgaaataatgttgaaaatattagggtttagtggtaataacaaagtacccaaagataccagcttcgagctaccggaccatgttaccactatagagcgaaactgtacgtgtttccacgagtcaaagacaaccaaggaaggcattaatctcaaagcttttccggtaaaatcaaattcgttttccttgtcagtaatttatgaaaaactcgaaaatttggtaataaagatctcgctgaacacatattctctttacgacttcaaattcgtttcaaactttctcgatagaaagtcaaggcaaattacttttctattatgttttcatatttatttcaattactaaatatcaaacattcgattgtatgtattaaaaagaaaagaagaaatttttttttgataattataattagcaatatatacaagaaatctttaatacacttaaggcaataacttaaaatcttcttttctcacttttttatttcctatctcattaaattttcttttctcacttctttaatacacttaaggcaataatcatctttatcaaactttattaattatttttatatttttatatagatactatattttggaaattaccattatatatatatatatattaaatttttattaaataccaaaattatgttttattttattaacatcatgcattataccttttgaatggtaatacaataatgatacgaacacaagttactaaattacacattataatcaacctaatattctttttggcatatttttgttctaaattaatttttatgttttgcttaaaattttcgtaatttcttcttctaagccttaggtggagcaagccttggtgactcgacaaagtgaagggtttggtctccagaaagttttcttccaaggttcaagaacggatcttcacaattcaaattggtgagaaacagtttgaattttgaggatccgttcttgaaccttgcaagaaaactttctgaagaccaaacccttcactttgtcgaatcatcaaggcttgctcctcaaaatcctcacaataaaaaaaaagagagatataagaagatcaatctagaaacgtactacgtacaagtaaaagaaggaaatgaccattcaagatttgcaagagctagaggagagagagagatgtgtaagttgtgaggtagattgtagagaaaaatagggtttttatagataaaatcgatcaggagagttaacatacgaagaaagagtttggaaaagcactgcgcactagttctttggatggtattatctttcgtatcattgacagcaaattattcttctatttcattttcttaggatttattttaaatattaatcacaaacaaaacaagtaattcaaagttaggtcgacgctttgaaagataacaaaatttggaaggttctttcgcttaggtttgacgctaatcttatgaccgttagatctttttatgttttttttttggttctgcagttctccaccgttgatttctttttagcaatccacgcttgctttgcttacgtgtgttagtgcgggctaaacccaccccattcggcccgcccagttacaagcccaatccttttatgagcccagcccgcataaatccgtaagtcttaaatttgacaattctaatccgcctgactgtggattttgccgagtgtcggcggatttacattttttttcggcccattacttttataaagcctaaacggacacattgaaggttaaaataaagcccactaattgcaaaagaaaaacaaaaaaggagtcacttgttatgcccattacttctatctcgtaagactccaacagcatcaggtcataatcagtctcaacatatccaatgattgcttagttttaggttggtcttgcatgtattaagactttggagttgcatactgttgggccgttccggaggacaaccaagtgaagccatcgcttaggctttacattgttaaacacttctttttggagaactgctttttttttttacattaacaaaaagacacaattttttagttcatcaaagaaaagtttagaaagtttggacccgcacggtatagggaggaaggtggattattgtgagattgctgcttggaccaacttcaatttcgaagatcccttctcgaaacttgcaagaaagctttctggagaacactttttatatatatcaaaacggcactagtttgggctttgtaagagtttctttatatgactgcgtctaggtagtttaattattctagtgaagactttgtaagaggttgaaaaacaatacatgaacgtatccatgatcacaaaattaagtaaggaatcaaattgcattgaatagttaacagatgatttgcaacaattataagttaagaaaattaatgatacatatacaatcaaagatcaaaaaactctgttctttgttagttcttgatcttggccgtagattcttttcagacatagtttctaccttattccctgcatgtcatcccaggaacaattattgttattattcttgttgtgttggtcgtttgttgcggctacgacggctgtagaatcagccgggaatagtgaagctaattgatgaacatcaagaacaagattgtcgtcagtgacaacagatgattgtccattagagatctctccactatcacttccccaatcaagaagcttagctatgtcctcctgcattgtgttcatttgaagagactcttcttcctttgatttcaaatctgcgttttgatcataaacattttacattttacttggagagaagagtagtttagatttgaagtgttgtaagtggttttagttttaccttgcaaggaacataagttgtcagaagaatcataatgtccgaaactaaccgagaagaagttgtcgttgttgttggtgttgttgttgtggttcggaagagaagctgtgagttgtcttcgttttggaggtcggcctctgcctccagaggctaaagcttcggcctcttcgaagacatcctctaagaggctgcagctactacttcttctatgagcaccggaactgttaaggttatgattctgtctctcgttgtctgtgaagttgttgacgttattgaagccatctatttggggaatttggtttgaagggagctgctcttgtttcatggagtaaactgggttggtatgaaatgaggtggaagaaggagtgtaatgggagtgaagaaagcttggggaagaagttgatgtagggtaagaagaagaagaagggtttaaagagaaggaaggagaggaagagtaagggttattagtattgtggtaagtagcggtttgagcggttggggaagggtaaggcaatgtaagaaaggaagtgtaggagtctcttgaaacaggggaaaatggtgcggttgagacgcggttgatgcaattaagaggagtgttagcattgttgtaacgttttgcgaagagtgatgaaggcggttgaaggagaggtggaggtctagggaaagtgaaatttccgttgttgttgttgttgatttgggaacgcgggagggcaaagaggggaagggtcgggtattggttgttgcgaggggaacataaaggagaggaaagtggtggtggaggcggtgtggaagagagttgagatggtgtgtttggagtgtgagggctaagtggatggaggaggttagcagtcgtggtatgaaaagtgaaggatgatgaggactttgcgtttgctggtgttggagatggaagaggggaagatgatggtgtgtttcgttgtgaagattgtggttgaaaatacatttgttgatgttgttgttgttgttgatgatgatgatgatgatggttatgttgctgttgttgttgatgatgtggatgtggatggagttgatggttagggataatatctggaggataaagaggaagtccttggcgaagaagtcgtttcaatctcgtgttccaatagttcttaatctcgttgtctgttcttcccggtaactataataaattgcatgaagattagttaacgtgtaacgcaggtaacaccaagtatatatgtataagttgttgttatacctgagcagccatgcgagcccatttgttaccaagctgagcatgaagctgaatgatgagacgttcttcgtcaccggtgaaagagccttttttcagatttggtcggaggtgattggcccatcgaagacggcagcttttgccgcaacgagccaaacctgtgtttttctgaacggcgttccaattcccttcaccgttctctctaacgtacgcagcaagtatctcatcttccgccgccgtccatggacctttcttcaatatcactcctccgtctgataagtgattggtggatccaccgtccttccctgctcctcctcctccgtacatgatcatagcttcttcccttgccgattcaagaagagaaagaaacagagtttgtgtttattaacgtcttgttgtgttttggcttatgattggggggatttgagaaaggtaggacccacaaagtgatattcaccctccaagttcggccatcggaaaataattgttttttttttttttttgtactgtgacaaatgatgacaaagagggaaaaacagagaagaggtaactttggtaatttacggtgtaaaattacaacggaaaaaacaagaaaataaaagagatataaataaaaaaagaggagagagagagaagaaattgacagtgtttgtttctctggacacaacacaagtcttcttaagacaactcacaatatcggttgtttttttaaaaatttactaatgtttttaatcttctattttaagtaatgacatttgtaacacgcttattttaatatcacattcaacgtgaactatcttcttctttttttttttagataattaaccttttaaagagtatagaaacaacttgttttgacaggattggtcaaatgttttcaaccttcaaataacatttttcccccataaaaccattgtcagctttggatagattggcatagttgactaacattatcagattctacctaaaaaagtttttcattcgactcagtgcaacgaatccattttgaaagtttcaatttcaacccaagattcaagcatgagattgatttgtgaataaatgttttgtactcttcctaaaatcatgttacttggcgtttcaaacattgaggtgcacgaggaatcaaattgattagtggcaaaatgctcttttgtcccatttatcataaatgccttatggagtcctttcttatctttgaccaaacacacaaacacttgttgtgacctttccttctttcaaagcaaatgacgcgagccacttgtgtgtgccataacttgaagactcggccaaacaaccttttactatggtcatatgattaccaaatgttataatactaattcgtatattatatatagaacaaatagagaagtgtaggaagaccaaagacttcagggaatcaggtgaatcaagaacttgattggtttgattgaacatctacgttaggaacatcgttagctaaccacggtgtcgatatcaataagcattctccaaattcaactcttagaccaactatactgatgactgatgatgactctaaaccagcctgaacctcgaaataaactaaccacatcaaaaaaataaagaagcctaggtaaagatttttgattcacatgtagactcacctggttcaacaacttggtcttgtgtttctttccattttctcccacagcgattacatatctagcccgcgttatcgcctgatgtagtgatgagcacagaaaaaaagaaaaagctgtggcaataacatttgcttgggacaggagtcaagtttctccttgaaattgttgggcttgttcttcatggctgtttctttagagctgtagcgccaaatcaggctgttgggaatcgacacgaacaccagaagattgttttgcaggagaatcaggcgaatgaactccgatgttcaaatctggtgggagattgaaattctcttgtctctgcttcaactggacttgtggagtaatgcctcctcgccattgagactggacatggaatcttgagaaatcagaagttggggcagccatctgagggaaaacaattggtcggttgttttgaaatggttggtatcctccgttcatcatcccgtgaacaggttggtgcacaaatgtctggaaagggaaaccattcctttgaggatggaactgtgtctcttcagcatctctcggtttgaaagcttgttggtgaaaatgttctcttgatggattatacaaggactccgcagaaatctggctgctcttcggattactagcattttcaaatgtttgtttattattccctccagctcctatcgacatccatgctcgtgctgctgctacagaagcattgcctgaatcttcacttcttgcggattgtggtgacgaaatcttcggtggagcatcagctttaggatgattataagtggagttgtgctgtgttctagccctctcattgaagtttctcattatctgtgcttgttcctcgtggctttgactctgttgtctcattggttgctgtgaacttgttgctgtgcgactcatttgattagcaaaatcagtagatagatcaaacattctgttgttcacaccgggagagactttgccattcctcaatccaccagggaagatcccgttagtagtcatctggtgcttgtaatgttcagaatctgtagaactcatgttcctcatcatgtcacttgatgacctgtatgatgccaccgtatctgattttccaaagctttggttttccaaaacacagccagaaccggaattggtttgttctgctggtgggggtaaattcagttctacttgctgaggaatcctattttgaggcttgacaaaatctagctgagaaggatttcgatattcatgctggctcatagattttaggtttcctacctgagtagcaacaaaagagggactcccttctgacaaagccccaatagatgctggaaatgggaatgcatggtttccatctcgaactggtcggctaccctgttgttcctttgcaggcagaggagtcttaaacagtgtctcattcgtctttgttgcagcatttgatttccgctttgaaaacacagatgcttttttaggtggttctttaggtgtgcaggtttcaaatagaagtactggtgtaggaagcggctcgtattctccaacccatccccggccaaacttaaagtctgcaggtagtgcttgctcgattcgctgagaagctattttccatgcaacgggtccaagagttgcagcaaaacgtgcaaggctcctaccatacgcatgttctgcatgaagccctacctgatgatacgggaaaaatatttagtcaagaaggttaagcgcaatcataaaatgacaatgaaactttgggcataataattatcacttacagcaacaaactgcttgatttcactctcaaatgttgtgaatatggactccgatctatcgccctgctgatcagaatcttcataggttgcacggcggtcttcctcaacaaccgacagcttcctcccacacttaccaaagagacccttccctaggaaaagtgaaacaatatgaaaatatatcagaaaaagagaagaggtggaaaaaaagagccattactcttagcatctacaactaattgaagtatgtgtttccctcataccagatgataagtcttctgctttctccagactgtctactaatgatgtgttgccctcaaaaagcacatccgtgtagctgtgcttttcatgtccgccgatttgagttgaaaccggctcgttttgagaagctcctccactagcaaggttcgccccagatgagaaatcagaaccaacggcctctagaccatttcgactgaatggctgtctcacttgcttcttcacagagctgtcaggtttcaccttttcatctgttttaagctctttttcagctcgtttaatcttaagccttgccttctcgaacttccgctttcccatttcctgaatagtccttgcctaataggaaaaaaaaggagtttaaaataccggcagacagaaaagtaaaccctaattagcaaagaaagaaaattggtgagaatataaaaacatgatttacctgtttatagtagacagtgtctgaggaattgtattgcattgcatttgagcaaatcaataagacatcgctctgcattcaagaaatacagttccaaaaccaggttagtaaaggaagtcaagcaacggtatagattatacatgatcctagcaaatacactagagcagttctattatcacaacccattattctacagagaagccatatcctgaaaagctacaaaatcagttcatcatgtaaaagctctccatgtaaacttgagtaacaaacttatcacccacctcgagctcttccaacgtagaatatgatccattcgcaagcttcttcctcactgtggaaaaatccatgggatgctctatcatatcatgataatcaggaagctgcaaatacaatcccaaagaaaaatcaaataaaacagcttaaaactctaatttcggaacagattggtcagagataactccaggaaatccaccattacctcttcaggatcaacaggttctgcatacacaccatagatgtctttcctgtttgcaaaacaaagactccaagtaagataagctaaacaatgtgatcacgcaatcacacacaagagagaaagaaaaggaatttcagttgtgtacttttgaagtttgtcaagaatcaactccaaagacttcttgtcaaggataggtgttgtttctgaagaatgatcacactgattccctaatacaacaagaacgacaaccaaagcagactgagagatgagattagtcatgataatcaaagctctaaacacaaagtaacacagaaaatgcaacataccagaagcgctcctcctcttcctttcctgacaaattcacaagagaactcatatcagaaacctcaaaaatgtaactgaatcaaaatcagtaacctcaaagatgtaactgaatcaaaagccaatgccaaacaaacaaaagacagaagtgattgacagagatagtgtgagacaacaacaacacacattagagagagagagaaagagtaaataaagatgagggtaatggtaatggagagagaaaggtgggaagtgtgatcagattctgtgggaagagagagagtgagtgagtgagagagagagacaacataagttagtttttttgacagttgaccccgacagtttatattatctcccaattccccaacactctcattgccaccaaagaaccacacacacagagagacagagacactgataaagttcatcactttctagggtttccgtacagtaccttatcatcctcttcctcagaatcagcgtgaccttcttcttcttcttcctcctcttccacatcgtaatccttctcttcttcctcttcctcttcttcgtcttgacggttaagtttcctcttcttgacttgcctcttctcacttacttcttcctcctcctcctctgcttcatcatcttcttcgtcttcttcttcataatcagacgcgtgtctcacacgcgctcgactcttaacaggagggtcagctctagcacggctctggttcagcttaagaacttgtttcagcttcttctgtctcttcttctcctcttcaacctcatcctcttcctcctcgtcgaagtaatcgtcgaaatcgaagttatacctcacatttcgctgcctttgacctcgccggagctcatatcccgattcacgcggagatgaactactacgccgcgccgccagatctgccttcgacggacgacctttcctccgtcgtctcgcgatctgactcatcttcttcttcttcttcttcttcttcttctctatcgaactcagtgcacaacacccaatccctttctctctctatacagctaaggtctctctctctctctctgcaactttctatttttttccgggtaggagagagaaaggaagaaaatgaagaaacttttggtcaaccgaagctaagtctgaaccttaggttcggatataatttgatgtattcaaaaaaaacctgcgcgatggtaaacgccgtcaattagacgacgttagctactactacccgttgcccggcttacttaattttgttatttttttattaattgtatttccacgtcatcaatttcttattgaagcttagacacgttactcacgcgctttacactaggcacttgtgtttaaggtatttcacaagtgttataattacaaaattactgtaattaaatgcacgagtaagatcatgtatttgtgttttaaacttacccaaaatgtataaacacgttttaaaaatgaaacattatgttgaagtacaacatctgaattttcatcaatgtttctgactatgatcgtttaattggtgtcggaaaatggtttgctctttttcctcaccacaaaatatactttacaatgaaatgaacaatacaaaatgtgtatatctaaacaaaatatagcaatttgtgaaagtaagtagagtaatatatagcaatttattttcataaaatttgtaaaggaaatattttatcttatattattattattgatcgataattagtggtagacttttgtaaaaaaaaattaacgaaaggaagagaattaatgcttaagagttaagagagaatgaacaacttggagtgatgcgaatttgcgagcacaaatttgacacgacgcctatgtcaaaagtatcatctttttttgtcccatcctttttgacaaaatgtacagcctaaccactttcactagaaaaatattctcccaatatgcatgagaagttcatagacgacgaattgctataatggtatgaaaataatcaaaatataattatatttgaatttggggagttttaatttcttactgttaatcttaataaattactgaaattagtattgcacaaaaaaaagagaggctgaaattagttttaataagtcaaagccaaaactaaatcctaaacggctgaatttgccatattcgcttatcataagagaacttgtgactgtaatttaaattaaatccaagccgtccaatcacataacatcgagagaatcgaacgatttagaagaaatatgacactaacgggcctcacaatcatcagaacagtatgcgttacctctgggagttctgaccttcaacaaacactatttattacatatcaccaattttgaccaaattttgatgtaaatgaacgaacacttgaaatttgtttttcttgtttttcaaccttttgaagattattttctgaccacctattttcaaatgttatttgaccaaaaaaaaatcatgtaatgaatgtctaaatttaaaccttttaaatctatttcaatgtaagacatcgtttttaacgggaaaataatgttgagctgaatagctataatgcttacatttgagtttttacaaatcatgaaagtcaacttttaatcgtaacaagttatttatggttgatatataacataacaagcttacctaatatttgatgaatttgttttctttctgggctggttttgaagattatctctcaagctttaatctgaggacaagaaagaaaaagaaaaaaaagcccacgatgaaaatgacccaacaccctaactcaaccataatccaaactataatcggtattacatgcaacatggacttataacattatgcaaagatatgttactgtttggtaacattatgaaaaaaaaaactattataacgatattataagtcaaagcttgagagataatcttaaaaaccagcgcagtaacacagagatgttttattggtgtttttttttgtttaaatctgtttgatagtttttcaaaatgtttatctgatctattattttttatatttcgaaactatttatatgattccagtattttgtttggttgaactatattattatataggaaatgcataaataaatggttaattttataatcttgttgttttagctaaagcattctagaaaagaaaaaaatattaatggagcaagtataatctgatgataatggtgattggcggcaacaatcaaaagatttataatttcatacgttggttgcatgtataccagatcaatcattaatcaaaaattcaacgtataaagtataaacgtaatagataaagtaatcgtcatctttgtaaactaaccgatatgaaatgtttcgtcgtcgacaatcccacattttacggtgaatctatttcccaaggtaccaccttatctgaatctcatttgtttatagtatatatcgatccgttaattaatactctgattcgttaatgtattgattagtgccggtgtccgctagattaatcactattagatactaaaattacaggtaggccgtagttgtttgcatataatttgtgtgtgcatgtatagacgtaataattggtagagtatacgtacttggttgcaaagagacttacacaataattggtagttttgttaattaatactagtattttatatagacaatgcccccaaacgtgtagtgttcttctatctctacaatatattttaggagttagtttaggtcaaagtgtcctaatatacaaattttaaatttagtcttctgatcttatttatacccgtatagaaatgaataaaagtcattcgaacaatgacaaataaaatttgtaggtatttgcaaattttcctaaagcgtggtatgttttggcattttgctagattataccgacatcaaactagcttaattccaaaccttacgaaacataatgaaacctttcgatttggttgcaaaatattttgttttcccttaaaacttaatatgacttaaatttcacacttgttgggctaacttaaaatttatacataatatccaaaattaatcaaaaaatcgatgaaacactctttatgagttacgtaagaaggtgctactttagatggtaaaagacaaaactgctgaatgatagtttgatacagcgtgtatttgttgttgcacaatcctagtgcgtacacgaaaaaataaacagtactcgaaagtcgaaagtataaccagctcgaacaagtaaaatcctctagctggatattcgttattggaattttagaaaaatgattctctcaaagtgtaaacttgtggaaataaaatatatagcaaagtcgttgacataaaatatcacaaaagtcattctcgactctacaaatatatacttactagattttaatccgcggtacataaaagtttgtaaattgtatctatctataaaatatttttattttgtaatttacaattgttattaagtaacatcttgccaaacccgtcccgccaacccgtcccataaaaaaaccatttcttttattaatgttaatcttatttatgatatgtttatgaattattgtctaaatattttgtaattttgtagtaattaaatgctatcaaatatctctgcggtttgatgattataatcgaattgttataatcatggagaaaatcaatatcaaaaatgataattttgaagtaattaaatgatagtaaatattttggaagttttattttagtaactaatgtggagagttttaggaaagattgttaaatgtcaaatatttatttcgaagatgttttttttaattattaaaaacaaacattaaaattcagtggcagccattgtaaataagtcccaactacagaatttatttcacaaaataactgcaaaaatgtatatatagattctaagagaaaaatattaaactaacatatatttgtaaattgcaatagtattgacttatccgattatgtaacttttattttttttaattaagtatcttgatactacatatcttatcgatatgggatatgtatgaacgatttctgtttattttgttcttatttatgtgaatgcaacgatttaatttctttatttacggtctttctctcgcaatttctggaattctgcatagtggggatcatcagcctagttgacacggttacaaactgacagtgaccacctacaactattaaagagacttcattcaattctacaatattctagttaaactaaaagtttgcttcacattgtaacagacataaatccccaaaattatgggcctacaatttgcaataacttgtttatattgcacttctgtttttttttgtttatggtataagagttaatcatttggtcaacttcttaattgtatgtgtttgtacattgatctacttgtaatttttagcttattaattattatatggtgatgttggcccaatttcatcatggatagaatttaacctccactttttcaactctaacatcagttataaattgacttaaaaattaactacgtcactttccaaaaatatttttcaaaactcaacgcaaaacacatcatacaaattagacaatgggaaaacacgcgtttataatgacatttttgttcatgaagtgacaaatcatttcttcttcctttactgatctgacaattaaaaagcccgactcatccaagttttataatcaaattctaaacatccaagtttataatctaatcccctagaatcattctaaccgaccaaacttaaccggttgttttgtctcacatattttagttttatgtaattattatcactcgttaaacgcgttcctcgtcgattctgtttgactcgtatctctctatcattcaatcaacacacaataataagttgaataaaatatccaaaaatggtatataatataaatataaagataatggaaaggaagaggattgcatgggctaaaatacatacgatggaagttttagtggtgcacatcacaactttagtgcaagaaagaacatccaaacaatattatttttattatacagcttggaatgataaaaaataataatctaaaagctaagtttgacttgtttgcaaaataaaataactgagatgattacatttcggatcaaaccccaatcttcactttttaaaaaacttgtccaaaatccaacttttatatgactacatggtgataattcgcatgatataattactaattatgcatgttggataatgcagtaaattacactttaccagttaaaatagtttatattataaattactctttcggtttccaattactaaatcttttgagttttcacacacatgacacatcaaaaagaaagttacaataacaaaattatctatatgaattgttatttggtattttaaatagggaatggtagaggtgaaccatgaaaaaacttaagtgaaaatttataaatttgtgaaacttttcaatacattaatcagtttgaaacggaaggaaataattattttatgagtactcgaacaaccctatataccttaagaaaaagcacaaaaataatgaagaaaccctaataagaatttgaaacggaaggaattttaattataactagtagaactatataagtttctatatttacttacctaaataaatttaaataaacactacaataaatagtgtagaaactctctactcttttggttttccctttgtttcgtttctatattttattttttgagttcattagaaatacaaaaatggttcaaatctaacggtgctacaaatttcttcacaaggaaaagacactgtaacaaaattgaaattgccataacagtcgcaggaaaaaccatagtactactagtaacatgaatcatgatctgtctgacaatgacaacaaaagaatctgcctatagacttcatttatatattttcctcttttcacattatcagtctttattctttttaaaaattattttcatacttataacgtcaaattcacatttcttctctctatataaaccacactaactttacatctctcttacaaactccaagagcctcggagcattcgaaaagttcgccggaaaaacaaaaacatgccgacgaacaacactccgttcctcactatttttctcctctttcttggtttactccggttcgattcatttcccggtttagaagctgcaaccgggaaattagcttcgattccaggattatacgtgttcggagattcgttagttgatgccggcaacaataattacttaccaatttcaatatctaaagctaattatccacataacggcgtcgattttccgaacaagaaacctaccggaagattctgtaacggcaagaacgccgccgatgctatcggtgagtttttattaattattagtctccggtgtcatattttttctgtatgaaatgaaactattagtgttggtgttatgttatggcaggccacgattggtttgatttagatagcgtaacatgctggccattaaaaattaaatattttcactcatatatacactaattgaaaaaatagtaattttaagagataatattacacgtagttctaacaataaaattagttgtggacgtcaatgtttgtaatacatttcagacgaaatttaattttgtgtttttgttctattagctgagaaatttggtttaccgttaccacctccctatctctcacttagaggcttactaaaaagggagaagagaaaatctgccgccgtgactggtgtgaattttgcttccggtggagccggaatcttcaacagttccgaccaaaaacttgtgagttttttctagataaataattaaattatatattcccttccatgatatattaaaaaatctgaaaaaagaatgaaaatagagtattgatgcgatggtcagctttaattgcgaaccgaaagttgggccgaagaattcatgttcttcattatcatcagcgaatatttatttattgattttaaaacagaaaataaaaaaataaaaataaaataggagaacaatgcggtgagcgtggatcgaacacgcgaccttcagatcttcagtctgacgctctcccaactgagctatccccgcaacttgttctacatttgttaatggttttatttatctggcagggacaagctattcctttatccaagcaagtcaacaattggctctctattcatgaagaagtcatgaaacttgaaccatccgcagcacagcttcacctatccaaatctctattcactgttgtcataggaagtaacgatcttttcgattactttggatcgttcaaactccgacgccagagcaatcctcaacaatatacacaattaatggctgataaactcaaagagcaattgaaggtaaacaaaaatttgtcttcttatatagttatatatctttataagttgatgaaacttatttgagcaattgtatcaacagagaattcacgatagtggagcgcgtagattccttatcatcggggtagcacaaattggttgcacaccgggaaaaagagcgaagaactcgacactccatgaatgtgacgaaggggcaaacatgtggtgctctttgtacaacgaagctctagtaaagatgctgcaacaactcaaacaagaattacaaggctcaataacttacacttactttgataactacaagtccttacatgacattatttccaaccctgcccgttacggtacgttgagaatatttatctttttggttattaaaatttgcttatcaccgcatgatccacgttccaaacataagtcgtgatatagaaaaagtggttaatatcgagccaacgcgtgtaatcctaatatagaaaaaacaaaatcgctgacgtgtttttctgatttcaggttttgctgacgttacatctgcgtgttgtggaaatggggaattgaacgcagaccttccttgtctgcctttggcgaagttatgttcagacagaaccaaacatcttttttgggatcgctatggccatcccactgaagctgctgctcggaccatcgtcgatcttatgttgactgatgatacacattactcatctcctataactcttactcagttggtctctacatgatcaataatacacacggcttcgtttttttgggaagagtacataatcaagtagacaaatgggatttggaaacttgatttgtaatcaagtatacgttactaaatttgttaccaatgaaatatataagtttcttattttttttagtttactagtttttctaagttttaccggtttagttaaatttaatgacatattctaaaccaaattccctaaaccggtctgctttcttgcgatactgttcctcaacctgttgctcttccttggtttgttccggtatagctataagtgtacgtcttcaaaggtttagttatcaccacaacttaattttgttttttttcttcttctctgaattaaaattggtagtgtgcgcctgtgagtgtgcgggggatgtaaggccacgatgggtcatgataatatgatatttcgatatcttgacttgcaagccagtaaagtatgtatattttttgtgtgtgtgtggtaaaagtagtttggtggtgaaaacttatacgtactgatcacaatttattgttactatgaactatgtgactgaacatagtattgagacttgggatattattaagtgtcattaaacgattgaatgtatgactaaatgtcattaaatatttttctatgatcgagactttgaatttattttacgagcgtaataggattgactcttgagtgttttcgggaatatatagattgactttcacaaaccattcaaaaactgatcgaatgaaactgaataaaaagatttgaaaatgcggtgagcgtggatcgaacacgcgaccttcagatcttcagtctgacgctctcccaactgagctatccccgcaacttattaaatgtttcttaacgttcaattaattactcaaatacaagcaattccctaaacactattaatcagcttagaccaacaagctcataatcaaatatttgttttacggtggttataggcattacgcattaggcagctttcagattttgacaaatcagaatagagcatagcatatggccgcaagatacgagtataagaccgaaccaattaacctaacgatggtctgactttcttccacatattttcattacaagtttaattcataagatctatatatattcacaaaaagacagacattacatgaacattaagaaaaaagcgacgttataaaactttatgatatgttcatcaatattttagttgttatttttcctcattagatttttatgttacaatttattatttgatgattttttttcctttttggaaagagctacgtctctctgaagtcgtccacggtcctcaaaaatctagaaacgttcctaatcggagtaacaatgatggtttcatagacccagtcatggaacctttataaagaaagttaaaaccatgattgatctacaaatagtgttggtagtactacaagtactagttatagacttatagtgtagtggttgaaaaaacgtgtggaacaagccatcacagccatatcatggtccgagtcacatacattagtttttttctatgcttcgaaaaagacaatcaaa

SEQ ID NO: 903 - DNA, 82918 bp, Arabidopsis thaliana
gatccaaagtcacttgaaaacccacttaacaatgttgacctttaaaactggaaaagtcaaaacgatgctagtcaaaaacctggttgattacggttggaccggctcatcactcttcacaaacatctctagatgatagcaacgtttagttacaattacaagttacactaaaaagtctgaaattggaatcagtcctaccaaagcaggttataaaacatactactttctttactcgttaaaccaaaaactataataaaacatgcaactttacccaaatgttgaatttccactgaaaaaagtttggaccatttcaacatttacaaaattatataaattgacaagaacacaacaactaaaacttgtagaatatctatggaatactatgtaagtttctatatcctccaactttataaaattcgatttgttgaatcatagaagaaaaaacgaattatgtatatatatatatatacaaaagataagattttatcaaaaaatggcttaacccaaggcaactaactatccggaatttatcaatcaatttcttctccatattaaattccataccataaaacgaatattgcaaaaacattactctatcttatttttattagtagtactaataaatctaggaaacaaataatttaaaatttgacaattgtcttcgtaaattcgtctgcttgatctcttcttcttcttcttcttcttcttcttcttcctcgtcttctcaatttcctcaagctttcaatgccgtgtcgttgacaaaagattaacttgggcaacgtacaggtgcgcacgataatggagacggcgccgccgtccttggtctctaaagctagaaccgccttcaattccgccgcggctaaagcggagcgcgtcttcactgatctcaaatctgatcgaggttttattctatttcctcttatctctccattcccgtagcttccgcttcaatattgacttaattttgttttttttgttcttccaaattttctcatttactaaaatttgactgatgaatagatgcttatcgctcgacctctgattgtatctgttgttgtggattaattcgaattctatatttgggttcttctctcttgtcaaattcaaatctatttctgttgtttctctttgtttctggagtcaaaattcaaatctatttggtgatgttttattgattttttttcttttttaaattggaattttgttggagaggaggagaagcaatcgacgaggaatgtgaatgactctcaggtagcttctttgcatagaaaacacaattgtggaatcattcttgagcaatggaatcaatagattcgatagaaaaaaattctggggaaaatgaatagaaatagagtaatatcaatgatgtgaagattatacaatttaaaggatttgccttttggtattgagaagtagtaagctagtcactttcttgctcaccaaaattgcagaacatatgtatgtgtttttgtggatgatgagaagaaaaaagaagtttacttgatccattatagagactgtcaaagagctgtacagtgttataggtgttggacaatattcagcatttcgttgagcttttgaagtttcatgatgaagtgtgttgtgagtgttgactatagggatgttttttttggtttacgctaattggcaatgctgggaacaggaggagaatgaagtgaagactcaggggtggagaactgcacatattaggaaaaagcaagagtggcaaaataaactgaaaaacttgagaattgggaggaaagaagttgaagatcaagacaaggttgaggattcagccatggctgcccctttctatgacgagaatttttatattcttaaagcaaagcaagaacaagaagccaaggtatcatcaatggtccatcttttcggatcggtgtttgttgctacgggcattgtcaaaggattttatttgcctgtggtcaagactttagttgcttctccgtgtttatatgattatctttgaacaatttctaggcatctgatgtcggctgcatggtagaatctctaaatgcggttgatgcgaacagcattcctctggcatccgttgtgaagcagctggctgtagcaatcgagtgagtcttgatacataacgtttaccacacttcagatctttccttacttctttttcatgtagtttctggcgaaaaagtttttgaaagatttagttagtaggtttgaatctgtagtaatccatgaggctgaagtatatgtgttcaccttattctctggctaaagcatttcataatgttcctctccgctttctcatttttttttttctaactttgttttttcagagcaggaaaaagggctaagaatgtgaaagactttgttgcatcatctggaagttcatcaccagtgagggagaggggaggcttgagcctctctgcggtgaaatcactggttcttggtgaaaaagaggataagcttggttttgattcaggagatgaggataaacttgtgtctctaataaatgccttgtttaatgttggtaggtttgccttagacgaagaaatttttcttcatcaacctgtattccagttatagctatttatcttcccacaactttggcatatttttttttacagatagtggctttctcagcagaaagattgtctctgatttggagtctccgaccaacagatcatcttttgcaaaagatcttcatgctgctccccctagtagttttgttgttaagctagctgaagtaattggaagttttacaacacccaggagaatggctttgttctggtgcagggtggttgaagaagtaagttttgtgttgcaaattttggatttaaaatctccttcttcacctttttagtgtaattaactcgtgaattaggattagtggatagttcaactctgttggtgaatgtcatttgagaagttactacaacaaaatgtgaaatattgaagcctttttcataatttcactcaaataatctgcatgtgcagttgaggagattttggaacgaagagaaacacataccatggatacctctggacaataatccagatttgaaaagttgcctactgcaccaatggttacaggttataaactgttgtcttgccaggaaagcccgcaacgtagctgcttccgaagcattagatgcggtaatgaggcaagccagttctgccaatgaaaagtcagacgtttcagaatcaatgggttctcttttgtatgctaaaagtaactccggggaacttatactccgtttgggcgtttataaccaagttgagaacttaacaatgttggaaactggtgaacctgtgtattccccaataacacaggttcgtaacttccgtcatagttaataaaacactaaaactgtagctaccttttctatctctgaagtcttagtgtttatatccttgtaggaaggtccgctgttgacggaagatcttattagagaaacagaggaattagtacttcggacagggaggtcagtgccatcttttatttgttgtagtttgatataaaatttacactccacagcgattctggtgattgaaagtgaaccaatctgctaatgaattctgagttggtgattgaaagaccagtaacagtcagttagattgaaataatagacgtattatctggctgaataatatataattccgtttcgttattcagacatccaattatcttgatagattggattattgtctttcttatggttcagcatgggggctggatgttctcaactcttgtctgacatgcaggctttcaaggtgatcatcttaatgaataatcttattactgtttggtatataagcactcatgtaaggaaagaaattgtagctgatatgaaattgataagatctgtacctctgtattaggcagcaaatcctggctgtattttggaagattttgtgagatggcactcgccaccagactggactgaaaatggtaacatgtctggagatgactcttcacccgttcgaggtcaattaagtacccggatgcagaaagaaggtgtgaccatttctcagtttctctatgttgttaaaccattactgtaatatttcaagtcgtattctcaactggtcttaccaacgttttaaaaaaaatattattaggtaatttatggcgtgagctgtgggaaacagctaaaccactccctgctgttaaacaagcacctctctttgatgaagatttagctgtgtaagtttcaatagcatgtcctcttaaacgtagtgaaatctgtatttgatcactcatggagatcttgtccatttctcatttaacttatacagagaaggaatcttgaattatttggaagacattccagctgctgaactttttgagcagctgtttacttcgctagtaagtttttcccaacaaattgcgtatttttctttttgtgaagctttctatctgtaaggtcaatctcaaattctctcacttgcgctacgttaaatggatgtcattggttacacagttaaggttttagctgtaaatagcactttgacgattggattggttaaaaatatttcaggtttccctggggtttgtgatggtggagccagttttagctacaaacgatgacttgtcaaagcttttctttgaatgcaaggattatgtagtcgctatttgtcaggggggcgcatggaccgataagcttgatgatctatgccaggtactttactagagagctttgcacagattcaaaaacgtatctacatgcttggaaatctatcactttaatagagttaagaatgttttatcagatgccaaagtaaggccatgtggatatgaacattatgctcactaatcatacatcctaattgcatttatttggtcataataggtatacgagaccgtggaaacaatgttattacgtccagaagaagttttgagatcaatgaaacaaacagaggagtcgccatcaagtggcagcgaaacgaaacggcggtttaagcggctaggtttcatctttcgtggtagtaaagaaagaaagcagacaagagttccatcagaaactgaacagaaaagcaccgaacctagcccacgccaatcattctctagtctttttgatggcaagtcgtctctgttttcaaagagacctcctagacctgaaaatgtgacgcttgtctgaatccatattatttatttgatttgtttcatctgcttttaagtcatttctcagttttttgtattcttcttctggggttttaggttgttaagttgatcaattggttggtaactgtaaagttatcttatttaaaacatttctgaaggtatggtgaaatgcaaataaatggaaatgaataagatgtgtaaaagcttttagaacatttgtgtaaattattagatttctgagatgctgttttagatggttgcctaaaattaagaagttgaaagagttgaatgaacattcaaaccaattttttaccatttaagataaataagttggaaaaatgattcaacctaaaaagttgaaaaaatgaattaattataaagaattttttctcaacttgttcatctcctattttgcagagaaatgaactgaattttattcatttcttttttcaactcaaatttttcatccatatgcaaccatttgcaccttaaggtttctacacaagatatacataagaaaaatcaaaactctctagagttggttactttcccacaataaacttttcctaatgtttaggttgttgtttgatcaattccttggtaactgtaagtaaattgtttcattataacatttctcaaagtgatggcaaaaaaaaagaaaaaaaacatttctcaaagaaaataacatgggccgttgggcctatggactatttgatgttactaaaacgcagacgttttcgagagttcatattactgaatccaaatttagaagcgtaataataatcagagatcttataataataatgttcatattattcgttttacacaaggaaataagacacgtgtaaaatcctctgaattttccatattctttcgtgacttgctcaaagcagagaaaggtcatatgcttttctccagttcctctctctgtctatctctctcctccttcaataatttctgcaaaccctaactttctcattcggcgctcaagtttctctccaccccttcggtgagatttcaattcctcggttttctcttgttttcattttcgtcttgttgctgaaagtcacgaatctgagcagtttttatgttttgaaagccataatagcaggatttaggtttctgattttgagaaagtagtgttgaggatgaacagattccattttccgacgatttttgattgattgtgttgcgtttatgattacgagtgttgaatctcaccgacatcttgttgttacagagatttggtgcgatgatgttgcgtgctgtttttaggagagcttccattagaggctcttcttctgcttcggttagtgtttgattcgttaccattttgatttgatttttctccgatgtgatagttttttttatctaattgatctctctctctgtttcagggattgggaaaatcattgcaatcctctcgtgttgcagtgtctgctcaatttcattctgtttcagcaacagaggtactttttttgttcaatgattcatgcttgattttggttctgtggacagctatttataaattcaatcatcttaggatgtgtttaactagttgattctatatgcttcttccatgaacaagttatttaactgtcattacgaattgtacagacgttggtgcctcgtggaaaccatgctcatagcttccatcaccgttcttgtccaggttattattactacctttttttgttgtttttgttgttttgctaggttaagatctttaacttgacaattgttctcttatttgcagggtgtccagactgttcaaggttggtaactcagtccttttgttcatgtataagactcaattctctcaccattttcgctgaaagtgttatattcatgtgtgtaggactattatcaacggttaccaaggcacagccctgcaaagatgggtcaggcccttttcatctgatagtggtatgattgctctagctgaaacttttccctttatgtcaagttattttggtttttctgtcccatgttttggaacaccagagcttagtcttatgatccgtgtgggttaattggatttgctctttactgttattgtaacttgtatttctaggctttttgactcacacttttttgtatatgtgattgaaggggatgtcgtggaagctgttgtgccacacatgggtgaatcaatcactgatggcaccctagccgcctttctgaagagtatgcttttctttacattatcttcttgctcgtttctttccggtgcatttatgtatctaatattttcattgtatgtgcttattgttcttgcagaacctggcgatagagtagaagctgatgaggctattgcacaaattgaaactgacaaggtatcaaacaattacttatcttattatctccattccaatagatgttggtcagtatcttgtgtagctttcctaatactagtgtttgattcatctatgtgctttaggttacaatagatattgctagcccagcaagtggtgtgatccaagaggtaaactatttgtgtactttaatgttcctgtcgttcttctcttgtgttcctatgcccaattacttttttcttttttgcagtttctagtcaaggaaggagatactgttgaaccaggaaacaaggttgcaagaatttctacatctgcggatgctgtgtctcatgtggcaccctcagaaaaggcaccagagaaacctgctcccaagccttctcctcctgctgagaagcccaaagttgaaagtaccaaagttgcagagaaacccaaggcaccatcaccgccacctccaccgccatccaaacagtcagctaaagaaccgcagcttccacctaaggatagggaaagacgggtatgaaaactatgtcatttattctttacttatataatgctccgtgtgttttctctatgaaagaaaagcattttacgttcacaagatttgatgatatcatctaacatcgatgcaggttcctatgacaagacttcgcaaacgggtggcaactaggttgaaagactctcagaacacttttgcgttgctgacaactttcaatgaagttgatatgtgagttacagttgacaaccccatgttgatatgtctctttatcattttgaaatgcccttagtgcactaattttaacccaactcttaagttcaccaacaaaactttccttcttcacgtaggactaatctgatgaagctccgatctcagtacaaggatgcttttcttgaaaagcacggagtgaagttggggcttatgtctggtttcattaaggtatggtaaaaaactcaaaagtttcctgaactatttagcatatcaggactcaaccgattaagtaatcttcttgaactatttgtttcaggctgctgttagtgccctccagcaccaacctgtagtaaatgcagttatcgatggagatgatatcatttacagagactacgtggatatcagtatcgctgttggtacctctaaggtttgtttccgcaattcttttgacattgagtgataatatcatttgggcttttgagatagttttgattgattcctcttctctgtgtattgtatcccagggtcttgtagttccagtcataagagatgctgacaaaatgaactttgctgacatagagaaaacaataaacggtctcgctaagaaggctactgaaggaaccatatcaatcgatgagatggcaggaggatcattcacagtatcaaatggtggtgtctatggaagtcttataagcactcctatcatcaaccctcctcaggttcgattcgatccttgcaatactaaaaaccaatcaaagaaaggtgtttttttgtttgtttgttactaatgcaaataaatctatcatacgtagtctgctattcttggaatgcattcaattgtgcaacgtccaatggttgtgggaggaagcgtagttccgaggccaatgatgtatgtcgcgctgacttacgatcataggctaattgatggaagagaggctgtgtatttcttgcgccgtattaaggatgttgtggaagatcctcagaggcttcttctcgacatatgataaagatccaagacagaagagatcataagtttctgtctttttaccagtttcctttcaggtaaaaccattacggatactgcaatctgcaaatgatgctttgaaaaaagaacgaaactttttttttggagttttcttaatagttttaagagtttttgccgggcgaggaaagcatcggtgtattgagttttcttttattttataatattcatacagtttgaacaaaatgttacaattttgactttcaaaaaataatgccactgataattattggttaaaaatggtttccatttccatggagttgcattgttcattatggggtactgaggatgtatggttgtttcttgttgtaggggataattgtccgaaagatatatctttagtatcggtttagccaatatcaaaaacaaattacaaatatatgtgacctcctcaccttaatttttttacttggattaaggaaaaaattatgacattttaaaagttaaacaataactgaaatttgatctcactcttcattaaattgtatgcttgcttccgattggaatgtcagacttgattttttggatttcaagggtttgtgacgcggacatggacgatttcaaaggagcaatacaacacgtatagtaagattaatctcgttttatgttgctaaatcttttgtactaaaataaataaataagaacgtgtattacttaaaaattaaaatcttacaaaaagtgaacaagtaaacgtgtagtaaatcatagatatttgaagatacaaacggttctgtttcttctgtctttttccatctgtattttattgaaacaaatattacaacagaagaagcccaaagacaaagaaagtaagatagtccaaatagaaagtctgcaaatagaacggttaaaagggtttgcaaatgcaaatagaaataacaattttatttgttaaaagggtttgcaaagaaaaaaaataccattttaatatatatatatatatatatatatatatatatatatatatatatatatatagtcacaatctcaatcttacatgtccatgtaaattacaaatatataatccacatgaacagtacttacaatcatcaccaaaaactagatacgggatagattcgtctcataaatcataaacagtactcaaagctaaaacgacaattaattaaatgattactcaatcgataaggtattaaattcaaatgatatcctcgtcattaggagtggctgagttcccgcctctacagcttcaatcctgcaaatacacacaaaaaaacaaacattttagatcaaaaattaaagaaaaaactttatcatgataaagcatttcaagttcagctttatacttaataattgcagagactcaacatcaaggttatcaatttgagcttctggtgactccacaaaggaaagttttgcgtctccagcaattcttctagcaagatacaaaaagggtttctcaaaattgcaattgttcttcgcagacatctcatagtactgcagacacttcttcctgtggtacgatacgtgcttcggcttgatttgtctactcggcacatcaactttgttaccacacagaacaatcggaatgttcttgcacaccctgtattattaatatccaactcccacattatgagtatttcatgttcaaaatataaacacgtacaattatgcagaaacacaaataaacagaaaacaatgatttcttgtacctgcggagatcacggtaccatctatcaatgttcatgtatgtgtgccgtgctgtgacatcaaacataattatcgcacattgaccatggatgctgcaagaaaataaataaacgttagctattttactagttgcatcgatcttcggcttagtaatatatccggttattgaaaactttgttatgacttatgattgagggttggatttaattgtgtatttaagaactctacactctcttagattagttctaaacttctaatctcgttccgttactacagatttcaaacttgaaaagctatatataatataaccaaaattcaaaacaaccattttcacaaaatattttacaagtcatatatatttccattatctaggtacttaacaatcaatggctaatgtgaaaacatgagaagaaagatttgtaatgggagatggactaaacggaccaagaccgaatcaagatcgaccaaatttacaagcagggaaatatcgtaaatatttgtcaagaccacttactagtatgcatccttgagaccactatatttctcttgtccagcagtatcccagcattcgaaacggatcttgccgcggttagtgaagaaatctaaaggataaatatccacaccaagagtagctacaaagtccaagtttttgaaaatcaacatcaaaatcctgcaaagaccatgacataggcattgtttgttgcattgacgatcaatctatataaacacttacgttcagtattatgctcaaattccccagtcagatgtctcttgagaaaggtggtttttccagtgcctccatcaccaacaatgagaagtttgaaggttggtaaatcgacgttttgttggttaggtaaagcctgaaacgaacaagatatactcaacgaatttagccaagaaagaaaagactacaaagaaacaagcaaagggaagagcattttaccatcttttaggaagcacgagagaaagaaagagtaaaatctaagatgaatagatgtgttatggaggtgtaagggagatatatcttacatataaatatctccctatttttaggtgaaattttgttttaaactatttctgtttataatattaataaatttaattatatcattaaaaagaagataattttggtgtcttaaacattataatgactataacaattatgtatagatatctatatatttattatccgccgctatttttagacgaaattttgctttaaattatatatatatatatatatatttataacataaacaaatttggctataacattaataaggagatagtcatggtgttttaaacaataaataatgactaagcaaataatgtgatttttaaaatttaaccatattcgattattcgaaaatttaatgatatatgttcaagtatctatgcttttttcagaaatcaatgttgcaagtattagattagagagtgacacatgaaagatttataatttattgatttattacaggtgtcaatgttggttttatatttttagtataaatactgtggaaaaacaaacataattgtttttttaatagttatagaatgaaaatttactatgttaaattttaaatgtattgggaaaagaaaaaattatcaaaattttctttggctaaaattgaatggaaacttgggaatcaataaatttaatgataataggcatttttatattacatgtagcattaataggaaatctatgtaatataaaaataaaaatgcctattaatgctacacacccaaaaaaagataacttaatcattatacgaaacactgtcgtttaggttgttaaactgaaagatgcttgttgaaacttgaaagggcttataaatgggccttaataatttggcccaatatgtaatcaggaaaaaatgtttataggtaatataattggtggtggtggatgggatgtgctccctgcacaatgttttggtaattgattgttggaggaagaaaatgtgataaagatcctttgattttttatatttgatttatatgagatgcttctatgaaaacgttaacagtgtgattattaattatatatataagaaaaccagttaggtatctagattaaaaaaaagatgtgatgaactaaatacaccatacatagaagattataacaactataaagaaatattaaatatctagttataggtttcgttagaaagaaaatttggtcattctcttttggcagtattaacttttgttcatatcataatatgtaaaatggaattagaagttgaaatggataagggtttagggttacacacctacttatgcaatccaagtggaatacatgaaagatgagcaaaactattttttttcaaaaaggtgagtaaagattatttttatggtgtagtgagtgtgtgtgccaacgacaacacttccaccttttctaaagtcaacctttttaattctactaataaaatcatttacaatggctctaaattattcttgaaaaaataatcggtgctcgtgtgattagtagtttctctgatgaatttgagaaagttaagtgttgaatattactatattaggggatatttcttcgttgatattcttgttgtaataaatccatattgcccaagtcatcttctcttgattcactcagaaatgactatcgttagctggtaattttggttatcatatgtcagttggtcgaattatgacaacatatatacgtaacttatgaccgataagcttgttttaatttattgtattttattaacggttgtgttaccaaacctttttatcttgaaaaaattcatatgtttttaactctttttttttctaatctataaataagatgttttgactttgatgcatgaggtcattttgacatccacttagagtcattgttcatcaccgaatcacccatcaaccttttggacatcaagtgggacacttaaacctacttttgatctctagatagtttatttgattgtacggtgtgtattaagatatcattcatttagtttggcatcaaatgtgtgatcactttccaattatctctttaattcaaaattttaatgataaactgttttcaagcgaagaagttatgttgaactttcaaaagaactttagatcgaggtatcggtcttctaaaatcatcttagccggtttgatttgaaatttgtatgattactcaataaaaacgttgtaacatggaaaacaagtttgatcattaaagaattataccttgtttgactaaaatacaagttataagacaacaagctacttttccaaacttataaacgaatataagaaattcgaaactgggacgacttcgattattaattactaattaataaaggaatcgacctagagattgagatgaaagtcaacgtgaatgaacttggtccagaaataccaaactttgcttagtgtatagaaagtaaacgccaactttggctgtggaacccagaagaagtcttatgctttcacatttgaatgaaactcctttgtgggttgggtaaacacaaaaataatattaaaacagagagaatataatagataaatgttagaccaaactaaaattgactttgtatataaagtcaacctcatgatgtatagtggtttccgtacttaacttccttaccaaacacacatatcaaccgacgacgacgacgactttcccctacttaactacccaagattacaagtaaataccaaactttgcttattaatatattaaaaacacatatcaaccgacgaacgacgtcattaattactttctaacaaactattttgataattttcttaccgtttagtttgtgatcttaggattgaagaactcattattgggttggggacgaggttttagatcatctcatggcgattttaatcatggatgacgatcgtagatgttttaagtttcagaatactcagatgttatataagcttcaaggactagtctttggttcggtccatgatacttttgttattagaaagttttcttttaagagtatgtacatattccattttacgtctagaataacacaatcatacgaccactatatacatgtaaattttaaaaccaaatctataattagcatcatgaaatggtcatctagttggcgttgttttatatagtttgtacttaattgactttgtaagagaactcaatgtcaatgtgtagcaaattaagcgacaaatgattagtcaataactgatgccgatgactaagcatcattgatgacataatcgtctactatttgtcaacaagtactatcttcaaacctttaccaagcgtaaatggaatcaatcaaagtccaaagtgaaaatgcaagatatgatgggagtttggtatcgggtagggtgatgcgagttactctttctacacatggtaatcactcacttgcacttgtgtttacatatataatttacattagttagtttgcaatataacatttttgttgattcatgtgtatgcagataaacgctggactcaaccatcatgttttacaaaaaagatggtcacgttttgcttaattccccgtggagactggagacgttttgtttgatttcaaaaatgtcccacatcgattcagttgggatagagatctttggacaatatataaaagatatgttaatttttaactcttgagctagcttttaggttaagttaggtcgcgttcctttaaattttggtttaatttttttctcaatgacttcaaaattgaattatatatatcactttttattttcgatgtaattatcaaaacggcgccgaatcaattgtaattagtaatctcaaaacaagaatttgtaatgtggctaaagaaaaaaatcttcttattattatcatcaaattttagtacaaaacaatcttcaagatgatcataatatagaattatatcttcatcaaagatgttataataagagtaaaaataataaatgttgtcctcaggggaatattccaagaacaagctgtcttgttgatcccagatccaattctcaaatcctcccacttcttcttcgtcctcctccaatgacgttgcttcaacgcaattctcatcttcttcctcgttacgtttctctatctctccccttacttcaatccaaccgttcgtttcccagtctggttcaccggaactctcgtctccggcgagtttcttgatccgatcacccggtaaagaatcgtcatcccataagaaatttgtagaatttgcaaatgggtcttcgtgatcctctttaatgaatctacttctcgaagtttcacataaatcccaaaaccgttgatccaacacagtactaggagatgaagaattcagacagttaccagtttggtcactgtcgttgtcttcttcgtcgagaaacggatgttgaagcaattcttcaacagtccatctctgtttcggatcttttctcaaacacttcctcaaaaagtcttgacctttctccgataaccaaaccggaatcaccggcgactcgccggtgaaaccaatcttataaatagcagcaacgacgtcgtttagctccggccaaggacttgaccctgtagccatctctatcaccgtacaccccaaagcccaaacatcagctggaaaactctgttcttcaccacgtgctacctccggtgacataaacgccggtgtaccggaaaattccaagttctcattctcttccaccgttttagcacaacccaaatcgacgatcttcgcaatctctcctccgatcatcacattctggctcttcacatcgcaatgaacgattccttgatcatgaagatacatcaaacctttcaatatctgacgtgtgtaggatctaatcaacggctccggtaacttcccgccggaattcttgatcaaatcgtgaagactcccaccggaaacatactccattaagagattatacatcaacttgtcgttctccttcgttacattagaaccaatgtacttgactatgtaaggagagctcaacttcgacaaaatcgattgttctctctgcaaaaacgccgatgaagaaaactcggcggatttgacggcgaagaagtcaccggaatttgtgattccaagtgagacagtagctgttgagcctcgacctatgattggtcctcttatccagttttgttcctccattgaaacagagcaagaaaaaaacagaggaacaaaaaaaacagaggagatagatagagaaagaaaatgaacttgtagagagaaaagagagagaggtttaaaatgttttaagcaaagacttgtgatgatgtgattatttatatatacacacttttcacacagaagtgtgtatgtatatgactttggcatggggttttggtgtcttaattcaaagtctgaacacagagatgacattcttcttttattctaatcttttttcttctcctccaattattaagtaccaaaatttttaccttatcttccactttttaattttagattattgctttcttagatctaatacagccgtttaagttcgaatttcaaacggcgagtcgttaaaaaaactaaaagataaaatatgacttgagtcacttgatcattggtaagttctcccattataaaaatgaaagaaccatgacttaatcatgatcttgattatattagcatagatctaaatcacacacatatataagaaggtaacagtatcatacatgccatttttttttcaaaatttcaacgttctaatttatgaaataaaatttactttaattgataagattatcagaataatgaaaagaaaaaaatattattagttatttatgttcacctcaaagatacgtaatgcaagaatgttaaactgttctttggttggtcgaatggcacataattcaagcagaaaagtacaaaatgaaaaaatatttttagaaatggatagttggctaattgcccatcaaagtttcaatcaataattatccatcagatattcccgttctacttatgaaaagtttgcgataagaacttgtgattggtaagtttgatatatgtggtattatcaaaagtaacaaacaaacatccttatttaagatatgtgatgtatgcaatatactcttggttcaaatgtttttttttttttttttttggtgtgtccccattagtatcattgtccttctataaatttgtattatctaaccaaaccaaaaaataatgctgaaatatatcagaaagttataatgtatttatgtatatataatgtatacacaaaaatttggtagagagctcttacttttttgtggcccttttttatttatggtttctcaaaacattttgtgtggcagagccaatttgggatgcgtcttgtgtgaatatatacacgtggcggaagaagattggaagatgacagctttgacggcatgacgccagggtggacggcgccgtaacttcaatccaccaataagagtaaaccaaaagcgcaaccaaatttaagaaaagaataacttaaaatattgacgccacgtggcggaaccacaagctaagtgcgggattagcgtgggtattattattaattaatctattgttagcaaaaattatagttaaaatgctggggggtttatccatgttctgaagtctactaattcttttaatgcctaacaacaaaactgaaactcgaaattaatttagaaagtattctaggtattagtattttttaatgtttatagttgctttcgtaaagttaaatggtgacaataacagtgtgaaaacactgagaatgtggagctttatttatgtgaaatgtctttaattggaatgcaagcttggggggttatgtacaagaagattctatagccaaaagaggtttttaaaaagaaagaagaaggtgttggggaaatttattcgcatctctactttgcttagagaatacagttggattcagatagttttcttttctgtctatattaaaatttctagattgaaattaaatatttgaacctatctagctactagagatttttttaaataattggaattatttttgtttttttggcttttgggtgatggacggctaaaagaaacgcagcttcatacatcatacatgtgattgggatctaaaggaaaaggtttcgaaagcgtgaagtgaaaaagtgagaagtaaaatcacgctatgttttaataacgtttttagtaaggtttcgtttatacacatattctgcttccacttctattattagtttggtacatgttttttccgttgcaagttttttggaaacgtaaaaaggccaaaaaaaagagaatttcaaagaagaaggaattttgcaaatctaatactacgtaattcagtagcaactttataattttacgtttaaatgtttagtaagagatcgattatcaaaaacaaacgattgatacatctctatttgattttgacggtaaacccttaatacaaatattctttagcactaatacgaagttgagaactatatgaaaagggtcggcggcgttgagattctcagtaaaataaataccaaaaaaaaaaacagaaaagaaagagtttacgatggaaaaagaaaggttacatccaacaaagcattagccaatgaaattgtagaacatagatagaaaagtctaaaaagatagattcgatcccaaaaagaagttttattgaataatattattgccttttcaatcgagaagagaggctaagtaaggttcgaccgataagggtaaacttcaagtaaatgcactatgagtcagtctatgacattgacaaacaatttatatcttctttgtagagtttctttctttattacgtcaacaaagtgaaaaaaaaaactcactcttatcttcacccttacttccaagcatctcaaaagacgttttttacataatagccagatttgtgctgaacactttcgtcgatgagcggcaccatttcagaagttaaagtacgtcgtacaccttacgtggggatgataatgatgtatgcaaaaaacgtctcataagtgtgaatcaagtttcttttagtaatattgtaatgcaaattggctactaaataaatttctatgataaggtctgatgattaactgattaacaaaagcacagatttttctttaaaaggtttatagtttgcaaatgcacagattaaaaaggtttctttaaaaggtctttttcagagtaatttcgtaaatagtttgcaaaatacattaaaatttaatattacaactcttcttctcgtaggcaacatcggtgacctttatgcttcagatgctcaccgaccatctcccctgaaaaccgaacaaacccgctaatcgatcagacccaatcattgacattgtcaacttaatactagtagacacctaaatagaactagaaagtcttcaagagtcgttcagttagaagaaacgtacaaggtatcagctaacatggcacggattttggctcttagctcatccgaaacttgagatggttcattttgcagatacgggatgttatctccaggagatgctttaagatcagactgatctgactttgaaacagtctcctcttccactgttttctcatctttctttatacgtttactagacttgtgacgatgaccatgctcaacgtctgaagagtcctcgtgcttgcgtctactggatctgtgtcggtggtgatgatgttcatcatcagatgaatcacggtgcttttcatgcttcctggatctgtgatgatggctacgcttgtccttagaataatcaacgtctttgctatgcttactggatctgtgtcggtgctcaccctcattatcagaagaatcataaagctcatgcctatctgaagatttgctgtgtctgtgtctatgacgcgaacgactgtgatactcatcatctgaggagctctcatgcttgtgcttgtcccgagaatgtctgtccttggaagagtatcgtgtcttatgtttatgccgttttctactacatgaatgcttcttatcagtcttggtttcttctgtaacttcgtccatgctgctctcttcctcttctccttgttccatcttaccatcttcatctctctgtgatctcgaacggtaattcctctttgatcgtctttcactgttaccatcatccgctagttttgactcagctacatatggaatcgagctactgtctctttctttggcagccttagcacctaatccagaaatcccagagtccaacggttcgactgatatgcttcgcgacggttcagcttgttgaactggctgcgcatcaggttttaacttggccacaaacatttttgcacgtttcaatctttctgccttcaacttctgctctttagacaagcctgcttcagaagaatcagcttcactagcagcagtcgagccagagagtgattgacctgtagatttggccaaatcaggggacttagatgaagggtaactcacatcatttccaagggtctgagaagtctcatccatgggtttgcctgttagaatccccaactggggattccttatgcctcttctagccgcttgaagaatagcagcagcagtattcgcatccacattgaccctcatctgcggttggacaggcttgaatggttcattgtgcaactcgacctttggtttgtcactaaccatttttagtttctctttcttggcagaatcatctggtaaaacactcccaaacccgtgtttgctatcttttacagcattgcccatcttctcttgcttcacgtcttcttttctgataataacgcctttgtcacctgattttaactgcatatgaaatcaaccaacgttttacattttagtgaaagttacaatcacaaggtttaaaaagcacgtgaaaacacaccaaatttgtagcaggaacattttaagaacttgaaacagaattacctcttcggcttcttggagaaccttccgataatatgcatggtataagctagatggacgtaagaatggaaacatcccgtatttcacatcctgtgcaacaagagtagcctctagttctttcccgttcttttgaatgaagtctactatcttatcaatcactcttttcatctcagtagtcggctccacaatctgcagttcaagcttgggttgcgacttatcagacgtcacaagtttttctgtattgatctgcttcttctctacaacatttactgcgctgacagagggatttctttttatgaaagatgcatgatcattcaacggcagagaatgcttagaggcaatctttgcagctcctttcgacccttcaggtccattggaatcagttaccttaacaccatcatcacctttggcggactcacttgttttggagtcgtttgcagactcttcgttagcatcttcatcttctacagtcccataaaccgaaccaagcaatgacaaagctccaccatccttctcactttcgttctttttctcttctacagaagactttcctgtcaaaagctcttgatggtcaacaagaaacctaaagtaaaggtgaagatgatggtctggcattaggaacccaaatgtagggttgtctccttgtttgactctcaagacaatttcagattgcccaccgtgtttgcttacaaaacttgaagtcctagtgataatctgatgtaatttctcagttggaggctgaaagaagagagaaaaaaaatatacaagaaaaaattagtaatgtgaaatatgatgaatgacacctttggcaactcgcaggtatatatacataataaaacctcacataagtatcgagaaccataaattgcaaaattcagaactgtatagaaatgcatcatctggtgtgcaatcagttttaaggttcttggtaagtcatgaatttttatcatcttaatcccacctgcactgccccttgtcatggcagcaaaaggaaacaaggtgcatgtgaatgacaaccttagacaactccatctcttctccgagcatctgaaacttagacatagtagtccttagaataacaaatgcacctttcagatgtttacgtggccaatatcagtttaagtaccaaataagttagcaaaaactagcatactgctaaagggaacaatctaaagcaataacttaccaggttttgacgtaagtaatcaggcacggggaaaggcgggtgaaatccagattccatatcagcagcatttttctggtcattgacatcactagagcttccatatgaaaaagagacagcacgataaccatccgcatttgtatttgctgaatcctcattcatatctggagagtaaagcaaatccaaagggcaaacaaattaagtttcgatctgaatttttcgtaatcattctctagaacagttttatgtctctaacatagctagttcgagtctctctaccatatagattaacggagatttctacggagttcatcatccttaccgtgttcatcatcatccgacggagatggagattccgacggtaaatctagataacgctcgtgatcgagctccgattccaagtcagcatcgtttgaattcggacgacggcgtttgatacgtggaggaggaggagaagagaggagatgacgaacatcgtagcggtcaataaagaggctgttccagtcaacgagcgccgtcggagagttgacaaacgttgccatcgaatcatcgtcgaaaaagagagcgtgacgaccaacaatctctagatccattgtgtgattcttctaaagcaatggagaattgggatttggggaagaggctagggtctgtgtaatccgtaatttggaaccggatgttccaaattcgtgattgacccaaagatgtgatgacttacaaaagagatcaagtcgactaaatgacgtcgtttataagacttttttacttgccgtttgaaaagtaataaaaccacacgcatttgggagaaaataactaacaacgacgtgcattctttatgtttttgcgttttcaaccctgcttaagaaagtttatattttttccccataaccttaactttaataaatgtaagccaccctaagagtgaaaaagcagtgaaatctccaaatttaaagtgcttcaacatttgtgatttcattggagaattttgctcaatctagtatctgcctcgtcttgatgtgacggttatccacattgagtttttactttgatgaaaatattatgagctctctttctttcttttttaggtaacttatgaaccctctttctttgtcagggctttcaagctatctcctcatgatacaatggttaagtgatttaatattctctctatataatttttgtaattttatgcatctatctaaccatgtttgaacaacctgtatggcacattgttttcaaaagtttcgaaagcaattactctgtagaaataatactaattaaactaacgttatctaattaaactaacgttaatgtaaaacgactttgcgtgtggcttaatagttaatgcaacagaaagatatcgtagagaaacaataagattatcgtataggtcggaaaatgaccaataagcaacaagggaatggttttgacttttttgacgtaaagtttatacattgtttaacaaattggaggaaagcgttgacctctctctattgctttcttcaacaccgtatataatatttgtgccttgtggacgtctttgactggtttattcaagaattttcttcgatagttcgatcgttggtgtatagagctatattagtgtaagctactatagggacattcaaattttatataactgtttcaaaaactaaatatagattgtacacatttatgcaaaaacatacatttaacaaagcaagttgtattagtttaattaatggtcatcatcgtactaatggacatcataattcggattccattacacatatttatatcaggaatcacgggtttgtttgtaacttaaaataaagtggaaagatctatataccttgtattttcatttgtaatgtgagatattcattgtctcggacatatcactacaaaacggactatatacattggcggacgcaagtgtataagtactggggcacgtgccccatgcaagatttgataattttgaagtttgttgtgcaatttgtattgtagatgaaagaattcgtttgttgtgccccatgttagagtgactttttttctagtcagttggttattactcattaattttactattttcaagtaataaatgttttcagtatttaacttatttttactttatttatctttttctataactgtttgaaggaattatgctaatataaggtactgccaatgttgattgacacttcaaaaaattttcttccatttacatgtcttttaagaaatgttcatattgtactttattttaaaaatttataaatatgttgtgcctcgggttaattatggttctagatccgccactgactatatatgtatactatgagaaatcatatgtcgggtaattatacttggaactatggtaccatattagaagattagagatagaatgaaaaaaagagttgaattactccatggaaaagactaaagagaacggagttgtacatcatttatgtaagagattgtctgatatgaacagaagactagtgacgatggaaggaacttagccttacaaagcttgctcatgtgtttctaaagtaaaaacttttatttattgacttatatagattattttcatattattctattgttacaagttacaatgtaaaaatggcctttcatatattaaattatataatcgtggttgattgggcgtatgcggatcgagaactttagaattcaagttaaagcaagtgtccattagaggcaggatgtatatagcttcaatttgctttatttagaaatatataaattagtggttcgtggttttcacgacaaataaaatcaataagtaattttcttttaatcaaaatcacgcctttgcgtctccttgcatctcgcctgaatcatctcagaccgtcccatgaggcaaagcgatggattccgtcatggtttgtcacgcatatgcagtttttattttagtttatatttttttggtaaaaagttaaatttatatcatttttgaaatttacatacagagaacataaaaaaaaaaaccaccaaaaactacaatacaacacaaacaagaaaaacataaacgaaaactcgattagcggagatccatgaaaaaacaccgattctgaaccgtaaagttcagccatttgcatggtttcctttggtcgaaagagttagaatcctcatctttattttctatttttgttatatgttgtcattataatttgaagtttttttaaaaaaaccgatatatatagaacactctgattaacatggtatcaataaaaaaataacatgaaagttagcattggtaagtgctaacctataataatgaattcaaatgatcaccacatgtaaaatcaaccatattccaaagatagttctctcacacctggtaacatattacaaatgcattactacattattagtacgagaggctgtctaaaattaatatgttttgattacgtatatcacacataatttatttttactcttatgttgtgaacgcgtaagcgaataagcatgtgcatgtacatgcacaaaattaattactgaaatgagaaggaaaaaagaacacctctccccaagaaaagatcgatcgcttgaaaccttacttaacctttttcaccacatttcacgcgtcaactcgtctcgatcacaactataaaccctaagtccaccctctcctcaattcttcacagctcaatctctctctctctctcccaaattctcttcctagctctctacattcacataatttaaacaagaagaagaagaagaaggagacaaagaaaggaagaagaacaatatatctcgctgtaactcactaacacattcatagatcaagagaaaatggcccatttcatgaagctactcgtgacaattgcattaacaaccgtggtcacaatcgccatcgtcaccaccaaaaccaccaccaagaccgcaacatttgctctcgaagaccctttcaaggaccttacaccaccaggaacgatcaagatcagaccaagtcggttcttggcagaaaaagtcgacaagggtaaagaaccaaaagcccgtaacccaaacgcagctgaccattgcaacaaggacaatgaaatctgtagcagcagcgattacagcacaggagcaaacgctacaatggcttgttgcaacaacaagtgtatggatttatcaaccgacgacaaaaactgcggtttatgtaagaacaaatgcaagttcgggcaaacgtgttgtcgtggtcagtgcgtttacgtggcctacgataaacgccattgcggtgagtgtaaccatcgttgcgatctcggcgagttctgcgtctacggtctctgtaactacgcgtgatgaatcaatcattcattcacgccaacgtaaaaaaaaaaaaaaaaaaaaaatttaactaaaattatacggatgatttatttacatggacgctgattaaaaaaggtcggtccaattaattatttacttaataattaattaaagtgttgtgtgtatttttggattcccataatgttttgaggggtatataaaggagattattttttctattttcaatgtctacgaataaaatggaacatcctcgttccaatatatactgctgttttattactaaggtttataattggagtgtataaaaacactccaaaataatatcatgaataatgtttttatacgtataatacataaaataaaatctctttcctcatagctggtcctctgattactatcaaacatatgattcaattgcaaatttgcaattattaatgcaagaagaatgagtggaacattaaagttagatcaaaaactcttcattacaaacataaataaattcattttggtgctttctaaattaatttattgatcattttttggtatgtagctaggggttaactcatcaggaagaacattacctagatgatgtcattgtcaaagtcaataggttgacttatccgatggatactaatccaacgggtcaaaaagtgccaaatcgggtcaaaatcaaaaacctcaaagatgacccgtgaacacttgtttttatcttcctcacaaaatccacacgtccaaatcacaacctcaaaatctcacacatcaaacacgtgaatttgctctctttctggttcactcacctaccattactataagtctgaaagagtgattgaaacccacctcgaaaaatctatccttttttttgttttccttctccggcgaatccccggggagattggtaatcggtaatcacggctatttacgggataaagccacggcctttgagctttcatgtccaacgaaagggttgtttaatcataactaatcctttgcctcacggaggacgtggagctctgccgtctgaaggcggcagtccctccgatctcctcttcctcgccggaggcggttccacaaatagccactaaccctaaccctttttctaattaggtttttagttcttagagtcctgtattaatctgttatttcgagattataatatttgtgagcaatgttgttgaagatcaaaagagttccaacagttgtatcgaattatcaaaaagatgagacagttgaagaaggtggatgtggtcggaattgtctgagcaagtgttgcatcaatggtacattttatagagctggcaaagttcttctttttgtttgaatttgaattttgctgacattttgtttgtgttttcaggggcaagacttcctttatatacctgcaagaatcttgataaatccgtcggagagaacacagaatctccggtgacgttcctcgaatccttagttattggagaggtagtggttttggatacatgttaaaaagttctcacttcgttaaccaattcgttaattgtttgagtaatgtatcaaatgccttatgttttctagtgggaagatcgtttccaaagaggtctttttcgctatgatgtcaccgcctgcgaaaccaaggtattattgtctctttgatttttggttaattgatttacttttagagccaaatgtgtttgatgtttacttgacctgaagcatcaagtttcagctcacattgttgatgacttgatgtttacttggagcttaagaatcatgttttagtttcacattgttgatgtttacttgagctgaagaatcaagtttcagtttcacattgttgatgtttgcctaagctaaagcatctagttttagtttcacatttacttgagctgaagaatcaagtttctgtttcacattgttgatgtttgcctaagctaaagaatctagtttcaggttcacattgttgatatttacttgagctgaagaatcaattttctgtttcacattgttgatgtttggttgttggtgtgcattggtaataataggttataccggggaagtacggtttcattgcgcagctgaatgaaggtcggcatctcaagaagagaccaaccgagttccgtgttgacaaagttcttcaaccatttgatggaaacaaattcaatttcactaaagttggtcaagaagagttgcttttccagtttaaagctagcactaatgatgatgatagtgaaattcagttcttggcgagtatgcctctagacgctgataattctcctagcgtcgttgcaatcaatgtaaggagttgttgcttttaggagtctattttcctttgctgattatctgagaactgaactcagaattcttttaacgcaggtgagtccgattgagtatgggcatgtgttgctgattcctcgtgttcttgattgcttacctcaaaggattgatcacaaaagccttttgcttgctcttcaaatggcggctgaagccgataatccgtatttccgacttggatacaacagtctaggcgctttcgctaccattaaccatcttcactttcaggtaaacagaatcaaatagttcgaaatttgtttataaccaatcggttttaatttgttatgaattctcgaaatcgaataaagcaacatgaactgaaccaaataactgaatgctctcacctttatactattgtgatatttatggagattctacttggaacaggcttactatttggcaatgcaattcccgatagagaaagcttcttccttgaagatcactaccaccaataatggcgtcaaaatctctaaactcttgaattaccctgtgagaggtcttctagttgaaggtggaaacaccattaaagatctcgcagatactgtatcagacgcatccgtttgtcttcagaacaacaacattcctttcaacattctcatctctgactctggcaaacgaatcttccttctccctcaggttaaatctcacaacattataaacgaaacttgatattgactgtcaaaagaagagctttctaattaaccattgtttgatttgcagtgttacgcagagaaacaggctttaggagaagttagctcaacgctattggatacgcaagtgaatccagcggtttgggagatgagtggacacatggtgttgaagaggaaagaagactatgaaggagcgtcagaagagaaggcatggaggttactagctgaagtttctttatcagaggagagattcagagaagttaacactatgatatttgatgccatcggttttagtagtcacgaagaagaagaagaagaggagcttgaagagcagaattcgatgaatggtggcagcttcacaatagtgcattgtccttcagtgaaagaagaggctgtctctaattgaggcgctttataactaaaagcaaaaacataactgtcgtcgtgattttgcataacttgtgtttgacattttactgttttgtagtttttttcttttcttcttggctttgttacgtctttgttcgaaccttttgaatcaataaaatcgaaatcgcctaattcaaaaaattagttactctagtcttaaagatggacaaagagaagaaacagaagaaaagaaaaaaaaacaaatttcataaaaatcctgtattagatttatttgcatatttgggaaccctctttatgcaaaccctctagacgaagaagaagcttttgtaacatttgttttttctttggcccttctcctttagtcagatcgacattcttctcagctgccatcaccggagttctgagacttggatacttcaacaatttccatatctctcaagcttttagcttttctcgcgtaaacgcttcttcatctccatctctcactctctcatttatatttatttgtctgtcgtcttcatttcactgatctgttgaacttttgcatttcattcttttgatgttttggattccagaagtgtttttattttgtctctgcttgtccctttcgatgacaaagagaacctaattgggttttgttgggtttaaagccgttgaggttttgcatctgttttattaaataaggaaatgcatggaaggtgttcgataaaatgccaattacaatcagcagtttactactatgggcattttaatccaaattcattcatttttttgtgtgtttagctacaaggtagaaatatcgcatcctcgttaagccaattgtgtaatgtcgatcatgacagtgagtgatacaaagtttgcattttggtaatcttttacatatggacattgcttggtttatgaatctttgagaagcctcaacaatgttcatatatttactctgttcgtttggagattcattgaatgctttaaaggctagatggatctaagcaaaactgaagaaggaatggttctgttttgtttgtttgtagagttgttggacaatgaagaaaggattgcacccacaaatgcaatggatctcttatgtgacacagagcggtagattgatgcacgtgatgatgacaagaatccaccatgttggcaaagtttatcactttggagctaagcgtcaaatggctcaaagcattggtcagattgccaagttcaagcgtaggtttaacgagcaagaggcagaagctgccgaggagaacaacaacgagaaccagaacaagtagctgtaaaccaactcttttgtctctcccttacctttcctcagaaaccaatctgaaaaagctttagacttatcatttactatgaaccttgctttgcttctcaagattgatttttacagtttttgtgtctctctgtttcgtcaataaaaaagcttatctcgatcccttcttggccatgaacatcgccatgaacatcgtacattgaaaagtggaatgtgttcagtaatctatgaatgatatgaatcaaacgagtacatggtatcataacatctaaaactcactctgattcagacaggtttcaacatggatttgataaggttttgttacatgacataactaataatacatgtttctgctccaaacatcttgagctatggatttaaccaagttggttcaaaaaagtttccctctagtaggtggggaagttggggttgacattggctgcccaagcttccagtcctccaattatatccttagccgaatcaaaacccgactcacgaagatattgaacagctctttgtgaatcattcccgcgtctgcatacaacgaagacactaggatttgtgcaagattcagtgttcgcatggccatttcccttttctttaagagctgaagtaagctcgtttaaccgagtctctaagtttgcaagagggatgttgagtgaatccgggagagagacaatcttatagtgatgtgaaggtcgaacatcgagcagaacatgttgttccttcttttgaagaatttctttgaactccttgctgctaattcttgattctgcaggaagcaggttcaatgggccctgtgatcaaatcgatgcaggcaaactttctaatatgagactactgacaacaactattggattcaagataagagaaaaagaaagaataataccgcaaataaaggaaattgagtgaagtcctcatagtcaaaatctttaaaagtttgcttattgaaagatgaattgtctccacacacggtgcactgtgatgacctgcctctgatcttgacctgtgcaaacactactccatcagtttatgcagatggaaacacaattgaatgtagttatgatcagaaatgaaaatagtaaaactttacaatgcgcatccttgctgataaagcatcaaaaagaagcatccgttcagagagtggttctcccaccaggcttgcgagtttaattgtctctagcgcttgtagacaaccaataacacctggcactgagaacagataaagtggaaaagatcatttaaagaaggacgaaattggtagagatttgcaagcaatagaaaaagaaaaaaatcgccattcaagtacctactccaagaactccactatcagaacatctttggcacgctgaggtaggtggaggagtgggaaaaagacaccggtaacacgggcctccgttatgattataaaccgtaagcttgaacacaaaaatcataatgacagttaagtgtttaatatgtggcttaacatctataaagagtaacacaataatgtagcgaatgtcatatcacatacctgcccttccataccaagcgcagcacccgacaccaaaggctgtatacaaagtacaaacgctcagtcaatactcaacaccggtgcctataaaactgactacataattctattgaagtactcaggtatcaccattgtttacagcgtatatacagagagttcagaaaatgattcacctttcctaacaagacacaacaatcactgatcatgtaacggcttggaggattatcagtcgcatcgactatgatatcatatctaatttatacagttacggaaacacagcctttcaatgctttactttgaggagactaataaagatacagaaaactgagacatcctaaaacatgtttgcatatctaaggatactggctgaggatttccaaagcattggaagtgcgaagagcttccacatattcatcaactttgatcgttgaatttatcctggaaataaggaaaaaggaattctgattagactaaacgagtaaaggtggtcataattttctcgaatgcttgtgattaatcatattaatccgcaaggagtttgaattacgagcgacaagcagcagcagcagatttcactttgggatgtccaataaatgcttctgtgtgtataatctgaataacaaacaaaccaacagagacacaaatcagccaaaagtagtacttccattcagccattgaccacagattagagccaagaaaaagaaagagttgccaacgcagagtgttccaagtcgtacctgcctatgcatattgttgagctctacaacatcatgatcgataatacccaactgacctaaacgaatacaacaaaagatgaaacagaacataataatgaagggagcagaaccaatagtttctggagaaagaacggtatatagaaactactctatcgatatctgaagataaacttaaggtaagagtctgaaaccataccaacaccacatgctgcaagatacaataaggcaggtgaacctagtcctcctgctccaataactaataccgaagacttcaaaagatttgactgccctataatcatacacacatataacagaacagaagaattaatttgtggaagacactagcagagaaaacaagtaatccagaattcaaatttctccgacatcactaaactgaatcaaaacaattaaatggaaacagaagaaatccaatataaagtttcaatctttcagctatatcatcacaaaactcagaatcatccatctcagattatcttcctattggctaaatacaaacgtgaaaagagtttgcatttgagtgtttgagcaaaagtaccttcaacagcaaacgaaggaagtaacagttgacgactataacggtaaatctgatctggagataacccatgttcaagctccggtgccgtcagataagagtcaccgttggatacggcgtcgtacagttcaactgccgccgtatcctggagcttagcttcgagggtcgaaatacggtgctctatttctgccttcttgagctttaactcttccagttcccggacaatttccgacgaatcaccaccgttggacatcataacgacaatgttagagaaccaatagtagaaccctagaagcagcaaagaagacgatgtcagtcaacggacaaaacgttgactatttttattgacgccgtggtggatctctgtctttaaccggtatttaaccgcgaaccaggttggtaggccgggttgggttttaagagaattcatgcacttacgaaatttattaatttacctagttaaataaactaaatttggatgtcttttgaatgaaacataatcccaacatatggcagataatgaattcatgaatctttgaatgaaacataattccaatatgtatatgtatgtatgtctatataaatgtacacccaagaccaccacaaatcattctcaataagtattaaaatattacaaatacaaaaggtaagttaaattacaaatatttagaatatgctcctcttatactagattttcgtttttgttttaacaataactttgaaactcgattttagtaggttttgctttttcctgagacttaaatactatagtttgagaaggagttatagaatcctctacaaaaataacaaatgacaaccaaaatggtttcatctcatcgactactcacgttgatggtgtttgctctcctcctcatacctatgatttctggtaacatgtttatttgttatatatattatattttttttcaatatttgttcattttttatcttaaaaataaaactctaaaatattaaattggacatttttgcttttaaattttttgttgatgaatttgtttatgaaccgaataggacaatcatcaaaatgtacaaaaggatgtacgagcacaccagaatgcaatataaaatgcatgaagaaaggcggagggcattgtcaagcatatataggcagaagtcacggccgattggctattgaaaattattgttgctgcaataattattcaaattctcccatctccagtccggtcatgaattgattgatctcttattctatatgtactctcgattataagaatcaaaaacgtatgttcaaataataataactgatattatctcatccccccccctctcatcatgttgtttgatgtacatgtataagaaaactacatcgatcggctcgacttatagttttgtttattgtgtcatcaggacatcgattttgtcttacctctctaatcttcgcaaccaaaaaaactacttctttcaatgttcacttccaaagatgattttgtaaatacgaaaacttatgcatgaaactgtaaatacaaaatcaatcgccaagcataatataagatcatgtatttactctttttatatcaaggtacatatatatttctgagattcctacgttttcatggaatatagaaataaattgactatatatatatacaataagataatattttggggtgttttctttatatgtagagaggatgtgcgagtgggggggagggaagaaggaagagttccttcgacggcggaggagttcacaagacaaggtgttgctagccagacaatgatgataagagattgtagaaggtttatgacggagctgcagcggctgcaaacgtctctggtgattctgagatggaggtggagaaagtaaaccgaacttgtttaaaggaaacgaatatctagtttgttttgcacaagtacaaacgtcccatgtctttgaatcaaaattactgctagaaagaaaaaaaaaaaaatcgacaacatctccaaagttttatttcaaggacccgaaacgacaatgcctaacttccatggattggtggacaaggctaacgaaagaagaaaatattgattagtggagaaattggttgtcgttcccaaaaaaagttagtaactcttacgatatgagaagaaaattagtacctcttacattttttttaacaaagataaatgttgtgattagttctgtttgaaaggactaaacccttacatgaaaagtttaacatgttctacatagtttggatttgtcacttaaaataatattggtgcttaaactcttacttttgtgataatatttttctcgagattgtagtaaaagatgaagaaaggatatcttgtgtaatctggatacaacacaatctggatatcttattgtcaatctctatgtattgtgagaagttgatactaacaagatgatttgtgcaagtagatacaaatcttgcatgtgtaagttgatactcgacgataccttgaaactgattgactgtttgttgatcggatcataaccaaaaatttggataggcaacaacactgaactatagactttaccggctatctcgacaaaatgatcatcatgacgagatcaacatggatcataatcaaagtatacgtcgtcgtaccgttcaactgccaccgtatcctggagcttagcttcgagggtcgaaataaagtgctctatttctgtcttcttgagcttttaactcttccaattaccgaacaatttccgacgaatctccgacgtccgactccatcacgacaatgtttaaagagccaatagtagaaccctagaggttaaagcagcaaagaagacgatgtcagtcaacgggacaaaacgtacgttgactatttttattgtcattaaccggatttaaccgcgaaccagattggtagaccggttgggtttttaagagaattcatgaacttacgaatttatttatttacctattaaaataaactaaatttgaatgaaatataatcccaatgacagataagaataaataatgaaacattttgactaaaattattatctgacccaaataagactataaaaaagaagaaaaaatccttgaataatatggaagatttattatttacatatatatatatatatgtatatacgtatgtctatataaatgtacatccaagaccaccacaaatcattctcaataagtactgaaatattacaaatacaaaaggtaagtcaaaaataatataaaatatttagaatatgttactagatttttgtttttgttataacaataactttgaaattcgcttttaataggttttgagaagcaggtatagaatcatcttgaaagaataacaaataacaaccaaaatggttgcatctcatcgattacttacgttgatggtgtttgctctcctcaccatacctatgatttctggtaacacatttatttgttatacaaattatatattttttttaaaaaaattgttcttaaaaaactacagttttcaatattaaactgaccatttttgcttataaattttttgttgatgaattttttatttataaaatcgtataggactaatttcagataaatgtacggaaggatgtaaaagcacaataggatgcaatacaagatgcatgatgagaggcggagggtattgtgaaagcgctaaaattcacggggctgttaaaatattttgttgctgcaacaattattctaattctcccatctccagtccggtcatcaattgattgatctcttattctatatgtactctcgatcataagatattattaaaaacatatatttatataatgataattgatataatctcatcctgatccaacccccaatctctctcatcaaaatgtttataagaattcaatacatgtacacaataaaatccacaagaaaaacgacagcggttcgacttatagttaatgtcattaggacatcgattttgtcaaatcgatcatgtaaagttatgtatgaaactgtagaatatgaaatagaaatcttcgtatattggatttaactacaaaggaaattgcatgacgtcgtgactaaccctgggaaacatgtcatcttttggctacgacggcgcatcacacacacgtggcatcataatcataacctccgttgatgagacatcaaaagtctcaattaactgctataggaaaattcatctatggtacttgatctaatctaagctgcaaaaataagagacctccgaagaaaaaatgttgagaaattatgtgaacccaaaatcaatctccaagcctaatataacaacatcatgtatttactctttttatctcaaggtatatattctgatattcctacgttttcatgaaatagattaactatatatatatacaaagatttttggagatgttttcttaatatgtagagaggaagtgcgagtggagggagggaagaaggaagagcttcttcgacggcggaggagttcacaagacaaggtgttgctagccaaacagttgagaaggcttttgacggagctgcggtggcggtaaacgtctccggtgattctgaggcggatgtggagaaggtgaaagaggcgtttttagataagaaagactataattataagaagagacctgaggatgatgatgatggtttgcctatcaacacggctaaaggaatataacgtatgtgcatttgttagatatcacttgtaaagtagtagtatgtaataatatgcatcatgtatcatgtatgtaatattataggcttcatgtactttgtataataaatcgagtaatggatagaagaacggttgccctttttctctctttttcttgtctaccaatatttgtaagtttaccgatttcttttagttatgtaatttagctactacttttgtataaatataatttactttgataattttctctttttaataatgcatcattactcattagtaataatattgatcaaccccaagatttaaagctattgaacttatagaaggtagaaaaaccttaaataatacacctacctagcaaatagcttttaccaatttagaggttagaactagtgatgagagcagtggaatttgactgttcatcatacactttctgaaataaattgtttttgcaagattaataaatctaaagattgatgtaaaaaaaatgaaaccaatctagtaatttttgaacaaattataaaaaggtaaaggagccaataattgggcccagataaagcccaaataattaagctaatctacaaaacgctgtcgtttaaccattgttccgctaaaagcttaaaacccttaaacgcgaatctcaaagattttccgagctctgttcgccgtcttgactacactcgtcgacgatctctttcaccggacttctcccgtctctgtttcctcaaggtactcgaaaaccatccatttctatctcaaacacctaattgaaatctcgcgttatgcagctcctcttttcttctgaattgatcgatctgatttggtttcaattcgtgatgattcactctctcatgattcatgttatcaatcgtcttcgtttattgtatctattgatttctacggtgaattctgtgtgattgcttgattatgattttgttaatggttacagagagattgagtgataaaggagacaaaaaaaaaaaagaatgagtggttttagagctttcaaagcacaagtgcctattgaatggagccagagcttgtacataaccttagtaagaggtctccctggaacaaggaagcttcacagacgaacacttgaagctatgggacttcgtagatgtcatcgtactgttttgcattcaaacaattcatccattaggggaatgattgatcaggttctcttcctttatctttttatctattctcatttgtcataaaatcctagatttcaaaattgtgatggttggttttgcctctatgtaggttaaaaggatggttgttgttgaaacagaagaaatgtacaatgctcgtaaagaagcagaagccaaccacaaagctttgcgcccgcctctcgttgtcagtcattcgagtcctgcaacagattcatccaacatgtcttgagagtactttcataagatggtaagctcttctaccgtcagttcgataagatccgcttggatattgtaggcggcttatgtttaagttctctctaaaggtgtccaggaagtaaactagtcctagacgcttgataagaaatgttggtatcagtgtgtttggtgcctctttatgttttttgtatacactggatacttgtgtatgttttgctctcattctgtcaatctcaaatctatcggtttttttttttttttgtggccaatgtttcaagattgagaatgtgaaagttgattctcaaaaaagttacctttcaatttgattaatgaaagtagtgagagaaagatagatgctgaaataatcataacttaatatatatgttacagatgaagaaccaaaatgtatgatgacaattgtaatgtatcaaagaattgaaatttgaaatacaaaacctatactatgcaaactacaaattctacaatgcatcagtcattcatcactgaggaacgtctgttggtgtgacccaaaacatctgacaattccaagatcttggctggtaaattttcatgatttgcttactctcccattcaaaaacgctcagattctgaggccctgatcctcctacacttggatcatcaccatcaatgaaataaactgagttgtctttgaaaaatcctctctcacctgctaaaacagctatacatctaccttgagggctcaagaacaaagcttttcctctcaagctcatcacctttgtccattcgttagtctcgcgattgaattcgtaaatctcgaaagaggtttcgaaatcacaatcgtcgttaagctccagcttctttaggaccacccacagttcgtcgtaatccgactctgccaagtatttcttgcaagagtcgtaccgaaacggcgaggtgctgcataaaggagtagcttttgggttgttagcactaagctcacagtgatatatctctccgagtctgtcgatggcaaagaagacgccattgcagaacacaatgtcatcgacagaagaggcaacagactccaaatccgtccattgtttatctccgcgtctgcagaacgctagcttcctatcagtgttgtagattacgagcacaacccattcatcgtctaatagactcgttgaagagactgctttctttataaagttctttagggcttcagagtctggaatgatggcttgagactgaagcaaccgctgaacatcctcaaaagatatcaaaggaggcagagaagtaacgcttttggtaacgggtttcttaaatgaacctcaaacgggaaagaagcactgaccgtcaacaaaaaccctagtgtactgccacaaacccacgcttgttggttccctgagaaacccaactttcccggagacaaaactctaaactggtcggagaatcggatttcttcattggaagagagatgggaaataaacagaaaaggagaaaacgtccggctgtagtatacggccgaagaagaatccttccaagaagaacagaccgtggcacagtttagaatgtctctggcgtcgtttaggttgtggaatacagtgttgagaagctccggaagaaactctgaccacgacgaagaaggtagagccattatttacgagggtacagagaaaccggagcttatggaaaaaaaagaagagaactgttcttatatagccagtagaaacttgggatccaaggaaccgtggggagcaagtttgactaattaccatactcggcaacttgtgcgtttactttaagctaaagccaatcgaaagattccaaaatccataaacaagcccattaatattttaagatccaataagtttcatgattcacatagactttcaccagtaagtagaaactggtcaaagtaaaacaaagcctgccaaatttaatctaaagccgattcactaaatccattaatatcacacaatcttatggaaaaccattaaaataaccgccactaaaagcagaagagcttcaggccatttttagcaccaccaccagtctgatgaagcattgcatcgatctcatctccatcttccatttcaagctgtaaaattgaagattctcggttaaggaaatcatacaactttgaaaaacggaaaacagtaaaagagaatggggtacagagagtgatgttacctcatctggagtctgctcggcacgaagacgacgaccatcaaacaagaaagcaattgagttgaaatccacagactgacggtcacagtaagcattcatcagttttttgagctgagtgcttctcttgatcctaaagaagacttcattaccatcctacacaagaaaaattaccaatgattgttacttcaagaagagtattatatacgattttctcaataccaaaaactgtatctataaccaaccaagtaccaacaacgaaaaatgcctaccaatgggtacagaaacataagcaaaacaaatcatagcaacgaaaagctttcatgaaacaaatgctccatactccaaaagcataactacaataggctatagtgagagttcaaggttataaattgttagcttagtcacaactcacaacattacaacaatttcttcgaagataatcactgtctccaccaatacacaccctcacacatacaagagtagtaatgttttgtttgctacaattatgagtcaaaacataattcacaattctcagataacttttgtttgcttcaaatttaagccaattaaaagtcacgcttacacaataatcactacctcatagacaagctaaccagaatagaaattgggaataacgcagacaaactcaaaaccctagaattgaagcaatcagaagctataaagatcctaatcacactcaaaactttaaccagacaacgaatcgttacacaatgcaagaaatagaagtcgagagagtgagtgagaaatagaaaacctgtcccttgactttgagattgatgtgagctccttggtcaggcttcttgtcttcttccggagtagcagacatcttactttattatcagattatacggtcggcgattggaaacaagaacttcgatctgcgatataagcgaagccctaagagagattcgcgggattgcagaacttgagggtttgagggagagagagagactcggcagagaataaaaaagactgaaaccactatctttggtcgcatcggattcttgtttatctaacggttcataatcattgatctatatcattcgacggctgtgagtgagtataatctctaacttaaaatgatgtcgttttagcattcttaatgggctcaaatgggctggttacttctgtgtctacccaagaattttaaaatgtgaaaatctcagctttcgagtagatttgtttgagttgggaaaagtgaagatgttcaaagtgaaccgtttgattttgatcaaaccagtaaagatttcaattgtttaatatggttttgttgtgtgaccttttacaattagccaacttgagttttagaggttttgatgagttgtttattcacggttgtaaaattaacaaagtacaaagattctaaaaatccgtaaccagataccattaatatcataattcataagatccaatcactcatgagtcatttacacacacgataaccgaccatgatttaaacttcaagtaattttgcttgaagaaagtagtcaaatatcacaaagccagccaaattattcctaattaaagcccattatgatcgaaaagcatataagaccactgacgctgatttgctcgtagaccaccactcatcgcccggcacgcatctatcacatctccatcttccatatcaagctttaaaattggagaatcttggtttagtaaatgatacacttttgacaaacatataaattgtaaaagggaaatgaaaaagagagtgatttgcctcatctggagtctccaggccacctatacgagctccattaaaaatgaaagcgaatgcgtctaatttcaaacctcggcggtcgcagtaaacatacatgagctttttaagtggagcgctttttttgttcttaaataagacttcgtctccatccttagtatcaccaatcaagaaaaaagattttaatcactctatactttagatcatcacagtttggaaaagagtatcatcaaagttttcatatcaagaaactgtatatatagtattatcaaccaagcagcaacgacagaaaatttcaaggagattaaagagggaacacagtgaaaaaacctggctcttgaccttgagaatgacatgagcttcttgttcttggtcgatgggcttgtcatcttgagggttagacatctttccttttatcagattttatgaaacaaaaactccagtctgtgagaaatacgaaggcctgatagagagattcacaatacagtattgcaaaataaggggttgacttttgagaaagagagacttgtcaaaaaagtgactgaaaccagttcttgatcgcactcacttttgatctacagattcttgtggtgatatatcgaacggctcataatcattgtagcttatcatccgacggctaggagagcgtggaattcgtacatgaaaacactgccgtttaatcaagcattcgtaatgggctattgggctggtttaagatcaaatatgctcatatgtgggcttaattacttctacacagtatataaagttggaacccattttcgtgaaccgaccaaatagtttttagaaaatttataaatcatatttaaaaataaaatctaattaccacggtaatctaataatttcaaaaaaaatacaacagttagaaacttttaaaaatcttagcaaacataacttttgtggtattttaaaaagaaactcaaaattatgatattatttgacaaagtttagggcaagctctctttataaaatttatatatttcttgatgttctaaacttctaatgcatgcatggttattatttaatattaaaaaataatgtacgtcgaccgtcatagtgtgtaaatggttagtctatgtttcgtgacgacttctatttcggcccgacataatatatttccagtttttaatttgataaactaataggcattgtatcgtaacgtaaagatcagggacaatgctaacattcctatctaaaactcaatttgttggacagcatccaagtgacctaccacattgaattctttctcttggttgataagaaactaataatgatgatgttatatttatacgaatatattagttaacgtttatatttagaaattcgtcataaactcataatagttacaaataagtcaatctgaaggtgacacacctctctggatattataatgttttcaattttcatatggacttgtcattgtgtttcattttcaatttcatgtaccgacttaagacttaagggccttgtcgaaacataccgtacgatgtcgacaacctccatagatacattattaaattattgttactttcataatccaaaaattaaattgttatactaaagtatatgtaaaccagcatacattgatacatataagattaccacctagtggacaagttgatacacaaacaaaaacatgtatataatcatcaaatacaatattaccaaatgatgatgtctattattttctcttttgatagtggagttattatgatgtctactcttaattagtttcattattcaggtctcaatcaccgaagataaaactatatttcaaactgtagtagtaattaccgtatgtgtattaacattctatgcctatatgtacataaccgttaatattcggccacaattattaaattcaaataaatctaaaaagcatctttcaccaagtaattagtaaaactagccgtaaatgtcatccaaaattcttggttttacatcagaaggaaacattaattgcttagcgatagagttctatttgtataggacaactaaactctacaaatatcgttttttgtttatccatggacggagatggaccatttagattaattcattattatactactggaaaataatttgaggtgtttgcttagcttagctaaccttaaaatgttcatttttcctccgcacatctaaacgcgttcattagcccaatttgctaagtcaaaatattagttacaaccaacttgtgaatcagtcaatgttactatcaaatatttcatataaatctatacttggatttacaaatttatcgaaacatatctaaacacaattattaacataataactccaaccattcaaaataataataaaaaggacggaatatttaggacgtacgaaaaagagacgttggaaatcagagagctcaacgttcaaaatttggtacatgtatagaacaatgaatgacacatggccccattgtagattcttcatttctcgacgagacccagttaccattaatttacataataattctaattccgaccaatcaatgcatcacattatcgattaataattatcactcctccgaccagtttttttcacctattaatcctaactttaacggataattagcagctgttttcaaccagtgattaataggtatttattaccagctgatactacatgttttatttgcctcagtgcccaaatcccaataattatggaacgtattaaaagtgttgttgcaaatgcaattgtatgtctaaacaaattcgttttgttatacaattcattttatgcagaacataacgttaataaaatcccccaaaaaaggaaaaaagctgcagtaaaatcgaccctaattaattaaaagtgaatgctaattttggcacgtacccccacaatctctgacaacatttggtacaacaatctccaatcagtacacgactgaaacggtcaaatccacaattaaaataatatttactttagacacgtcatcgagttgaaatatttacatcacaaaaccgtacagttaaaaaaaacaaagtcatccccaatatctcacgtgggtcctacccactacatccacctccctcgttctccttcttcttcgtctctctatataaacaccatctttagcttctccttcaccggaatacaaaaactgaaacctttctctatttatctctctatacacaacaatggcggtcttcgttttatctctactcatactctcttccttctcagccattccattcacttatgcaggttagttctcattttcatcatctctccacagagtttagtttgtttggattctgatgtctttgtttgtttttgtcttcttatcagattctggaatgatcggagttaactacggccgtatagcagacaatcttccggcaccggagaaagtagttgagctactgaaaacacaaggaatcaaccgcatcaagctttacgacaccgagacaactgtactaaccgcactcgcgaactccggaatcaaagtcgttgtctctctccccaacgaaaacctcgcttccgccgccgcagatcagagctacaccgacacttgggttcaggacaacataaagaagtacattccagcgacggatatcgaagcaatcgccgttgggaacgaagtgttcgtcgatccgaggaacacgacgacgtatctcgttccagctatgaagaatgttcaaagctctctcgtcaagttcaatctcgacaaatccattaagatctcgtcgccgattgctttaagcgcgttggcgagttcgtatccaccgtcggctggttcgtttaaaccggagttaatcgaaccggttattaaaccgatgcttgatctcctccgcaaaacgtcgtcgcatcttatggtgaatgcttatcctttctttgcttacgcagctaacgccgataagatctcgttggattacgcgttgtttaaggagaacgccgggaatgttgattccggtaacggtttgaagtataacagtctcttagacgctcagatcgacgccgttttcgccgcaatgtccgccgttggatttaacgacgttaagcttgtggtgacagagacaggctggccttctgccggagacgagaacgagattggtgctggttcggctaacgcggcggcgtataacggcgggttagttaaaagagtgttgacgggaaacggaacgccgttaaaaccgaaggagccactaaacgtttatctgttcgctctgtttaacgagaatcagaaaacgggtccgacttctgagagaaactacgggttgttttacccaaacgagaacaaagtgtatgacgtttcgctcaacggtaagtcaacgccggtcaacgataacaaagagaaggttgttccggtgaaaccgtcgctcgtgggacagacgtggtgtgtggcgaatggtaaaacgacgaaggagaagcttcaggaaggtctcgactacgcttgtggcgaaggaggtgctgattgccgtccgattcaaccgggtgccacgtgttataatcctgaatcgttagaagctcacgcttcctacgcgttcaacagttactatcagaagaacgcacgtggagttggcacgtgtaattttggtggtgcagcgtacgtggtctcgcaacctcctagtaagtaccctatctttcctctccaaaattttattttgattagtaagtattttgcatatacagtatagttattttcacgttcttaatagttggaagatggttagataataattatgggagttgggatggtttaacaacaaatgttatttttttgggcttcacttacgtatacagatttataattaaattgtgacgtatagacggaaacgtaaactaaattaattattttttgttggttatgtgtttgtagagtatgggaaatgcgagtttccaacagggcattgaaatggatatagagaagaagaggatcgtgcggatttatttacgttatttattttgatacattgttcttttgtcattcgagtatatgatttgcgtatatttatttttattattgtatatttggttggtttcatcggataaatagtcagattttctttcccccttaagccttaacttctttgctcgtgagtttataaaactgacaaaactttgttgatataaaccattatatcctgcaactgatccaataaacaacattgcaatattattttcaaaatctcaaattgattcgttttgctggtgatcaactgatcatgatccaagcaaaactcaacagtatatattgtccatattgtttcattccaatactccagagtcaaaaccttgagctgcctacttcatcaaacttgattagcgcctaccatcaattgagctacgactacactaccaactcccatatagaagcctgtaactcgaaaaatgggttttgagttatagtttgtcacaaagctctgtgaatacattatactacatgaaaactcatcaagtcttttgatatggaatcttcagaaccaagaatagctttaatgcttttatagttgtgaagtctgttattattctattactgaatgtgtattctcctccagaaatatctaagatcttagatgagtcagtttagacgttttaaatagcaagaatgttctgcttttttatgtcattttaaaaagcttaaggttttggattgtaagcatcgtgtggttgctaatcgaacttccttccctttgcattattgagatagtgtactcgcaaaacacggtggcaatttaaccaaaacatagtacaaacacggtttcaaaattttaaaaacaaaaccatatacagtacttgattaccatcccaagacttacatattcttagatggactatgagtctatggctttttcttcaactactaccaacttgaacttctcctccaaaccaattaagtgggctttcaattggtcatgccttctttccatatcacgagtttcttctagccagcgggagtgatttgatggaaaggtggtcgcattcgtggagtatgcttttgtaagtcttgattggaaaagctgtaaacaatgctctttctgaaatattgagggctagctttggatcgcgccatcgcggctaactcttggcaacaccaatggcttccttgtgtcttcttccatcaaagcgtgttcctttcattaattacattctcttttgtggccttctattatattgttgcgtagttttcagtcttttatttctcttcgttgtatctccgtgttatgtaaaaaatctaaaatttcgtataaaactttaaattttaccaaaaaaataattaaaaacagacaaattctttagaaataaaatctaacaccttttatattttcttcataaacaattgaaccaaaaaaaaaaactcaaatccaactcctctcccctataaaactctatcttattgatgattttgctcaaaatgtagtagtaataacaatgacgaggcctatgatggatcaggattcaggagagcattttgggccggatccggatccggatccggatctgagcctggatccaattctagattaccgggtttgagtatctgcgtcattcctaagctcactatactctctgtttaaaaaaacctatctctctctctctctctcgccgccttcctctcaccctcttcgcatagcttcactttcgccgatggtaaaattatctctccttctttgcgttgatctacttatctctcgatcctactttgaaattcttagggtttaacattatattcgatctcgcgtgatctgttgattttgtctcatcgttattttgacataattgtcaggctctacctaaccagcaaaccgtggattaccctagcttcaagctcgttatcgttggcgatggaggcacaggtacccaatccctagcttcatctttcttttgttttagaaatatatacagagaattgatttagttctatttcagaaactcgattttggatcaaattgctttgatatagttcagttttgattagtatgctgctttgacttagtttgtctgtctagagcttagtatctgtatgtataagtgatcttgatccgtcgtagttcaattctgagattgttccaaattgtttcagtagttggatgcatttggctatgttatcaagtaacctctgattaaatgttggtttggttcacagggaagaccacatttgtaaagagacatcttactggagagtttgagaagaagtatgaacgtaagtactctcgcaagcaagccccatcctgaaatatatcacttgtcattaaccttttttattctcacaaaagattctcatgtgttcttgtgtttttgcagccactattggtgttgaggttcatcctcttgatttcttcactaactgtggcaagatccgtttctactgttgggatactgctggccaagagaaatttggtggtcttagggatggttactagtaagtactttcttctcatacaaatcacttaaaaccgaccttgttaataatctagaatcatctactgtcatgctataatctagaatcttctagtgttggaagcttggttatggtttgaagctcaataagatgattgtagctagcaacatgaaaaactattgataactgttgcaaatagtttgtgtttgatacaataatgtgttctgttttgttgcagcatccatggacaatgtgctatcatcatgtttgatgtcacagcacgactgacatacaagaatgttccaacatggcaccgtgatctttgcaggtatgatgaactcactcacagaaactagcatttgttgtatgtggcaaattgctaaacagaaaatgtcatcaaatttcatggtgcagggtttgtgaaaacatcccaattgttctttgtgggaataaagttgatgtgaagaacaggcaagtcaaggccaagcaggtaacattccacaggaagaagaacctccagtattacgagatatctgccaagagcaactacaacttcgagaagccattcttgtaccttgctagaaagctcgccgggtaagaaacaattcatcaattcaaccctcattgtagttattgtgaaacaacggaaaaatgaaaattgagatgttgcttgtttgtctcagggacgctaatcttcactttgtggaatcacctgcccttgctcccccggaagttcaaatcgacttggctgctcagcagcagtaagttctctaaaactaattttgttttaatttgttgctaaggtttgagttcgaggcttttcttcaattaacgattatatatttgtaggcatgaggcggagcttgcagcagcagcaagtcagccacttcctgatgacgatgatgacaccttcgagtagagaaagagagatgtgatctgtcactgattacccgttagggcttgtctgaacttttttttgttcatggtgctatttttatgtgtccgtactttgaaatgaatcgatgacattagtaattttcatttttaagtttttaactgtcgctatgaaagtgaaaaccttttgattacaaaccttacatgcttcacaatttcaattgtatctctattaatcctagccgcgcaatctcatcaattctccacacccaacacacttaatagtttttttttacatcaatcatttcgaaaccacaagttcttagatactcaacaacatttttttttttttttctgtagccaatcgatgttctaaagatcaagaatgttgtattatttctaccacttatggagtcaccaaggatatgtgaagggttttctttgtttatatatttttttaattgcgttttaggacatctccaatagaagtatctaaatgtagatactgatctctatcaaaacagattatggatatcatactagagtacattaaaaatttgcttctaagattttgagttcttggagtcattaacgcatcgctaagggtattttcgtaactttaaataaccccaaataatattttgcttcctccccaagaacctttttgcctctttctacttccgtcggccggattcagagtcataaataaatatataaaaaaaagtttcgatttttgcttttcttcttcgattcattgcgcgaatcatccgtgatgttggtgtctagggttttatcaagagtttctcgcagcgcaggcttacgctcgtctttctcctccgtcgttactccgaagaggaatcagattccgattgttgcaagccgatttcactccctcgttcacggaacccccaacaaggttaggcttttaagctgattttacttgtaattcgttctggattttatcgtcgggtttatgctagggtttaaggggtttgtctaaacaaaagattgttatgttctgattctattgctctggtcttctttattacagtgtcacgaatttaattgtgtatgtctgaatgttaatgttttgattgctctttcatatgtcttaatttggatgtgaaattctggcaatccttgtgaatttgaaagctgagataaagctcattctaggatttgtgtacagtgaatttacttaatttggatcattttttttaatggcagcttgttgcagttccagtgtcgctccgaaaccatggaactctagatttgaatgttcttcaaaggttcggctttttttcctcttcctcagctgaaccgaagggaaatgagagtaacaccgaagtaccaaagaccggcgaaacttctgagaatgtggaggtggggaaagctacaggtgaggcaaaagattcatgtattttgacttagaataaagagagattactgtgtctaatactgaacgagtttctttttctgagttccagatgcagagattgacttcgacgatttgtcaagagacgatttagtgaagcttgtgagtgagaaggaagatcttttgaaggttcagcagaaagacataatggaaatgaaagataaatttcttcgcacttatgctgagcagcagaatcttatggacaggactaaccgtaatgctgaaagcgccaaaaagttcgctgtacaggtttacttctctactccgcgaatcctttttcttctttcttgtattaactcgttttgctttgtgtataatccagtgctgaatatgttttgttgtgctgcagaactttgcaacgagccttttggatgtggcggataatcttgaaagagcttcttctgttgtcaaagagagtttttcgaagatcgacacttcaaaagatttggctggtgctactccactgttaaaaaacctattagaaggagtggagatgactgagaaacaattagctgaggtaaaaacgtccattatatatatcttttgaggtaaacaatgataataagactggtgctgagaatgcaattttgtatgtaaaactgcaggtgtttagaaaagctggtttggtgaaagaagatcctttaaatgaaccgtttaatccaaacagacataacgcagtgttccaagtcccagatgcttccaagccaaaaggcacaattgctcatgtcctaaaggtactaaactattcaaaggattgctctctttcttgctttaactcttaagcctatgttaacttttagaaatccacacaatatcatggattctctgccatcattttataactgtttttttttcttccatatttgcagtctggatactcattgtacgatcgagttataaggccagctgaggttggtgttacttgcgccgtggagaatcaagaaggcggcaaagagtctgcagcttgaaatacttaaaacatcgagagttaagcttttgtttttaacatcttcatgagttctttttttagttaatagttctctttctttgcatattcattggaggaacaagattcccataaggtagcatgactatgctctgtacttccagggaagccctggttctgtaacttttacacaaattcataagccaaagccaaactcttggtaaaagcttcaaatcttacatttatataacttcttcctaacttacaaacacactacatagagatctagaagacgtcaaagtggaataaccgcctagcataagatacaatataagacatcatcacagctgaacacattttatagttgctcatcccaaatcaatatgattctcttcattcttcagtcccttcagaattcagacacagtcccagattcaaattaccagtttttgcttcctgcagagtaagtttataaaacacaagtatgaacaaacactaaccactttcattacattgcttgagttttaaatgaagcttaccttagtttggtctgagtctgttaggttcatgtctagctcaacagctttaggtaatggagattcagtgtcgaattcttcagtctcttcaatttcagaatccttagaaatcactttttctctatgctcaagcatcgcaatctacacaaaatcaatcattttccactaatcccacacaactaaaaccctaatttaatgatttggggaaaaaaaacttactggagcgtatctgaatcttcgcttaggcgactcctctgtctcaccggaaccattagcgtcggaggcagtaaccgtcgctgaggtaagtggagtccacttatggagaagtagatggtgtggtgagttactgttgttgctgttgttacgaccgttggatttagatgctctgaaaacaccgacggatgaggttgagacacgtacccacttcttcttccatttccttacacggccactgaacaccgccgtcgccgccggaccactgtatctcgatgacgtccggctcaatctcgatcctacaccttccattctcttctctctcttctcactagccgggaaaatagttgctttatctatcagctagaaaacgctgcgttttgatgtgatatagccacaaacgcggcgtatttatgtgatatggcttcaaaacgcggcgttttagtgagataattgttaattagttgaaacgtagcgttttaaagagagatttgttgattagtcgaaacgcagcgttttaaggagataactctgtttatctgaaagtagaagcaagaagaagtggcgcttcattcattagctctgttcagtataagcaagaagagagagcgaaaatggagctctgtgttatcagcacgactacgacggtgaaggcaattaatccgtttcttccgtctattacacgtcgtgttagttcccgtctcttccaatcagatagtgtgctacagtttggtgggaggttgaagaaaccaattagcaggcctttggacatgtcttgtgtctctagaaaaattggatttttcggagattttatgtcacatggtggtaattttaggctattcgcggcggcttctccagcggttgaaactagtgtaaaggaagacaaacttccagctgatcttaaggtcacggagactgtacaggcgaattcaagtgtaagagactttcaattttttttttgtctatttgttggagaatatgtgtagcattgtgtttggtctgagttttgacatgacttgaaatttgatttactgttcaatttaggtgaaattgagtgtggaagttccagaaattgtctgtgaagattgttaccaacgagtccttaccgaattcatgaaactctcaaaggtaaactaatattcatcttacatgaagatgaaatgttgaaacttgatccatgtaatgcttgctgttgattgtgattttacttggtttgaatcaggtgcctggattccgtcctaaaacaagagttccagagaatattattgttggtttcgttgggaggcaatatgttctgagagcaactgttgaatctatcttaaagagaacacttcctcacgccatggaatcagtaagttttcaaatgtttatattagtttgtttatgtttttcaatcttccgcggtttaatataatgttttggccatttggcaagaacaagtcttgtggtgtatctaaattcggtgtttgttgtcttggaacattatgcatatgagattttggtttttgtaggtgactggaagggctttaaaagactcgatacagattgtaagcagttttccagatatggagaaggcttattctaagctcaagactcttaggtttttgtttcttcatcacatatactaaaaatcttttggagtaatgatgctaactaacttaacatgttttttttgtttttttttttctgattttctcttgttccttagttatgaggtggttgttgatgttgtacctgaactaaaatggaatcctgaggatgggtataaaaatatgaaggtcgttgtagaactaggcgatgagatagatgcaaaaaaagcttgtgaaagacaactaagacagaaatacaagtctcttggtgcgttgaagattgtaaccgagcgagggctacaggtaaaggaatgcataaattccccatgtccttgcattgttttctgaaactagtgtaaggttgctaattgctgagttaaaataggaccgaccttttacctcgttagtcgttacatttaagttcatccactatagcttattatagatttaagtttttttaaaataatttggctatgaatctggcttcatttgttcgtagttaactctgcaaagatgatatagttgctagaattgcttttttattatgtcctaaaaccgtgtaggtgggagatctagcagttgttgatatttctgctacaactatagatgaggacgggtcaacgggtcaagcgattccagatgctgaaagcaaaggttttagaactgttatatttcaacagagatttgtggttgaaatctcttagtccattgaaatcattgcttgcaaatgaatactgagattggcggttgtgtgaacaggttttcactttgacactgaagaagggaatagattacttcctggattccttgatgcaatcataggaattcgagcaggcgaatcaaagtcattcacgcttgtgtttcctgaatcatggaaacaagaaagtctacgtggccaacgtgctcaattcactgtgagctcgtctttctatataccaaacatagaaaaagatgattacaaagagatcatatttgggacagctaattgtgtatgttttcttaaggttgactgcaaggaacttttctacagagatttaccaacattagatgactcactcgctgataaattgcttcctggatgcaccactttaaaggaggtaatgaacacatggattttattttcaacaaattatacaatttttttttttgtcttatatcagtgtaattcgctaatgaaacaagtaaacaggttgaagaaactctggctaaaagatgtcaagagatggagcaggaagccaaggagcaagcgacagacaacgccatccttgagcagattcgaaaggtcatcatctaattccatatatcatttgaagcattaacatcgttgatcaaacatcatttgcttctttttttttagatggttgaagtagagattcctcaatctttatttgaggaacaaggaagacagttttatggagctaggcttctagagattcaggcaagtgttttcagtgactgttgttgatctcttactctcttttactgtcactcagattcttaaggttgaatatggtgctgcagggaaacatgaagcttaacgaagaccagttggcttctctttcaagtcaaaaagcagtaaatgagtttctagaaactcaaagagagagcatcaccaacataatcaagcagaatatagctgttggagatatcttcaagcgcgaaaacttagaggtatatttatatgcatgatactctgtctccaagaaagaaacaatacatttttagtaacaaaaacattgtcgaaatacttgaatgcagttctcaacagatgaactagttaaagaggtcgaaaactcgatctcagaattcaagaaacataaacaagagttcgacgaggagcgtgtgaaagatcaggttagttctcttgtgaatctaagcactatcagtttcttgagcctatataagataactgaaagagagaggttcttcttgaattggtggttggttaggtacaagagattttagaaggagcaaaagtgcttgaatggttaaaagaccgagccgagattcaatacatcactcgttgattagcatataggtaatgtatgtatgattggcatgttctgtttttgtatgagcaatttggttttgatgtacaattatgattgattttgtcagaagaagagaactttgactatatttgaattgataggtgcaataaattattaacagaaacgttgctttttattttgtaatttaggtcactttttgattctatagtcaatgtgttttattggatatagatggtatagatataagtatttacgtcgatttcatattgaatttgccaactaacattgagtcattttgactatgacttgttttttatttcgacaaaaaaaaaaagagactcttcgtcttttctagtttggttctatatggactaatcttccctctgacctcatcacttttgctacttgtcttagctgtatttacgaactacttcctcatgatccatgttaaattatggaaaggtaaattaaatttcaccaatccgagtaggctagtacttacaccattttcccaactaataataaacacagttcaatacaaaaaaaagaagtttctaaccaactagtgattggatttattaataaggaataatatcgaagatactgctaatttgaaaacagaattttattcaaaatcagcaattctccggagaacttttcatctattttgaatgcaagactataatgtcaaagatgtcaatgtttgatctgagtatttcaaactaacatttataattccagtttactttacagatatctgataattaatttatgtgtttatctttgtcaactgtatttgatattaattcaaaattcctaaaaatgttttatcctcttgcatcatactttaaaacaaatatgaatttcgactgatagcgataataaatatttacaatattgtaattggataatataaatctagtgatatatatatggtccctaaaactggtaaacaactttggttgtacagtaaatgtttttgtagagctacacataacatttacagctttaaataaccataagttaacttggttagagaaaaccaaaaactattgaagcatccgagaatctagtggtgaattataacgatattattgcactgtaagaaaagaaaagaattaaaaaaaaaagtaaataacttgtgtggtcaaacaagcaaagaaccaagtcaaggaagagtaaaaaaagacacaagtctgtctgtgaacagtgtcatgtttgtaaataaagaaggaaactaggggtgaatattttgctaattggagtttccatcgtacttcaaaaaaaaaaaacgattgggtcccacactcacctctccgtctcttccacctccatagatagattttttttccttaagcaaaaaagattttatctcactctcaatagtgttagtattgtcacagagaaagcttcagatctagaagaagaagcagagttcataaagagaaacccattttaaaccctagaaatcaagtgtcaatctcggtaattaaagtttatgcctttttctttttactgttagatttgatcaattttgaggtctttagtctgttccttaaggttttgattgctttggttttatcaccaatgctgtccgattctcttgaagattctgttttttttgttcagagatctgcttcttctttctgtgctttgcttctgcttgatcggattttagatattgcattctgagcttgacttcgtttgctttctgtgtcatggtgaaaaaagggtttttgagcttcgtaagtcaaattttttgtttccgattcttaatgtttggtctgtggagtttaatctttggttagagtgattaagaggttttagattccgaaaaagattctaactttgattgagaatatctacagcgtatcttttggtgtttgttattgttttttcttagcttcgtaatcttagttcagtttcattataatctgatgcagaagaaagatctgatttgagcgatgtataattcattcttagtttagttttagtctctcattggtttttgtttttgatattttctgcaggaaaccttctgattccgcaacaatggcagttacagatactgaaagtcctcatcttggggaaattacttgtggtaccttacttgagaagttgcaggtaaatcttgctaccatctccacctaagtattagggctttactctcaatcttgtgtaacgtcaacttttttttactaaaggaaatctgggatgaagttggtgagagtgatgatgaacgagacaaactgcttcttcagatagagcaagagtgtcttgacgtttacaagagaaaagtcgagcaggctgcgaaatcccgagctgagcttcttcaaaccttgtcagatgctaatgctgaactttccagcctcacaatgtctcttggagacaaaagcttagttggcattgtaagttttgtctcaagtttagtagtagaaaatctaagtgaagtgttttttgttttttaagtgatgtaagtcttgattcttctgttgttgcagccggataagtcttcaggaacgattaaagaacaacttgctgcaatagcaccggctcttgaacaactgtggcaacagaaagaggagagagtccgagagttctctgatgtacaatcacagattcagaagatatgtggagatattgctggaggtttgagcaatgaggttcctatagtcgatgagtctgatttgtcactgaagaaattagacgatttccagagccaactccaagagctccagaaagagaaggtaaacattgagttagaaatctccgtatatgatatgttgcttatgttttccttaccaactgctctgttttggcagagtgacaggctgcgcaaggtgttagagtttgtgagtactgttcatgatctatgtgctgttcttggtttggatttcttaagcaccgtcaccgaagttcatccgagcttagatgaagataccagtgtccagtctaagagcattagcaatgagactctttcaaggttggctaaaaccgtcttgactcttaaagatgataagaagcaaagacttcaaaaggtaaagacactctgcatcgttaatttgcttaaaattgtttctgataaattacgcttttggattaatgaatctttgtcttttgttgttgcagcttcaagagctggctactcagctaattgacctgtggaatctgatggatactcctgatgaggaaagagagctttttgatcatgttacctgtaacatttcatcttcagtcgatgaggtcactgtgccaggtgctcttgcacgtgatttgattgagcaggtaatttatattgcattgatcaatcttcctatgtcctctcttagaaaccagttactgcttgctaatattcatgtaaaatttgtgaaggctgaggtggaagttgataggcttgaccagctgaaagctagccgaatgaaagaaattgcgttcaagaagcaatctgagcttgaagagatatatgctcgtgcccatgtagaagttaacccggaatctgctcgtgagagaatcatgtcgctgattgattctggaaacgttgagcctactgaattattggcagacatggatagccagatatcaaaggctaaggaagaagcatttagtagaaaagatatattggaccgagtcgagaaatggatgtcagcttgtgaggaagagagctggctagaagactacaatcgggtaatgcataatttctctcagtcactcactatgatacatcataagacattaactttaaattggatcttgagctttttcatggttttgttttctgagagcaggatcagaacaggtacagcgcaagcagaggtgcacacttgaatctcaagagagctgagaaagctcggattctggttagcaagattcctggtatgtgtagaataactaagatatatcatatacttgcaaacttctctcatgtattcacatcttataaagattggatcttttgttatgtataaagccatggttgacacattagttgccaagacccgggcttgggaagaagaacacagcatgtcctttgcctacgatggtgttcctctgctagctatgctagacgagtacggtatgcttaggcaagaacgagaagaggagaaacggaggctgagggtaagttcatcatttctactcgattaatgataaggcgagaatgtcagtcactccctaaactcctctttgtcttaatgagcaggaacaaaagaaggttcaagaacagccacacgtagagcaagaatctgcctttagcaccaggccaagccctgcaagaccggtcagtgctaagaaaacggtggggccacgagctaacaacggaggagccaatggaacacataaccggcgtttatctttgaatgcaaaccagaatggaagcaggtctactgcaaaagaagcagggagaagggagactctcaacaggccggctgctcctacaaactacgttgccatttcgaaagaggaagctgcttcatctccagtttctggtgctgcagatcatcaagttccagcttcaccatgatgaataaaaaaatgaaaaagatgtgtaattttcagtgtttgagttggtttaggaagaaaaggctctatgaaacacctgaaagaagacaaaaagacatttgagagtagaatggtgtactagaatgtgtatgtgtgtgtgtgttttgttaatgttattttgatagttgtatcatcttcgctaaaaaaaacaacctttttctagggcttatatgggccttgagatagagagcccataaagacctttcattatctttgtccaagtttaatagcgtcctcaagtaggcaaggcatgatctttcagttctatgacatattgacatgtatcaatgttatgaaaagtgtcttccaacaaaagccgaaattaatttgattttgatttggtttctggttctctaaaatcaaaattatataatttgcttttctatgtggaaatttaaattcttttgttacaaaataatcttttgttattttggttggtttggttaattttgttttctttgctttaattatgcttggttatgttaggtacggttctagttctagtgtaaaaacattgttacgtttcagtttcaaaattctcgttctggtttctatatcaacttttaaccgacaagtgtccttgactcgttgtaaaggtgaaagtaggagctagagatggcaaacggtggcattgtcgtgtgtgcatgtccgccacggagcatcaaaatgtttcgatcttctcttcttcctaatttgttaatttctattctcactgttgagagagagcagacagcagagagcaatgacgtcgatggagaggatggagagagacgcaatggagacggtggctccatacgctcgggtgacttatcaccgccgtgttcgtggtgacttggatgacacacttcctaaaccttgtacttcttcctaaacttctcttatacatattcaaatatattaatgatgcgtgactcatacgttacataacaattcttgattatttagatttgccgagagcactacaagcacctgacatggaacacccacaaggaacaccagatcatagacataatggccttagtgttcttcagcaacatgtcgctttcttcgatttggacaataatggcatcatttatccctttgaaaccttctctggtaaactcttcaatctcttcatatgtatagttatgtacataccggtttatacatttactagtttgtgtatatttacataaacacgaatttgaattccaccagggttccggttactcggtttcaatttactcgcgtcgcttatcttggctgctggtatcaacatagctcttagctatgctactctcccggtaacacagtacatatatttcggtttaacttaatttagttaacgaacctagttatgattggtaagtttatgattgatggaacagggatggttaccgtctccgttcttccctatatatattcacaacattcacaaggcaaagcacggaagcgactctaaaacatatgacaatgaaggaaggtaagtaactgcgtgaccacgaaacatattctataaatataggaatgagtgacaacgagatttagctgtatatatgttcttgtatgctttgggaaggtatacaccagcgaatcttgagttgatgtttagcaaatacgcgaggaccataccagacaagttgagtcttggagagctatgggacatgaccgaaggaaaccgcgatgcctttgacttttttggatggtatatatacttgttacaatgctcgaatgtggtcatgtccctttgtaatgacctatttttggtttgtgaaagtggtatattaatggatatgtaggttagcgagcaaagtggaatggggtgtattgtatgcattagcgagtgatgaagaaggattcttgtctaaagaagccataaggcggtgcttcgatgggagcttgttcgagtattgtgccaagaactacgctgagatcaaggagtacaagacgtactactgatcatgatgatcggtggttttttgtattcaaagcaacacgctcgtaggcttctgaactattacgggaaacaattgaattgaaccaaatagtggttatgttaggaagcaataaggtgtatgttgtgttcgtttattatgcataaaaacacttcaatagtggtttattcaatataatatccacttgcgttttctttaactgatttgaatggatccgtacgtggaccctatgtccttgtctacgtttgatctttttgttgtgtgatatttaaattttaaagtgtggcttttcaatggaacacggacttcattttttttggtacaaagactttatctattttagtttacattataaaaaccccatgataaacaagataaaggaaagttaaaacaagcacacgaacatatttctttttcatattatttggtactaattaagtaaaagacaaagaagcgacaatgtggaagaactgcaaattcaccaagacatctttggcatggctagtggctcggctttcaactcgtgagaacagtttattgcttagctcttcgcctatgtgagcttccacgagcactccggccacactccgacaactactagcaaaggcacgaccaacttctgatgcatcgtctggctcattcaccacaagtggactccctcctttgtatactaccagcttatcaattgcaaatgagccgttggcgtcaactacttccttgaaatcttgcaagcttggtgcgtacaccgggatattgaatccatctcgtttctctgctgctaccaaaccctataaaacaaaaagtaaatttttttatgtcaattatgtccaatccattgaatgcaagaaaataaaagtttgaataattttatgattagcctcagtttccatgttatcgtaattcaatatgtggatttatatgtattaagttatttttaaaataaattatattgtataaatactttgattcacactaacttttatatgattatctgagtatatattataaatttaaatgactttcaacacatgtaaactttactttctggtatgacttttatctaacggattaaaatgattatgttagaaagcaacgtaacaattcttgttataactttttgtatgtcttctttttctaccgtacttcaataatatggcctgccgattttgtctctacaaggtcatcatgtccattttttcctgacgtataaaatgataccgtagcgatggatggttcattttcatttatgatcgataaggacaatcccacgggtaggatattgattgttacatctaatacgaggagtgatgagaatgtacactaacgtggtcttaaagccaccacaatcattttctgtttcgttctatatggatttacagataataatttgtttaagaaaaaatatattttgtcgttaaacttcatttcaagaaacttgtggataacatttaaacatatgcacaaaactactatactacatttgataaacaaaattaatttatcatggtggtcctatatatacttaataacataactatatattgttactcagggccggcccaataaattattggaccttgtgttatgctccaaatttctttacctaaaactctaaatatttaaaaactagaccctattttataattatttgaaaatttggaccctaaaatataaagaaaaaactgaataaagaagtgggacccggtgcactagcacactcaacacctcccaagagccggacctgttgttactataggtttgatttctaaaaatatatacagtcttgttaagaaaagcttaatttcaagaaatagtggattacattgaatacgagtgtcaatgtaaaagtgtactagcctactaggtttgatgactttacgagtaaaagtttgtatattctggtttatgctgtagttttcttagaaaatggtttattttcttagagaaagctaaaaggttagcgacatttccaatttgggtcaaatgtagatatctatcctagagttataaataagttatatttcctcatttctagcagttaattcataaaagcgaaaagggcaagggttaatagtagtataaatttagagctcaaggttaatgatttagagttataagattaattaattacttaggggacgaataacgagtaaaattaattaaggttgtacctcgcggacaaggtcgtcccaagcgtcctgaaaatgagtgccgaagagtagaccggcaccaccctggtcggtgggatccacagaggtacgaccaagacagaccaggaacatggccccacctctcttaacctccgccgctcttgccctcaaaaactccgctaagtcggcctgaaactgccgtttgtatgccgttgttgtcttctctccggcaccgtgtatgaaaactctccctctattgtacgccgccgatctcctatccgtcacactttccggcacctaccacattttccacttcttaatatatatattatcacgtgtttttggttttttgatattttggttaatactagtttgaaaaaaaaaattacaagttctttattttggtttaaaaatgaaatttaaaaaatttaaagcttaaaaaaaaattacgagttcacaaagtataaaaataaatgttgctctgaagcagaaaaaccaagcaccatgacacttgacacgtgtaataaagtgaccaagcatactttacaacgttacgtagagagtgtgtacctgagagagccaatgcaaggagaaggcagagtggaaaaagtcaatggttctcgctggaaaaagtcgccggtaaaacgatccgggaacaccagcaacgaagtaggagcggttcccgtcggcagcaagacactcctccatgcaagtgttagagacaagtggtggaagaagctggaaaagcgtgttgaagtcgttgcttgggagatcggagaagaaagctgtgaactccggagggtcgattccggcagcatcaaacctcttagagatatgtttgactatgaaatcgattatgtggacagtatttgcgccggaggaacagccaagatcaaccgccgtgaacggtggcggactggcggaggagttgaggtgaacattttcaagtgtttcctctaggaggtgaagcatggaccgtgcatgcattgcctgcatatgttaaatatttatcttttcatgagtctatattgtcgatatcttttttttctcgtgatttactacatatatacattcccatgcacgtagacgctgagtcggtgatcttattagtctcaacaaaatagcttcttttttttgcgatttattatttaggaaatcaatacaatctaaaccaaatcaaatcagagtaattatctaaaatacgaaatagaagagtaaattattcgatttaaatagtcctcttgataactaaatcttatcgtaacgaaaatacacttacgaagaaatgaaattttaaaaacagatcttgccaatcttgagcacagtcccttcacttaaaattcccaaatttatcactcgagatatagaaaatagaataataagaaggctttttaatggaacttttaagtaattagaaaaaaaaaataagatgtacagacctgagcttgagagttattggcgtagctgtcttgtcctttgccacctttcatgctgagaagtctctcgagcttcatgttacatacagcaacgttgtctcccttagaacccattctctttctctttctctatggatctctccttctctctttaactttctctacaccttctttttgtgaatgagacaagctcgaggagacgacacatatatataggaaaagaggacaaagagatgaaatgataaatgtatgaatttagttgaatggggaaacatattattaaatgtgccattgcgtacatattttgtatatactgattattcatgcaaaaacaacgcatcattatgtttgtttcccaaaaaacaaaatacaattatatggtgtacttgtgtcacatgttatagtatatatacatggtttgtcattttgtgcactgtaggttgtttttattttgtcaaccacattttgtgtagggctaattggagtaaagagttgaacaatatatggtggtcatatatatatgatgtacacaataatcaatatatgatgtacacgtataattttcaatatctgatgtgatattttttttgtcaagtatttttgaggttgtgatttaaaatgagaatatcttaaaatgacatttctgttaagtattatcgcaattgttaataattttttatatcaaaatagcatttgtacataagtacattaaatttgatatatcataatgtgttaactttacttttctataaagcagcactagttttgagatttgattagtttggtgttttcatggtaatatataattttaaagggaatattggtatttttaatttcattttgatgtaattttattaattaatttattttcattttttgggattgagatatatatataagaaaaatttaagtaagttgtggaaacaattttggttggttgtttctacatcatgccctggattcaaatttgaatgggatactcgatcgtaattagtgaaatgtgttgtttgttgactcgtcaatcatatctcatcgcgggtaattagatcagtggatagtagttccttaatcttagtgtagtaatatgcatgttaagattatgtaatgagtatgatgaatgagaatatataacaaatatgcatggtacaaaaaaaaaattagttatgagattattaatagcattataaggttagggttaattaatgagtcttaagagtaagaacctattggttggcttaaaacaatcatgatgagaaaaatcaaaaggaaaatgattgtgtttccataggctaccacccgaggggacataaggagtattaaagctatgatacgatcttagttagattcatgcatgtttcaaaaattcttcatccattgctttctatccaataaagtttcattcatatcccaagtattggtcctaaccattgtcagccaatctttatcaactagcccaaaaatgtggcatgacgatgcattaaaattttagatcttttttttatattgattcctggtttctatacgatgaaatggtcgaataatatttaaagccttaaaggcattgtatagttaaataatcacaccgatcgaacgtaaggtcagtgatccaaaataaggtgtatgcataattaaacttttacgagcaattctaattgtcaatatatataccaaattaccaactcatccgtaactaattatcgtggttcttcttacatggcatattcatctgtggttctcctttttttttgctagcttaagtattaaggtttaaatctccataaatagtctatattgagaaaatataaaagtagcatataggaggaataagagtgggtaaggcacgagattgacgccgaaaattcatggaatccaatggaacagagaggtgaagcaatatagtaaaagagactagtttcttcatcatgttgccggttttttttactctctatccatttctctacattttcatcatctctatcctaaaactagatgttattatttcattatttttcctccaaacatgattttggcatcccattttttttacaagttttagatttgagatctctgaggttgagacgggtttagtacgtattaatcttactgaaatgttgacttcagatttccttaatttgcttgttcttacacttttgggttgaaaaggttagattcagatttaatttttcgtaacagtaaacacacttctttatgctcgtaatctacaatctacgatcattagtaacgaaaataaaataaaaattgaatatcttaatctacaatcattagtactttaaggcttttctagtcatttaattgaagtttaactaatggatgtttttaaatatgggaaaatgtcactttttttctttctaagacgattgttacatgtatacggataggtattgcatgaatttcattggtgatatgaatatatgatgttagatgaaaaagaataattagcaaaagatatacaaagaataaaagatacaagtgggtcccatatatcttatattaagccaacaaccaaactttcattagcatgccacaatagtcgtgaaaagaaagtcatactgttctatatacttctactatctaatcaagatctttgggtaattagtagtacattagatatttaattcccaaaataaccaccaaattaaactttataaaataacaaacttcaggtttaggagggttactagtttttcttttacactaagcccaaagtttgcggtattcttagacttttatattttcttcagatgtaaaagtcttgaaaatttcaatattttttggttgttgtcattcttgtttccctaaattcacagtcattgaaatttgttatttccacttaatgtcgatgtttaaaccccttttttatgattaaattgctcttcttaggtttttatcgttttttatgccgttgttaattcctatctttctctcttgctatatttgttttatgtattcttctctaaattacctaattaattacgtaacaaactcatctttctttttggcacattttaacaattataaaatgagctacaaaaagggtaatgagaagcgaaaggagattattgactaatgatatgtgatacttaattgggatttggatttatcaatgactacaaactttcaagtaacgagattctcacaattatacgagttggtcacgaatataatattcatacatgaataattcctcggcctatataaaattaatttattgttactgattattgtcataattaccttttatagttttaatattatagacctttaattattaatggttgttaaagttacatatctttaaatttttattatgtgtcaaaccatttttttaaaaaaagtttaggatatctttagttaatatattatcagctagctataaaatgagattatttggacttcggagacatggatgagactaagatgatttttttatttagatacttaattgcatagaccaatgaattaaagtcaaatataaactcaacctagctagattaggtatactcgtgtaacgatttttaccgttagttatcgttgatatatatgatttaataatctcagatgaaaccatggtttctcgtgtatacctaattctgccacaactactaactgaaatacttatactttctgttggccagtataaaacatatacagatttagatttttaaaatctaatctaaaaagtagaaaaactttacttagaaatataacatgatatatgaaaaacaacttgtcacgcaaaagtcaaacaaaatgttcataaatcatctaaaatgttcaaaaatcgcatttgtttgtttggacaaaaaaaaaggtttgtttcttactaagttgcttctcagatttttttccttctattttcatggtaatattcttatatataatgtgtaatttataatgtccctaacgtggaaagcaaattggattaataaccagaagaccaggaagtctgttttattaatatagtttttgagtcttttcacataatatagttaccgtgatcctcgctgtttcacgtaacactaggccccaatatgtgctctttagttatttgtctttaatttaactggatatgtatgatgtctaactttcaaattagactaacccaagaacgacatgtatgatatatgtcaaaattcaagaaatgaatcatttaaatatttagtagcatataaaatcatatcaatatagtcatatatagtatatatacttcaatagttgaaaaagaaaacaaaaagtagagaaagtgatcaagaactacaatatattttttgtagcaatgaagtaaccaaattcaaacaatataatccacaaattttaaaaccgtctcctagaacattatttgacctcaagattattgattagtaatgaaaataataatgtatcaaatgctaaacgagcatcaacctatataatagtctatgtgagcttgtgattattggataacttatttgtaatgaactcttgctcattattagacaacaaaacgattaacggttagttaggggagaaaatattagattacgcacctatcgagtattcagtattcaattaatgtctttgcactaaatatagtaataatactagtattttttttggtctcccatgaaggcatgcggcttcctactaacatcatcaagggctgaggagttatacttatttgttctctagtcttaataatgtttaagttttggatcgcatcatctactgttagtgtccggttaaagcgagatggttcaattgatagtttttgaaggttgcaaacgttgattattttagtaactcgcagtttaacacacacacacactcacactcacacacacacacacacaaaaccatgtttcttacccgaagacatcgaccaccaattatgtatggctcatcttcttgcgcattacgattttgttttactcttaactgaaaattaaatgctcatcaaacttcaagaaaactgttgttttccaatgcaatctaaaaataaaacaaataggaagtctttttgattaggtcaaaaagtaaagggtcttttcttcgatcctcaacattccctttactcttttgctttatttcctttgactttgacctataatttactttctttctccaatatttacaacatagataatcaagtttactaccactgtttataaatgtcattcttgatcagttgaactacttttctttctacttaaatctctttttttttttttaatagttttcgatcatagtttctttatattagcttttattttatgcatgtaagtagtgtatataacaacaacgtcacataaactaaatttctcaacaaaactgacattgtatttgtcacacaatacctcagtttaacttacatagccaaattaggctactttggactcttggactttggccttggtgctttatccgtggtggatgtgcgcaaaactcctatcagaaaatatgttcattgctacatcagtcatgcactacaataataacccgacgatgataatcaaaataagtaaattaagcgaactacttcatttcagatatgattacatttcaattaaggtattgtcaactcatttcagccattaattgattcgttcttttcgagtcgcactagctttgaatctgccgttaagtaaatttcaagcctagttaatatgttattgatggcccaatagtcgaatctaacggacgtagtctggcccaaataaagggattggggctaacaatgtggtcttaaaaatattcgcggcaaagtttgaatttaatcaaaaatataaggaccgaattcaaaacaaaatataaaaacagagagagactgagaaagagagagagagagaaaaaaaagaaagacagagagtttgggggagaaaacaccccttcggagaggagcaaagcctctcctggggaagaagaagaagaacacgactttttgcttcttctttttaatgcagattttctaaaggtcttcgtaaattttgcgtctgattatcaaattaggttttttttgttgtttccattagttgtctcattgtctgtgaagagaaaggaacagaggaaaatgtcagacctagacaagcaaatagagcagcttaaacgctgcgaggctttgaaggaatcagaagtgaaggctctttgtcttaaagctatggagattctagttgaagagagcaatgttcaaagagtcgatgctcctgtcactgtaagttcttttcctcgattcaagtttcagattttatctctgcctatctttgaagattgagttttggagagaacccatgaaagtcaaagcttgtgagttgaggaatctgacgaaaattgaatttggggttgttgaattttgtgcataattgtgactctgaactgttgtagttagattggattccgaatttagaaatgatatggtttaaattagggttttgtggatgcattgtttgatattggtttttgaatttgtgtatgatttttggttcctatgtttacaagtctgaagatttcatggagaatgtcttgctagttgattatccttagattttgttttgttttatggatttagatatgtggcgacattcatggacagttctatgacatgaaagagcttttcaaagttgggggtgattgccctaagaccaattatttgtttcttggagattttgttgaccgaggtttttattcggttgagacatttctacttcttctagctctcaaggtaattataaatagcccaacggtggtttacttcggtttgtgcaaagaaatgaatgaattggatggtcttctctgcaaatgggttctaggatccctcaattttggttactttctacattctcaggttagatatccagaccgtataactctcattagagggaaccacgagagccggcagattacgcaggtgagtggagtcttttttagaaaactttggtgcgtgtttataatttcagactacttaagagtctggttttagtaggtatatggattttatgatgagtgtctgcgtaaatatggctctgtaaatgtttggagatactgcacagatatctttgactacttgaggtatacaccctttttctgcttttgttttggagttccgagtagatattatttcggttaatgtaatggaaacttcctatcttttatttgtctaagtctttcagctcttgtcgagaacaagatattttgtgttcatggaggtctctctccagctattatgactctagaccaggttgagacagtgataatacaatcataaggtttctagctataaggatataactgactaatcacttcatacatatcttgtggcagatcagggctattgatcgaaagcaagaagtaccacatgatggtgctatgtgtgatcttttatggtctgatccagaagatattgtcgatggttggggattgagtccccgtggtgccggattccttttcggcggcagtgttgttacgtcttttaaccactcaaacaacattgattacatatgtcgagctcatcagctagtgatggaaggttacaaatggatgttcaatagccagatagtcactgtttggtctgccccaaattactgttataggtaattaattagatagatactcacaaccttacacatgatcttgattcctttgccttgagcgttcatgttacttgtgtttgaatgtggtccagatgcggtaatgtagctgcaattctagagctcgatgagaatctaaacaaagagtttcgtgtcttcgatgcagccccacaagtaagatcctgacctatctaacttcatgtccaaattctggtttgatttgtgagacataacatgactatggatgcaggaatcgagaggagctctagccaagaaacctgcacctgattatttcctgtgagacgcaagtgaatacagaaactggttccttcttctcattgcagagcaagaaagctacccaaaatcatcggtgtataggttgtaaaaatgcaaaagaatctacaatccatgtgttgccaaagagatctctactcaagggtccgtttgagtagaatctttgtgtcttaaaaaaagcttttttttttttttttccttctcttttgtttgtaatgctacttttacaaaaagaaaaattgtgaaagaagagcctccatggaattttttaaaaccctactgattgattgatacacaagaaaaggatcatgcttttagtcggagtaaacaaaattgcaaggtcatcgttttggaatttgagtcttgccaatttggagaaaacttggtgcgcacccaattaagaggttaagggaaagtttgaccatatttaatgtagattccaattaagattgtgtatgaccataattgatttagaggtgggaaacttgttgggcaagtcctttcctctctgtattaattcacggttttagatggagaatatcatcatttcttcatttagggttttttctttaatctcttgcttttcgcttaagaacattactcatgtctctgcttctcaaccagcccttgaagctctgctttcagagcaaacctgggttggtaagatcctctcctcctctctctaatggcttctcaacttccaaattgcaaacccctccttgtactgtcattgacgctgatccttgtggaaggggtctcggcaaactcttcatttactatcataatgaatctgaatacactggtttggaaaagaaggtggctatggatttggtggatattccaatggcaacgattgggtcatcccatggctgggtagctactttgaaggaagacggtatattgcgtctccaagatgatctaaacccggttgcatcgtatacagaaccaaaacgcattcccctgtctcccctcgtaactctgcctcattgccaaactcaaatcgttaccaatgtgtcattgtcctcatcttctcctgaggatgaggaatgtgttgtggctgtcaagttcttgggacctcaactcagcttttgcagacctgctcaaagtaactccaagtggatcaacatcagaatcgcaaacccttgcttctactcctctcgtgtcatgttttcgaagaaagatgagatgtttcgcatactcggatctggaggccatatcattggatcatgggatctccacacacacaatcaaaaaccgtttcaaagattgcggttcaaaaaccttcccaagctgacaaagaccaaacaagagctgatggattcgtgctacaaaagcgaacacttggtggagtcaagaaccaccggtgaaacatttttggttaagtggtataggaaggccgtctggagaggtatgtcgaaactgaaaacaaaagctttaatggtattcaagctagacgacaaaggaaacgctgtttacactcaagatattggagatctctgcattttcctctcaaagtctgaaccattttgtgtacctgttagctcctttcctggtatgatgttccctaaccacgtcaacctcgcggatgtcggtgaaaagggatatgtcaatctggctgattcttccatctctgctcgtaatactagaatcgggccaggttaccatattccacctcaaattatagactagtagcttggattaagtttgagtctggaatctttccttttcttttaaatcttgaaacatcgaatctatttttatgcattctctgtgagattgatatgcatctgttactggagaaactttgcaatcatgtctcatcagtctaattatgtctaaactacatccagttagaaccaatcattatggtgaaatcatttagacattctaattgtgcctgtgactgtaagtcatgtttcagctaaaatgtaagtcatgtttcagctaaaatgtctaaaaactggtttaccaaatgactttttggatttgccttaggttagcataatgatcgaaatgttagtttctgatttagagacattttggaggaaaatcaaatgtaattgatatttgagcctgaagatcgttacatttttgatgcttgaaaccgaaaaggaaaaaaagaaaactagaagaaaagtctacggggagaagacgatttggtagagatagttgatggagactgcttctggtgaggcagagacattcctttgttctcttgttgacctgatgatcccattttgtcaaggagtttagctgctcttggatcagtcagaagtgtcttctggaatgactgagagaagcctgtggcgattatcgttacatgaatctctccggtgtagcgatcatccacaacagctccaaatatgatgttggccgatgggtctgccaaacttgtcacgacctgcaaaacccccccaaaacatgagaagactgcattataatacagtgtatacccaattgaaacaaagccgagtaaaccaagacaaaaataccgtacctgtgatactcggttcacttcctgcaaagttatgtcttttccaccagtgatgttgtagacgacaccagtagctgattgtatggatgatccgatcaatggagccaaagttgcttgttcagctgcttcttctgcccggtttttgctggaagaaacacctaccccgagcattgcagttccagaatctttcatgactgccttcacatctgcaaaatctacattgactagtccaggtatctgaaaaagaacaaaatatatactgtttcctcagaatctttggggatcaatcaataagcattcatcaaccaacttgttatgtgctttatacaatacatagactcacagtaataatatctgagattccttgtactccttggcgtaaaacatcatctgcaagaagaaacgcgtcctgaagtggcgtctgttcatcagcaatatctagcagacgatcatttggaatcacgataagggtatcaacattcttttggagcttttcaatagcttccagtgcctagaggaaataaccaaatcaggcatagatccataacaagactttaaacttaaacccattcaacaagaaacggtgtcaacacacattacctgcaaagatcttttacgtccttcaaagctaaacggataggtaacaacaccaacagtcaaataaccagcatccttcgaaatctgagctaccacaggtgcagcaccagaccctgttccaccacccataccagcagttatgaaaacaaggtctgatcctttaagagcattagcaattgcatcttttgattcttctgcagcttgttctccaagaagcgggtttccaccagtgcctattaaaacaagtaacagagacgcaagtttgttactttaagtgccaaaactcacacaacatctataccaaataatagtataactctactaaccaagcccacgagttaaaagttctccaatttgaagtgggttctcagcagaagactgtaacagagcttgcgaatccgtgtttatcgcatagaaatcaacactctggaacacaggagaattcaaaccattaatcaatcaaaacccaaaatgagaaaagttccaggttttcttcttcgtagagagaaagagattgagaaatgtgacctgtaaaccgcttgaaatcatccggttaacggcattgttaccaccaccaccgacaccaatcaccttaattctcgcagattccatcggagagaaggaacacctcaatcgcatcgacttagaccttgttgaatcgcttcttcgtttagagaagccgccacggaattgactgattctagaacttgcgcaaatgcagctactatgcaacgaatgagaagatatcgatttggtaagaaacgaagaagaagatgaagaaatcgttagctcattaagctgtgctaacggaattatcgccattgtttacttcctctgctttcagagaagaaagagagacaaagagatgggttttttagggttttttagggttttagtgtcgacgaagaaaatatcaacagttcagagtttttttcctcacaaaggaaaggtgaagagatcgagtggaccctctaaacctctgggtcacacaaacgacgacgtttcacattgatgcagaaccgttcagaatcaaaattatgactttgaaaagcttttattaaattaacaatacattgttggagtgtttggagtaatctcaaaagggagagatccagctttgttttttgaagaatgaatgagaagtgatttcaagaaaatttgaaaatagtaaagaggccaaaaggtttttagatttgttgacacactcaagataagagttacaaacaagaaaactgtttaaagattgaagatacacaaggattggattttactcgactgactttgcgcatgctttttctagtttgaggttgttcttgtctgagtagaggaatctactctgtttcgcttagaatggggacaatcagaggattcatctgtgcaatatatacaattgcccacctaccatagtcaagagattaaaaaaaaggtaagaacatacgaccaaagcaacatagtatcaaactcgatatacagatgcacaaagaacctagacaatgatcatgagttcaataatgaaactttcagcaatctcaactatgactagaagcagttgactactttgttggtgtaggatttgcattttaaatgtttatggagaacagtgattacggagaggaaacaataacgggtctttttgacaaaaagcaatattgaagatgaggaaaatgcaaagaaggaacaaataggctgaaaatgtaagttaatggctagaaaagcaacggatatagtatatgatcaaaacaaaaacttacatcatccaacagcagaccgtcgcagtaatgaccaaggtaagatgtagcctgttatcagaaaaacaaagatgagatattttactccatgcttacagaatgagagtcaaagtaataaaccgtcaagaagaaaacaaggaagacaggttaaataaacagagcttgaagcttgatgaatgatacaacaaacttcaaagtataacatatccataaattctcagagcacaagaaacgaaaccgtgacaacagtactatgtctacatcacgaaagctcgttgaagatattaatacgacaagcaaccaatgcaaagaatttggagtttcctctaaatgttgagccttttatatttccttgttcaattctcaattccaagaagaccaagagagtaactattgatatgcagcttttcgatcttgtggaactaaagagattcataactccattgaatcataggtagccaaattaccctcactaacattgtcaatttactaaaaggattcagaaatatcaaatttgcaaagcaaggaaacatacagattcgtggaggggcctctgttgcagcagattctaacgcatagagaagcaattatcccaacgacgacgaagattagggttgttataaggaaacccatgtttgatcctgatctgtgagagaattatctgcgacgataagtattacacgtgatttagggtacaataacctcaacgcgatcgaacaatacgggagaggagaaagtgtctgagatc

SEQ ID NO: 904 - DNA, 80675 bp, Arabidopsis thaliana
tcacagatttggaaatgaaagctcctctttggaggaggacgatgatgttcttcgtgcgaatccggtgaatctgaattttggatccgtgtgagtttttgagattttcgtgagggcataataggcaaaaaccgaacttttcttcaaatatgaaagtccaaacaccctaattcagatttgtcttaataatcacgttttaaagttcaaaacaagctttctatatttcatatctattgaatatacatacactatgcgatgattttataataaaattgtaaaatgttcaaattatccttctaatcaatgataaacgagaaatacttcacatttgcaaacattttttttgctaaaacatcttacgacaaacagagggaacagtgtttttgttcttcttcggattttctatttctttaatcatagtaatgttacaaataacataacatttgagtcatagtaatgttaaaaaagacactaatgaaacagcttgacatgttcatgttttttactcactaaggtaataaaattctaaacaagggaggaagatgaatagaagaaaggccggttttctctttgctcttatctcattcagctcttttgccctccaatacttgctccatccgagaagagcttctctatacctaacggcgcgagaatctgtactcgggttctacatccattgcccacgcaaacttctccaaaagagacttggtgaatatctataacaagaaacaattttctgagttggtaagaaaaaacttgtttcttttcttcagaagggacccatcctgagagttttaccttttcgattggtacttcatgacgtttgcaccatgcaactgtgattctaggatccaggtagttgatcttagacgtgcccagtgccactgttttcaagtcctcttttgtatgcatgtctcgttccattttctcgatcttagcactctgttgagcaatcttcttctcccacctgcattcaaaggacgtagatcttcaaaacgagatagatatctagagaagtcttttgagaagtaagagggaaagttattttacgcgtttggttctaagcttctaatcttctttccatcagaaccttccaatggtggttttccctttttagcccggtcaagattagttttgagctctttaagaacctcctacagatttagaaaaaacaaacaaacggaagggcattttaaatgaatccagatgaaaagcagagaacttcaaaaaagttttcaagagtttatacaggatttgtaccttgagttcttctattctcgcagtcaatttttcaatttgcgcaccatgtgtctttgatacagtacgctgatgattgcagattatggcaacctgaaagagtgtgaaccagtatttcatgaatctgccacatggttatgtaccaaacaagaaatcaccaggaggatgaacaaatcttttacctccttatttgctttctgataaactactattttttgagtaacatcgccatctttggtttcttgactcagctgttacacacatcaaaacggaacaaagttgtgaaaaaatgtaaagaaatatatatacttgtaattgggtttctatgactaaattgtatagcagcataaatctaatgtgaaaccagaagatctaagattttgaacataccatttcatccaaagtgatggaagcattatatgtacggaatactttagctgtgagaccaggcacaagttccttcaaatgagcattcagtttacttgtgtctaactcatcaaaaagatcatctgttttggattttcctggatggggaaaaaaaaaagcaagttatttgaatcagtcacaacagtaaaataatttgtgatatacaatgtcaagtccatatctcacccgcctggaactgtccaatggccttgtaaacaagaggctcaacctcgactgtgttcacatactggattgaatccttaccaagaaaatcaaactagaaagagggaaatgtgtgagattataagtcttctgcccaggattaaacacatgttatccactttgacaagtgtaaaactttaaggatgaaattaatacctttattttatttggaggaatacactccacatttccaacttttaaagtacaacaaccaacagtgtcggcctcatcatcatcctaccaaatcaaaaaaaaatgaaaatatgagatttcttcagaaattttgttgtttgcgagccatttatctgttagaaatcatttgcttttacattaaacttgcaatatactagttcaaaaactaccttctcatttccagccctaagcgccaatttatcaatgagatatgtcgccacagcaatttgcctcattttaacatccttggcagtaaaattcttggtgtatgttgttcttatattatctatatgatcctgcagtcaaaacaaatcgattgctaaaaacgagaaacaatgaaagagtaagcatgattcataaaaatgaaagctgcttaccgtaagattcctagctttctcgtacttctctttgtcgctcagccctttcagagaactgccagctcccaaaaatacatacttgaattcttttgggttaataggatcagcccagaaagctagccaggtgactgtgttatcatgctttacttctttccatctgaaaagtcacacagctcccatggcttagtaaagatcattatatgatgcttttaaatttaagaggaaaatcacggaaaaacaagacctttcaccagcaattggacattctggaataggagcacctttcccgatatttaaggtgatctcgcatggatggatacgcttctttagttttcccatctgaaagacggacagtagatggttttaaaagagattacagaatagaccatgcctcaactgaatccacccaaacccgcaacgtcaaggtatgttgtttacaaaaattagtctctgggagacatgactaaccttgggatgttctccacggcctctgaaaaggccaggcggttccactctgaaattaccaatctgaaagataaacagaagttgagtgaggaactcccttttggggaaaatgacaacgttatgggaagatttaccttctctttgacaccatcaacaacagcccacatatatttctcctcttgcttcattttctcctctttcaaagcttttttctcctgtaccacatcaattaaactatgatataagtctcaccttgaaaaattttaacaaaaagaaaaataggtctgggacaccaatatagtcagccattacacttaaaattctcttttttaattacctctgtgctcatttgtttcttcttctctttctcttccaaatgccactcatatatgggagtaaagtcacaatcatccaacttctgtatcacatgtttcttgccaagcagtcttcgccagtcattccagaaattctcccgaaattgaggtttagtataataatctgtctctctcatcactgcaaacatagtcgcaacctgtatatcatcaacatagcatcagcatggataataatgctttcttggaatgtcatacgaaagcactctagatattgagatggacgaaaaatcaattaagaaacgggtatataacatttatcagtaagattgaggacgtggatggagaggacaacctcttcttgttcaatagttaggtcaacaggtttccccttgtacaaaatcttaatgccatgaggcttgtatggcggtggaaatattacaccgttgtgcaccaaagtagtccatttcttttgcccatctccagaggaaggtgatgattttgaagacgtggaatattttgagtccttcgttactttcttagtgtttttggtcattgctctggacctaggagaaacgacatttctcgcttttggctttgcagctgatgaagtagaatttagttttactgcttttggctttgcagatgatgtgttactgttggaggaatctgatttgaatctcttggatatcggaacatcatcatcatcatcatcatcagttccatcttctctggtagataactgtttagctttcatttttggtgaaaccaaaacccttcccttatcatctatctctttcttgacagaatcttgtttcattttcactgaagtaggtgaagctgatattttggccttcttcaaggaagattgatctgcagaactattcttctccagaggtctcttacctaataccttaccattcggcacttcattcttaactgtggaaccattctgatgcaacttttgaaccaaaggtttcttttcatcattggagagctggttgccccctgacatcccactatcaatcttcttccgaaacattgacgagattggagtttcatcatctgactcgtcttttataattctgcttgctctatcaagaggtcgatcaccattattctttttctctggctgcggtgaagaaacctgccgcgaagaggttggccctttatttccagatagtatggaacttaaaggtctatcatcctcagaatcctcatgctcaattttacattcagactgatctttctgtaactggctcctatccttaacagtagagggcatatcattccgcaatggtgactttgctggtgaagccttagaagaagatgatggcatagaggatttcactatagaagttttattcgaaggagtggttccatttgggctagtcacaggtgatctcataggtgataccttggtggtaggaactgccttgcttctctgggaattggatttagattgattcgaattagaagccactgtattattcctcttgaacgctaaaggcttgtcatcatcactgtctccagacccattatccatcacaggttttgaaactgtttcagtgcccattcccgaaagaacaacgttgatgaaggctcagaccaacttctgaccaagacacaaaacaaaccacaaagaaatgtcagagtttcccaaggaaaggcaaacaaacaccattacaagtttacaactacaagcaacaaaatgattacactacagagaatgaagtactgagattcataaatagagaatcttaaagcaaagaaccaacatttgaagaatccagtgtagttgaaatatcaaatccccaattacgtatgtgaaaccctaatttgtgctataactgggtaatgatgcaaattaagcttaatacaatcaaatttcagagatttgacgttggattgaagaagctaccttcttccagagattgaagaaattgtctagcgaagcctatctctctcctccgtctctctgttctctcttctcttctgcttcgatggtttctatcgttttaaggacgaggagactaaggcataaggagactctctttagattagagagttcaccccttgagggttttgttttcgttacgacgtcgtattgagtcgcgccaaatcgtttaatcttaccgccatagacaatttttttcactcttattaccgtaaactttttaattgccaaaatccccttaatttttgggtttaagatgaaaaaattgattaaacattgactcatcggttaatttactaaattgtgaagcatatttaagtaaataaaataggggataaaatcagaaataaaaagaaatccaattttttatccgataaaattatgtatcatcaaataatttaacgtttggatgctcttaagattttttatcagaaaaatttacgtgtcgatagataatttagcatttggatatccacattcttatgggataaaattacgtatcaacggataatttagcatttagatactatttagatatacgaaacaatgtgtcatcaaaacttttaaccatttgaaagttaatttgtaaattattaaagttatttcaagtactaaaaaaggttaaaatgaattttgtcacaaaaaaaacttaaaaattttcattacttaatgcataaacttattaatcatccatagtatatagattaaagaaaggtactaccattttatgtataattcttaatattattaacctgaattatttatttattggagtaaaaaattgtaactgtttttctataaaacatccatagattagtctttggtttactaataagagagaagaaacctcttttacagggtcttgctatcattcttcttctctttttaactctttctctctatatctctgtaaatgtatggtgaatggtagttaggtgaaactggcctcaacgaacatgtatttattcatcggtacttgaacagaatctgaactcaggatcaacatccattgcccaagcgaacttagccagaagagacttgttaaatatctgcaatagcaaaacacaagtaaatttcaagtgtttgcaattctgttactttgttgaagctctttacatattaccttctcaatggggacatcatgtcgtttgcaccacgcaacagtgatcctaggatccatgtagttgatcttagatgtgcccaatgcgacagttttcatatcttcttttgtttgcatatctctttccatcttctcgatcttaccttgcgtttgcattatcttcttctccaatctgtttttccaaagagggagttgttttaaaggagatgcttatgcgataaataatgtatatgaagagaggtttagatattacgcttcaggtgttaagttcctctttctctttccatcagatcccattaacggtgttcttcctttcttagccctgtcgagatcaatattcagctcttttatttgctcctgcagagaagtacaaagattatgggagtgagaaagttgaaattgtatcttgatcatatttaactaggatttgcttatgttatacccttagttcttctattttcacagccagcttctccacttgtgctccgtgagatttcgagacagtacgttgatggttacaaatgatagcaacctaacaaaaaagaataagatgatcatattctcttatctgtaaaatagcagagagaataattgtcattacctccttgttcgcttgctgataaaccaccactttttcaggaacgtcaccgtctctggtttctttactcaactgtcataacatcatccaaaacggcttaagaaacctatatcattaggattgtgacaactgagtaatagaaaacataccattaaatccaatgtgatggatgcattatacgtacggaatactttggctgtgagaccagccataagctccttaagatgagtattgagttttgaagtatctagctcatcaaagagatcatcggttttcgattttcctggatagaagacgaaaccaaaagtcatttatccagtttccaaaggtcaattataagattagatagcctacataattattaactaacctgcttggaactgcccaattgccttatacaccagaggctcaacctcaactgtgtttacatactgaatagagtctttaccaaggaagtcaaactgaaaatgccaaagcgaataccataagtcactataatatgcaataaaaaataaccttcttcaacaaatcaataagccaggcattttagtactctcgcagatacattctgcagtcaattttgtttaggttgagatcaagtgtatacctttaacttatttggaggaatacactccacgtttcctactttcaatgtacaacaaccaacagtatctgcctcatcgtcatcctatacaataaaaataagaaaggaaaatgtgagagaattgcttgaaattccagaaacatgttctattatgagtaagaagcgggtcttatggagtaatgatctcttataagccaaaaccaatgagaaaatgaatagaacgaaggatctctttaattaaagaagaatctttgttaacttaccttctcatttccagccctaagggctagcttatcgatgagatatgttgccactgctatttgccgctttgttacatccttgttattaaaatctttggtgtatgctgctctaatactccctatatggttctgcaaacagatggtatgttgctaggtaagaaatgggaaagcaggatggtttccagaaaagctttaaacggcatcaaaagctcattacatgtagcttcctcgctttctcatacttctctttgtcgctttgtcccttcaacgaactgctagctgccaagaatacatacttgaactcttttggattgataggatcactccaaaaagcaagccaggtaacagtattgtcatgcttaacttctttccatctgaaaaagaacagcactcttagaatcaggtcataggaaaaaacaaaacatgtgtctttttcaaagggaagcatataaaaacaagacctttcaccagggatagggcattctggaataggcgcctctttaccaatgttgattgtaatatcacaaggacgaatccgctttttcagtttccccatcttgaacataatgacgcagaagagaaaattactaaaatgagaaataactatggaagatgggggaacaaagaagaaaaatgttgtaaatatgatactacagcatacacagaataatatagtttaaggataatgtaagaaactgcagcaaaaataaaccttgggatgttctccccggcctcgaaacaacccagggggctcaactctgaaatttccaatctggaattgttgcaaaatatggttagcaaattttaagaagctggaaatagatttctatcaacaacaaaaaaagaaattaccctctccctgacaccatcaagaacagcccacatatatttctcctcctgctttaatttctcctctttcacaatccttttctcctgtacatcgttagcattataacattatcagcaacagcttcatgagaagagcgtactcatggactttatcttatagaaactgttatttacttctgcagtcatttgtttctttgtctccttctcctgcatataccattcatatatgggagtgaagtcacaatcatctaaacttttaatcatatggttctttccaagtagtttccgccaatcattccagaaattctctctgaactttggttttttataatattctgtttccctcatcaccgcaaacatagttgcaacctgcagatagaaatgacgatattatcagctcaccactcatgactagagaaaggatgcaaaaacactctgggaaatgagatgaaagtaacggctgcagaaagtaagcgaatatacaatcatgggacagagacgcagaaaaaatgacggacctcttcttgttcaggagttaagtcaacaggctttccctggaacaatatcttaaccccatgacgcttatatggaggtggaaaaataacaccattgtgctgtagagttttccatttcttttgcccatctccagaaggtaatgatttagaagatttcgaatatttagaatctttcacccatttgttgggcttttgagctattgttctggatgaagacgctatcattttactagaacttggctttgcggaagacgatttattatttgaggaatctgacttcatccttgaggcaataggaacatgatcatcaccatctgagttatcttctttaacagttgcttggttagctctcaacggcttcgatgcatccagattctttcctttggcatcttgcgtagctgaaatatgtgaaccttgctccactttcactggtctagctggctctgacagcttgggcctcttaacagaagattgattcgaagaactccccttttcaagaggtctcttagcaggtgcctgagaactgtgcccttcagtcttaggtttcaaaccattccgatcaatattgttaaccaaaggtctcttctgttcaatatgaacaggcttgctacttgatgtacccacactggtctttgtctgaaccgttgaggacatgggagctctctcatccaaaactttctttttagtgtaatcactcaatccctgaggcctcatgttgctcttttgtactgcttgctgcgtactcccacgtcctgaagagcttggctgtttggtaacctctttagaatccaatttaagcctagcactcaatggtttatcatcctcagaatcctcatcatcacttttagacacagaaggagctttcccaaaaccgttcctctccttagcaacaacagatctatcatctcgcaacggtgacttcagagtcgaacgttgaacagatgaagatgacggtaatgctggtttcatcattgaacttctagtggatgaagaagctgacctattcgggcttgttaaaggagacctcattggtggtgaggacttggtggaaccaatagccgagtttctcatagcattattaatagggctaggacgatttgttgtagctgctgtattactgtttctcttaaaaaccaaaggaatgtcatcttcatcttcatcttcgtacccgtcatgaccatttggtacaacgggtttcacaaacgcctcagtggccatacccaacaaggcaagttattcacaagcaaaactgttgatcaacaaaaatcaaaaaaggaaagatacttaattatctagaattgcaacaaaactaaaattaataaatatacatactttaacattaaatttgcaaaccaaacacagatatgcatcaagacatttcaattggtctgaagggaacttcaacaactcaattataatcccaataacatatacattaaaaatcgattgagtcaaaattcataaatctgatatgtcaatgaaatgaatacgaacaaagctctcaattgtacaattgaaaactcgaattcccaaatgggaaagagaaaccctaattttgaaatcaaaaatgaatttgtgaaattgagttcaaattcaaacgaaatctggaagaattatcaaattgatgcaactacctgaggccacgacgaaatcggcgatgaagcagatatgaatctcaggacacgcctcacggatttcttacctgcctttgatttctgtccgttttttgtgttgtagaggctaagttaacgaaagactctccatgggtcagcgagtcttgaccccttttgactttatcgcttatatgacgtcgtttagggaatgggattgttttcttcggcaacctctacttgggctttgttaatatgaaggcccatttttggagatccatggacttttggaaaatagaatccggactattttgataataccagctttaattctggttgataagtaagtaataagatactgagattacaactagaatccatattttgatcaatctcttgagttgttcttcctccatgtctcagactttctttttgttatgaatttttggcgtttttcaatcactgatctaggttataacttgggtgttgcgtgtggtgaggtcatagttaagtttagtcttgtaatgcaaatttgagattttgtaatattaacttacagaatgagatacatagcaacttaatttttaagttaacttctaagttcttatataatgtgatagctgcattttttgtaagtatatcattaaataatgtgattgttaacaataaccctacggaatccatttagaaatgtaattcactggggaaaataaaataacttgcttctgaagaaatcaatgagcaaggagatttcattggagcatctctcccccaggttgttccgaatcaactgaggaaaaaacagccaaccagcggtcacatttacaaacgctatcgtgaacatccaagatacgactggtctcaccggccacctccgtacaaacgccgtcctcttcgctgccacttccgccaccgtgcaaactccatgtaagagaaagaataaagcgacttcccctgtaggcatcgcacgggttatataaaagaaaaccacttcatgagccacaccagaggttacaaacgtcgcaaaaacaccaatcaacattgcataatcagagctcattactcgttggcagacacgccgcacaggagtgtagacgattgcccgaagacttgccgagactatgaggttccacctgcgaccccaaaagtcttgaagagatgtggctaagtatggttcgtgaaaatgtggctctaggtcacaaccaagaatgatagtcattagaattctaaggagcgttaagagaatctcaagtaacaaatatacatacagtggatggagacacaatagaaaagtacgaggaaggttttgtatgtcgttatgcacatataacaacacaacaaagattgcaattttaacgggaaaaacatacgtggacaaatgatcttgagatttagggttttgttgacgctggattgggaagcaagtaaagcaggtaaatctgaatagatttgaaggtagtggaaaaagaggaccttgatcaaaggaaaagaggatgagtcttgaattggcaatagctgataagaaaaacgctgtggtggaagtgaaaattgaaaaggagaagaacagaggaagaacaactaacaaaacacagaccggaaaaatagagagtaatcgaagaacaccagatttgattcttggtggtaagcagtagcagtaagatactgagataattgttaaaaaccctacattgatcaagctcttgatttcttcctccatctctcagtttttttttgttaatgggttgctgagtttaagcaagtaacattggtttttgctacaactacaacttacccactacttccgttatatcagtattagaatcagtccttgactcctttctctgtttacacaaaaataaaaaaaaataaaaatcagaactcttcaaacgcctctctgtaatgtgatttgatatagtgtgaattagatgagtaaccaaaagcgtgccaacagccaactaattaatattcaaagtaaagaagaaaaataaaaagaaagtgagaaattgtcaaagagtttatggttcatgtttagttgagactatcggtgtaaggtggtagttctccgtatgggagaattcacatggttcaacttcaagtcaagtttaacactagaccagtatacctaactgtccaaaaatattaatcaccgatttatttcatcaaattattataaagttatatttttagtatagacaaatatatgaggaattttcatgaaataccccttttgaatcttagatgtaccaattttcgaaaaatactattattcaaaaagactactactctaccggaatatttttagtaaatttgccatatttttcaggtttctttatttttaggatagatgaaaaatgaagttttgtcttcaacacctattaatttatttgtaagatagtttagcgaaaacaaaacaactttgataaataaacatgtaaattttattaaggggaaattggaaataaaagataaatatttaaaaaaatttccatctatacattttatgatcaagattggtgacatatgcgtttaatataatttaaatcccactatatctccagcttttttatgcttacaaaatacaaaacaaaaagtccaaaccaatttatttttacttggagcaaatcaatattcttttacttggagtcgtcgttcatcacttcttcgatattgtcttcctctattcttcacaaaaattaagctgttcactcctctcaaataactccaaaacaaaactctttttttttcaatttatctttctttatttccctcgcttcaatttctcttagaatcttaccatctctttctttaaatatttatcctttgtttccaattttcccatttattaaagactcgtaaacaaccctaagaggatatataacttacgattaaagaaatcaattagaaacaagtcttcattgatgaacctctccatcaagccgtgcctaataggctggggggaaaatagccaaacaccagtcacaaacacaaaccccaccgtaagcagtctcgacactgccggattcaccggccaccgctgcaccaacttcgtcttcctcttcagtgccacttcagccgccatgcaaaacccatgtaacacaaagaaccaagtcacctcccatgtaggcttctcacgtgtcaaatagaagtagagaatctcgtgagccacaccagagacgaggaacgtggcgaaaatcgcgaagaaccgatcccactcggagctcttggctcgccattgccgtatggggttgtacactgcgagccagagaatcttcgagaccatgaggttccatcggtgaccccagaagtcatgtagagaggtggctaagtatggttcgttgaattgtggctcgaggtcacacccaagagtgatactgacgagaaattttatcaaggttaaggaaatctcaagctccaagtatatatgcagagcatagagacccaatagaaaattcgtagatagaaattgtttgtaatgatacgcttgtagtaacaaggcaccaaagatgaaaactttcagggcaaaaacccatttggggaaatggttagtattttcagggttaggttttttttgaagcttgatggggaagcaagcaaagcagacgaaatgagggagattaggaggaagtggaaaaagaggacctttttctaatgcaaagaggatgagttttggaactgcaagacctgagaggaaaaatgcaatagtgaaagaggaatgaacagtggagaaaaagataggaataataagaaacaaaacacaaacaggaagaacagatagtaatcgaagaagactggttttgattttgggtgttaagtagtaacaataagttactgaaatgattgcagaaacccatacttggatgaataacttgagttcttcctccatggttactggttaagtgataataaaccaagaaacataggaaaaatgtttacagttgtagtatataagcgtgggagcaattaataaagacagtatgtttgttacacatttaagggaaaaaactattggcagttgttgagtagttaatggctctggaaaatctatcaaattaagtactttcctcttttatgatatagtaatatagtactagtagtgtatgtaaaaataaaaaaaaataagtatgactaccgtttatagtttttcttttcaacgtcttaaatattgaatttttttatgaaaaagttagcagagcagagcataattaacactcgtaaaaaacagtgaaataaaactaaggttgtcgtttctccttaatgcgattatgaagccatgcgggacctcccgttctaagtacgagttgaaacgcacccatctctcgtaacacaactacacaagcaatatcaatatatcataaaaattcgttttcgcctggaactaaagaatttgaatgattcaaaacctgcaataagttgacgaattctaccgatgagggagcaatgaagcttctatttcttaaataatttgacagcagagtaaacattttgacctatgcttgacgttatatgggaaatccatatagtttttttcttcctctcgctaacgctctttggcgatctttcctcccaactatgttgtatttagataatctctctacaaagggttcacgtgaacatgacacaaacagtagtcgagggaacaaaaattgatcgatcgataggaagtgttggtttggttccaagtaacactattatttcattctttagttccaagtaaaaacaaatcgtcatgtacaacgaacttggaactgaagcaagtcagtttttttagggtttgataagaaagaaagaaacggcatgaagagaccaagagacatgctggcagcatcttaaagagtttctactaattccaacttgccgacatcttcaacaagacaagttcgattcatttcaagataagtagttgaccattatggactttgatgctcaaccggactcaataacgttaactcgtgctcatttaacactcgttataaaatatccccaacaacgtaaataaaataacttatcgcttaatgaactcaacgagcaacacagcttcagatgtgaatctctccatcaccccgctccttttaagctgaggtgtaaacaaccaaccaccagtcacaaacacaaaccccaccgtgagaacccgcgacacccccggactcaaccgccaccgctgtgctaccgtcgttttcttcttcaccgccaattctacagcagtacaaacgccatgtaacacaaagaacagagtaacttctcctgtaggcatctcacgtatcaaatagaagaagagcaattcgtgaaccaaaccggagacgataaacgctgccaaaatccccggaaacagagcccaaccggaactcattttgcgttcagagactcgccgcattggtgcgtaaacggctggccggagaatcgccggaaccatgagattccaccggcgaccccagaagtcttgtagagatgtggctaagtacggtttattggactgtggctcaagatcgcagccaagagagataaaaacaacaactttaacaaacgttaatataatctcaatctctaagtagagatgcacaaaatagagacctaatagtatagtcggagacagattttgtctgtagctatacaaatgtaatagcactgcaaagattgcaagtttaatggcgaaaaccaatttgggcaaatggttttgagatttagggttttgctgaaccttgatggggaagcaagtgaagcagaagaatcgagggaaatttgttggaattgggattaaaggacctttatcgaaggagaagaggatgagtttgaaattagcaagccatgtgaggaaaaacgctgtgattaaagataaatgcagagaggagaaaaacagaggaagaacaagaaacagagcaagaacaggggaaacagagaggaatcgaggagcaccagatttgattctaggtggtatgtagtaacaataagatatcgagattattgcagaaacccatactttgatcaagttcttgagttcttcatccatctctcagatctttgtttgtgttgttgtttttggcaatcaccgaggttataacttattacttggctatttttttatgtgtcttgaaatgggaaaaactatagttacattgttacagaggcaacctcaattacataaagtaggtgagaggtagatcaaaggctacaaagaagagcattaatattgagtcattgggtagttgtggagtgttgagtagtaaatgtaacaaatattgtaaaatatctccttggaatgaggatcggagaatggttggtcatttggtctaagtaagaaattctggtcgcgtgataaagtgataagaatcgttgttagttttttttacaaggacacaataaactttagttaagcatttttgtataaccactacatttctttactaatgatatttacattcttataaaaacaaaaaagtatcattgttagttttataagttataacagcattcgaaagtaagccttagctaaaatgggtagaagattaatgcattatggagatttttaccttggggttttaatcattctaccattttcctcccaaaatcccatctctagcaatttcacgaagtgtactagaggtaagtcacttttaccaatttctcattttctccaacatcttattattttaattgaacatgtctcatgacataattatattaaattaaaccaagtgtccgataagttaacaaaattagacagaatatagcataacataatcaaaatataagcaaaatataagcaaaataagtagaagttatatggtcaattctgagcaaaacacttttgatggcaactaactacaccaattcacgaagtagtgcaacaatccgaatgacttaaaaacaaaagaaaattataatagtgaatagacagaagtttggtttagtccaatcaacccggtattagatctctctttggttgcagtccaacatgtgtgattaaaaatggtttgtgtaaacgtaatctaaaatcctcgtttaattacactttttattacgcatagttggatcagagagcaattattggtttaagatgttcacttgtataagaacataagatggtgcacttacataatcacttgcaatggtccactacacaaaccaaatttaaattgtccaatataagtcgaatatataaatcaaacacttgttttgtcttattcaactcaaattgtccacaaaacttttagatttgtattttataaaatatatctagacttagaaagtagaaacaatgacgttgtttccacgatttgacatttaccaaagccgtttcaatcacagaatatctctttagttctcttcccaaatcatcaaaagtaatatgattgataaaattagctataaccataaatctacgattttagcgattggtttctacaaaggtagaaaaacttgtgcttgacgaaaccaataaacaaaaaggcttcgtcagctagtctctcgatcatgccactccttgcaaggtgagggaaaaacaaccaaccaccggtcataacaacaaatcccaccgtgagcagtcgtgaaaccatctgactcaccttccatcgccgcaccaacctcgtcctcttcgcagcgcattcagcggcagtgcaaactccatgtaatacaaagaacaaagtgacttcacctgtcggcgattcacgtgtaaaatagaagaaaataagctcgtgaaccacaccggaaacaaggaacgaggcaaaaactcccaagaacaaagcctgatcagagttcattttccgaccggccatttgtcgcaccgggaggtagacagccggccggagaatcgccgggaccatgaggttccatcgacgaccccagaagtcttgaagagaggtggataagtatggttcattgaaatgcggctcgaggtcgcaccaaagagagatactaagcagaactttcaagggagctaagagaatctcatactccaagtatatatgcagagaatagagaaccaatagaacagtcggagacatatgttgtttgtattcatacatatgcaacaacacaccaaagaaggcaagtttaactgcgaaaccccatttaggcatttgattttgaggtttagggttttgttgaagcttgatggggaagcaagtgaagcagacgaatcgggagagatttgagggaactgggaaaagtggaccttggtcgaaggagaagaggattagtttgaaattggcaagccatgagaggaaaaatgctgtggaaccagaaaagtgaacagaggaaacaaacagagggagaacaagaaacagaacacaaacaggaagaacagatagtaatcgaaaaacaccagatttgattcttgttgatgtgtagtaacagtaagatatggagattattgcataaacccatactttgattaagctcatgagttcttcctccatctctcgagatcttcttttttcttcccaatcaccgaggctttgactaatatgagtttttcaaagtatttaaataatcgaatgaatcaaaaacacgttccaaatgttagtgagtgtgataatcactatttagttttatttacattaatgataatgattaatcatttggtcaacgagtagatgatctagataaagaccaaataagtttccaggatttgacatctactaacccaactactaatcatatataacctttatttactcaaagttatatgagttgataatccagctatagaaaacacataaatccatgaatcatgcatgtttcagcgattaatcacccaaaagtaacagaagaaacttgtgcttgacgaaatcaatgcacattaaggcttcgctagcgagtctttcgatgatgccactccttataagagggaaaaagaaccaaccactcgtcacaacaacaaaaccgaccgtcagaagacgtgacaccgtcggactcactctccaccatcgccgcacaaatgtactcttcttcaccgccacttccgccaccgtgcaaactccatgtaacaaaaagaaccaagtgacttcccctgtaggaacctcacgggtaagatagaagaagagcatctcatgaaccgcaccggagacgagaaacgctgcgaaaactcccaagaacatagcctgatcggagttaactttccgacaggccattcgtctcgccgggaggtagacagccggccggagaatcgccgggaccatgaggttccaccgacgaccccagaagtcttgaagagaagtggctaagtatggttcattggactgtggctctagatcgcagccaagagtgataaagaccaatgctttgacgagcataaagacaatctcaagctccaagaatatatgtagagaattaaaaaccaataataaagccggagacagatattgtttgtattcatacatttgtaacaagacaacaaagatgacaactttaatggcgaaaagccatatggggattttataattttgaatattagggttttgttgaggcttgatggggaagcaagtgatgcatatgaatcgggagagagttcgaggaagtggggaaagaggaccttgatcgaaggagaagaggatgagtttgaaatttgcgagccatgagaggaaaaaagccatgcaaccagagaagtgaacataggagaaaaacagaggaaaaacaagaaacagagcacatacaggaagaacagagagtaatcgaaaaacaccagctttgattcctgttgataagtagtaacagtaagatatggagattattgctgaaatccaaagcttgatgaagttcttgagttcttcttccatctctctagatcttctttttctttttcaataaccgtaacgttattttgatgggatgaatttaaataataataggatgaatcaaaaatgacatgaaagctattacagattcggacaaataaacctgttttgcctctcaactctccaggatatcctcaaaccgatgcgagcggacgcatgtgacaggtctttatcatgcacgaacctcaacaatgaaaaaaccattttaatgtagatcggagtgtccaaatttgtaacgcatttgggagcttaaagtgttgtcgataataacaatgataaggataaagaaaaaaaactcttcttcaaattatgcgttacattaaaatacagacaacgtgccttttaacaacgtcaataaccaacaaacattcacttatcactctcttatgcacatcatttcttaacatttgagggtaaaacaaccaaccagctgtaacgagcaaaaacaccgtaattgcaagacccgagaccgcccgacgtggcgtaggaagccaccgcatcctcttcatcgctatctctaggcaagttacaactccatgcaaaagaaagaagcaagtgacttcccaagttggagatttgcggataacataaaagtaaatcagctcatgcattaaaccagagacaataaacgtggctaacattccagcgtaaaaagcccggtgtagaccgagtaacggtgcacaaaatcgctgaaccggtatgtggacggctggacggagtacggctgggaccatgaggttccatctacggctccaaaactcttgtaaagaagtggctaagtaaggatcattgaataccggttccatttcacaaccaagaagcatagacatcaaggcaccgacgaagactaagataagttctgcctcgaggtaaacatgaatggtaaagagagccaagaaagcgaaccgtgataaaccggaatcatagttgtttctatacacatgtaataagaaggaaaagatcaaaagtttgaaagcaaggacccatttagacataggtttgttgtggattcgatttgaagaagggtttttattgattttgatggggaaacaagcgaagcagaagaaacgggtgagatttgagggaagtgggcttaaaggttcttgatcgaaagcaaagagaaagagcttgaaatttgcgagccatgtgaagaagaaacctgagatgacgcagaagtggacagaagagaagaagagaggaagaagaagaaagatgatgaagatgggaagaagagagaggagacgaagaacacctttggagatttttgatgagatgtagtaacagtaagatatggagattaaggcagagatccaaaccttgattaggtttctcaactcttcttccatcttttctctcttggttctgttggttgctaactgtttcataatgatgcgacttaaataatgttatctacaaccagaagaacatgaataatgccaaaaaccataactggtaatacgtttctaatttgtcaagtttgcgtcatttttattttggatcattcaaaaactatttttttcaaagaggtaaaaggatagaacttcaaagttagagggtttattgtctcatgtactttcattttttttattttttaaacttgtattattcaattatttaatgatttggaaataacatatatgtatttaccagattttcaattcgcaagtaaaagataaatgaatcttagaaaaaactccatattacattttcttttacattataaaatcaagaaatccaaatagattcggaatgttcgtatgacaaatccagacaaacgacgcggcatgattaaagtaagattatagatttggcagagtttgttttattttaaaattcttctaacaaatattgcattaataatatacaaagtaagatgttcatatttcatcatttgttagaacttagaaaacatttacgccatatttattgaatttgttgagcttgattcaatttaatagcatgtcaagaatgtttcacactagacgacgtgtctcacacttctatatacgttttcaaacaatgaagagaaacaaagtttggttgctctgctaccgctctttgcctttaataaagaatcatgaagaagtgaataacttggctaggtcaagaaccaataaacattctccaatcgctttctcatggacattgtttctcagcacttgagcgaggaatagccaaacgcccgtcacactcacaaacgtcagaactacaagaccagagacagcccggtgcggtggcctcaaccattgtgttctcttcaccgctatctcagtggcagtggcagcaccatgcaacacaaagaaacaagtgacttcccaagttggaggcttacggatcatgtaaaagtagagcagctcatgcatcaagcctgagacaaagaacgatgccatgaccccagcaaacatagccccgtctggactgagtatgcgtttgaaaaaacgctgaaccggaatgtgaacggttgagcgtaggacggctgaaaccatgaggttccatctgcggctccagaagtcttgtagggaggtagctaggtagggctcattgaacaccggctcgatgttacacccaagaagagtagataccacggctccaacaaagaccaagacaagttctacctcaaggtaaatatggagacaatagagagccaagacaacaaaccgaggcaaaccatccctgtattcataaacatgtaacaagacgcccaagaccaaaattttaacagccaaaacccatttaggcataggtttaggatgaagatttggtatcgcatttggagaagggtcttgtctgattttgatgggtaaacaagcgaagcagatgaaacgggagagttttggaggaagtgggaacaaaggtccctcatcaaaggcaaatagaagaagcttaaagtttgcaagccatgaaagaaaaagaactgaaatggcgcaaaagtgcacacaagagaggaacagaggaagaacaagaaacagaatgcagactggaagaatagagaggagacgaagaacacctttggagagtttagacgatatgtaataacagtaagatagagagattaaagcagagatccatacctcgattaagtttctaaacttttcttccatttctcagatctgtcgtttgctaattctgtggaagcagcagagtttgacgtggtcctgtattaaagaattaccacaaaatatgactcaaaagtttaagacaatagaagctggcttctttttcttttatattattaaacagctaaaaggcccactagctacacatgtgagtggcagagaaaagttatagatttcttctattcttcctacactttcgtagagtgagacacaaaagatcaatcaaactactaatgttgcaactacaaggataatgagtgctgatctagtcattaatccaaccgccagatcgactcatataagggtagttcgggttcgggccaggggcaaaaccccttggactcatttcgaagtcactaggtggtggcggtggcagtggaaagtcatgaggatttaagagattatgtccgctaggttgcaatggaggctgaggtgggaaagagctcatcctctggtaattcatttgatcgaaatgaggcgcataacgttgttgcaatgggaatgcattgtccatcagatttggaggaggaggaggagctaacatggggtccaagtgcccaccgtactgctgtggatattctctttgaccaatccctctatcaaggtctgaatatcctcggaaatcaaacatctcgttaggaccatttctcaatggaaactgatccggtaggaaaggaggatccggcattctatagcctccaccgaaaccaccatacttagcagcaagaccatcgtcgaaatgggacaaacttgcaccataagatggttcaaaagcttcaaacggtttctgacccgtattttctggcgatggacgaacagtgtagatgtcctctctagaagttctcacagagctaggcctatcccgactcacttcaggttttccagtgccctgcactttacaaccatgttctctaatattctttcccaagttactttttgtccttgttattgcaggcagagatgcttctacagcctcgtgagatctttgaggtgttgtagtggaaattgatgtgcagacagcatatatatcatctggggaagacctaacaggactctgccaatcagatgtcatttcgggaatttttactttgatgctctctggtgctctactcaactctccttgatcctcttccatgtcattgctcttccaatccacattattagaatccatagatttcccaagcttcctaccagagtagtctttggtctttccctcctttttcagctgacttctccgtgacaagtgatctgactgatgtacacgtgctacagtttctactgtgtcgattttctcagagactaagattttattaacgcattcagctacctcaagttcatccttttccataggaatatcatcacacatgccatcagaagctccaagtggatgcaaagatgcgtttgcttcttcttccactatctttaactttgagctccccacatccctagacaaatggcaatgcttctccgctattttcttgtgcttggctgcaaagtcggaccgactccagagagaaagtggcggaggaacaaggttccagtcttccaattgcttgtcttcttcattgacagaaccaggcaggtaaaatgactgaaaggaataggcaagaagcataacatgtaactgaaactcaataaaggctcaatctctcaaaaagcaaaatcaaaagaaaagcgaaagatttacatttccagataggaacgtcttatcctcccatataagcacatatgatgacttctttttatctaacctgttgagaaaagtgatagatttaacaagagagagagagaggagtcgatatattagtgttatggaatggtacagaggagcagatgagatagatggaaactgaaacctttcagtctcgggaggaacaatgagaatgagaatctttgggcggaactcaagagccttggtaataaacttgtttgcaagagaagcattgactccaaatggtggatttagccccataatctactcataattccaaaaatataaacagtcagatactactcaaactatttcaatgacactggagcttacacaaagttcatactaaaggaaatttgtgtcttaccagctttgaacctggttccaactcatctttacttacagtcatccaatcctttctctcaaaattgaaattattctgaaagtaagatagctaatcaatgagtaatcctagaagactgatgaatagaacacaccacgatctaacatatgttgcttccgtatcagtgataagactttacaacttacgacaatagtaggcacacacacacaagtcattaccttcgctggaaaaagatcgtaatttttatataagcacttcttccccgtttcttcaagcttcgcgttcatcagacagctaaagtcattagaaccacaacagaagtcgacaatctgttggaagagatcccagaaaccagacatcattgtttatgcacaagacattgatcattatactaacaagatcatacttcagaatataagaaaaaaacttaagagaggtaaacaaaataataaaattaaacccaacagataacgtttgtgagcaaatctcaccatatcaccatcatctgcataccaatgcagcctatcaacaatctgcacaaaaagtaataataggtctggtcaggtacaagcttcagatacaggagttaaaatttgacaagagtgtgtaaacagcaggtgatagtcactagtcacgcaggtgacagaaagtgtaaaccaacagcataataatcctcacagaagacagattaagtaagctaattggaaagacataacatcctacattttaagagtcatctctccttgaatttttttctttctcactaattgactaagtgtgaaccgaaaatccttgtaacatacaggatgcttagacctaaatcttgtttatgcttttaagaggatagattacctgttgaagtttttcaggattagtaaaatgacgaccaaatgaggtatagcgtgcaccatggagaaaaggagcaagataaactttgagcttatcctgaagcaaaagaaataaacatctacaggattagcaaaaattactagttacaaacaaagataaataaaaaggatgtcgaaaaagctaagctaggaccttccacttgaggatttggctcagaacctctggctcacaaactgcttttgcatcctcaatgtttcctccttcctcaagcttttttagtgctgttctgatagcctgaagaaccaaaattttaaattcataactagagggttaagagaggccagatagggatcgggttcagatttttagcccacctggactgatccctctaccttccccatagtgattgtcttgtccacaacattccttgtggagtgtgtactcatagtagattgaattttgaatttctttaaaatagtacccatagttatttcttccgtagcttttttcatcactgccaagagcctattgacaaaagtagattacaatggaagaaatttactaataggccccaaacaacaaaaatacaaacctcctttgagagtcgttgtctaatgtaggaatttcacttcctggctccttggaggcaattgagtcagtcttattgtgcttgctatcaacaggaatcacgcgcccaggttttactggattaggttcctgggtataactaaacaacctctcacccagtgaaatcttgcttttaccagcatcacgggcttcttttactcccagcttgtttttgccagcttcacgggagtcttccatcatcttctgggatttttgtggaaccattttatgctttatggatggatcaatatccttacgtttcctcgaatgatctggtacggatgaaactaatccatgcttctttgtggagaaaccatcttttgaagaaggaaacgaacttctaaaggaattcttagaagcttttccacaagtatcttgtaaggcaggatccttaaccttaagtcttgctttatctcgtcccacatgtgattccagtatccttctttgctctttcacgaagaccttctgctcttccgtgaaaggaaacttaacatggtctctaactggtgtcagaagttcttcatctatctcatgttctctaggcaaggtatctcattcaaaataagtgtctcaaggtaaataattataaattcaaaatacaccatatatgaatcttactggcaatatatgagtacacggttgtgcaagagtccgtcccatgccctagttaatatatcctcgtcctcaatatcttcaaaagaaatttccctagaaaccaacaagacagttattcaaatagagttctgaaatagcaatagaaaatgaatgatgaatgaatgaaggtataccgcggtaggcattttctatggtaggactttggacaacgccggcaaacagcaaattgcaaattagagtctgtcttaacctctccgttttcacagacactgcatttgtgcaatgggcatgtatactctccagcaatgatttgtctttctagtgcttcagactcttctttatttcctaaacgtagccgtcttgtgacacagtgaggatggtaaaagtagccacaggtggctgacacgcattggaaaacctatgaacatgtttaaaacacaaagctcaaccaattacttgtcagtcaccattatcaacaaaacatgtctgaacagcattcaacattagagatcaataattgcatacctctgctgctccagaagagttatcagaagagccaaggttcttgcaaatgaagcattgatgtatcttatgctcacagtttgggcaaaagtatttctgaattgcctggaaaacaatccataaacagcattaacatagactccatgcctactcaagaaaaccaagacgcccagacatattcagaactaatgaaagaatcatatatgttacatacttccacttgcatcttgttaaagccaagagaatcacaaagtgaatcttcaccatcttttttggtagcatgaaatgatctcaggcagcttccttcacaactgcagaaagcagaacacaagacttatgcatctggaataataacagtgtatctttagaacctttgaaggcctcaattgcctcaaacgctgaatttgcgtttgcatgtttcacagtattaaaacattttcagtgtttcataaaatatttttgcaaatgccaaacgcaaacagaaggtacgcttgagtttcaaattagcaaaggaaattgttcaagacgctaaaggttgtagactatttgagaaaattcacactaaatgtaaaagcaaacgctggcataaacgcacacaaataatcaaggccttattctaataaagaaagtaaaaggtgtaagactaattatcagagataatcaaactacaagatcaatatccagcaaggaaacataccacaaaatctcgccaccattgtcacatattgcacaaacagactcaaaaaaatcatcgtcttcatcatccaattcatcttcatcggaagctacataagtgtcctcatctccaactatgaaatcatcttttgcattgtcctaataagtaataacaagttcgtatcagaaactaagaccgtgtgaaagtaagggaaaaaaagggaaacggcacattaggaaagagtactcaagtgggaaaaaagattcgaacctcgtcaggtaatctccttttggtaggcttttttgtgagaaatgcaagtataaactagtaacacaagaaagaaaaacagcacaaaattaggagagaatcagggtaagaaaatgatacatatacagaaaacattcaggccagaaagcgagctaaactcttgataacaaatatgggcatcacaagctctcaggaaacaaaagctacaacacctataagagatttaatggactcttctaattcaaaaatcccaaagaccagaaactctgaaaattctccatacaaaccttcgaattcgccaaatttctatctcttttcgcagcttcagcgattaaaccaatatgatccaccaaatcattctgcgatggcttcacatcatatgacctagaaacaacatccaatcactaaagttaaaaaccaaaagaatgaaaactcccagagagaagaacaaaagacctgaaaagcacaaatcaatcacctcaaacttctagttaatttctcccagagagctttctcggacgcttggggattcctcctaagaaactgaatggaatgcaacgtgaccaaaacagttctaatcaattccccatagcttttcctcggttcctcaagcttaatccatatattatccttcgtaagaacagaaatctcaggctggaagttcgaaagatcgtatctccaagccttaacaagcttatgcagaggcaaaaggccgttatcagatcttcctcgcaagtaaaaacctaaaccactaccatcaactttctcctccacgctccattgaattgggagacgagcaaacgaaacaggctctttatcatcatcttcgaaataataattggaagctgattgaggaacagagaagtcttcctcttcatcatcgtcaacgaacgtcattcaatcccaaaattcccttaaccctagagacgtttcaaaacacaaacgatcaaacgggacacaactttctcctaaaccctaaaagaaatagaaattcaaaactcgaattagggtttcgttttaggagacacaatgaacatgaattggacaatgaagaagacgaatagcctggacatttaaagtccttcaaagattggtacatccaaaaattgagaaattgagaaaacggaattgaagaagtaagcgaatgaattgattacgaagtagaagaagagaagtgataaaaacctatgagaattatcgtctctgtgtgttgatggagattatactatgacgcaattgaatcaaaagagagtaagaattgaggaaaaaaaaagagtaagaatcgtcgtcgtcattatttttttccaagtttatatactcgcgcacgtgtgcaagcaacgccgctgagattgtgtttttgttttttttttaaatatgacaaattcttaacataattcgttttttttagttcccttaaatttcgttctacaaatcttcagcataaaatacgaataagaccgagaatattatatccctctccttaattaatatttcgtatagatttctctatttagggtttttattggataactattattcgaagcaggtacgtttaaataacaagtcatgcaagaaagcatgcgcctggctcttgtagcacgtttggtctgcgatggcactgcaaagtgcaacgtgtgactggttcgacgctcgagccaggcatcagcagagagagagagagaagagcaagcaacaccaaacaacaaaaacaataagtcgataaatataaatcatttgaggtattcttaaatatctcttttttgtgttttagccgacaaaacgaatgcaaatcattccttttcagcacagttataattttaaatgacattattttatgaagataaaaaacaatgacattttaatgtttactccataaaatatttttatctttttatctttattgttattgtggtaacaaatatagtttttatttagtagtagtaacacaaacagaggtgatgtgaaaaaatattacaaagcaactctgttccggcaaagatagttcagtcttgttgctctattcgttagctgcttcctctgagatggaggtgatatctgacaaaatgtctgcgtcattgtcttcttctatcgttaggctcgagacttcattgtcttcttctatcgttaggcttgagacttcgccatttaaagaagagacttcgtcttcacccgtgacagatggagctggtgaagcatcagtgctcgtgcatgtgctagtgcatgtcgtcgtcgtgctatgagttgatgatgagtctgaactcgaacttgaactctctgacgatgatgattgttgttgaaggctccaatacattatacttgccgttaggattagtatcatcttttgattcacctgcaacaaaagacatttaaaaacatcagatttacattttgatgtatgttgttttcttgtttcggaagatttgattccgttctttacctccacgatatcttctggcaacaagaaaaccgagcaaccaagctttcttgctacgctgacaatgtatgtagcattcaatctcttctcatcgtctgttacaaagtttccatagcgaaaaaataacgattaaacaaattcagtttgaacagagaagagaaagagagtgaagaggttgtgagtgtagttagagagagtaaggacctgattcacccttggtgacaagattccagttaacaactcttggctcaaccgcccatagaagatcgaggaagaataatccgctcgatagacttttatcctattgaagtttagcaagacagattttgttcaacataagcttgttcagttgaactttttttttttgagttttgataaaagtaaaagatggaaccttgaagctttcgatctgcgatttccgccccatgattctgactttcctgttagcccagcttatgatttctgagtcggtcatgtcttttcctcgtgtccgagatcttagactcttgagaagttggagcatatgtgttctcatcaactgccataagaagcctgagacatgtatacacacctttagtgttatacaatttctaagactgttgagcatcttaacaaaataaacattttttagctagctaagaagagtaattaccgaggataagctttttatttccttgaacaatgtcatttccagctacatttacgagcgagaatctcatctctttcccaatcttcacgacttgattgcaattctctacttttctaaacggcatcttaattggtggttttgaagcctgcttccagttaactgagcctggatagaccttatcaacaacttccagaagaatccatctgcatcagaaatattcagtattgaaaaacttataatacgtttcaggaccaaaagattataaattattttgcataccaaatgcttacccgtttctaacatcttcaaacacattattgacgtaactctcaatcccgaggctgttaatccatagccggtaacatctttcgtctctgcaagtctgtaaatcctcagtcatcatctccgcaaaggagaatctaccatcagtgctaaggccattcctgcagcaggtacagagaagctagtgtgtaagaaaccagtacataagaaaatattctatctttagtgatcttttaccgacctttcatgaaatatctgtgccacaaatgctagattcaaatacgaagacccctcaactatctcctctgcagtcaaataccgtttgcagttcattctctctgcgtgttcgaggaccatgttagccctttcaagatcatcctctgcatttagagttgctggatcacaatgctctggtgcgagaacattaagcaggtaagcataggcctgtgcgtcctgcatagtcaacaatctcaaccatcaacattaagaaaaaataccaaacattttcataactaatgagtgatctgttgttttttctattcaaactgatattgcgtcagcgtgttggagaaaactacttgatgaagcttttgaagggacaaaaaagaagatttgctatttggaaataccttcagatccgatgaaaaatttccaacagtttttttgtaaccacctttcttgagatggaagttcatccatttgagcaagactttctctgggggtaatctcagaaattcttctatatcctgcaacagacagaaacttgttattaatatctacgacatgcttatagtttggtcagatattcacaaatagattagcagatcgttacctcgttgtcctccaccaactcaacaagctgaggcatcttctttaaactaagatcggcaagcagttgaatctgcagtttccagcattggttagtaaatcatcaagcacaaacacaagacagtgcacatagcaaacaagtatggacctttatgagttgtgagatcaatccaagcaccagatgaggctgcaaaaacaatgaaacatctgcagtcagaatcttctatattcgtctcaaccaatatattatgatatactgaaaagtgaaaactaagcaagtataacatactcgtccttcagccaggtcctgagtcccgatattaaccacactgcagccaacagcttttgcagagttaagacagagcgtgtgattctcatttctctcccatgggttaagtacccttttcgtgttgatcgctcgttcatctattgtcccaggaactgctatatttataagcttactgtgccaacaaaggaaaaagagagtacaagtcaaaatccagaaaccaaaatgtactaatgttgagactgaaatccaaaacacaaattttcacataagttcattaccataaaagcacaccatctttcacaagttcatacaaatcatttgaatccggatctaaaggaagaaattgcttcaaaaacgggtcatccccaagatatctattgatgtgaagaacaaaagaacccttctctgactggtttatggtatgaagagtcgtagtgccggctttaagaaatgaagatgaatgcttaagaccaccaccagctttatcagcagctttatctcgcaagtttagatatacctacacacattacacatcacattcatcaaaagagattcacaagaacaaacaaaacacaacacaacacagagaaagatcaaactaaccttgagaaacgattcgaaatcaagatcatcatcactttcataatcagaacccaaacctcccaagatttctttgatttctttctccttaaatgatgaactaagtgacttcaccttgaccaacacagatggaagatcctctaatgtaaccttaccactctgattcttcaacgcaacaaactaaaaaaccacaaatcaaaacaagcttctctttagattgcatccacggaagctaaaccaatgagaaagagagtaactttataccttggaattaagactccttagctcaacttgtgtaagctgactttgtaaccatggatccgaaacaataacacccacaaaaccagacatctcccccgttacaatccacggggaagataatcttcaaactcacaccaatgtaggaacttctccctgccaagaaagaatcagaaaaatcaaaactttgagataaaacgaaaagaaaccaattttatcgatcgaaagatttcattacttaaaatagcaatgttgttcttaactaatcaaaaaacattacagcaagattcaaacttttaacagttttccagatagattaggaaaaaagccggtgactttcgattacacaaaatccagaaatctaggagaataataaaaataaaacacaaaccccaatgtatcgaaatgagattcttctctgcttagaatcaataatccaaagttgttcaatgtgtatattttaatcgatgataatgtttctttcttccagaaaactaggaagcaagaatcgaaccacaatgtgaacgaagatgatacggcagagaaaagagaggatcgttatttgcttcgtgcgagagcaaacaaagagagagagagaaaacgagtttctggttgtgaaattgaatgcttaatcagaatcgcgagtagggttttgtttggttttatatactcgctgtctgatgacgacatgtggaagaaacagtggacctcacggtttaacgacttgtgtaggtgtcatttctaaatagagaagaagactacacaaaaaatttgtatgcttttggactcttaaatgtttttctatgtatttacttcgttagttcgttacataaatttaaaaatgacagtactaaccatatatagctgagttattttcggaagatatttgatattctcaagtgatatttattgcaaaataccctaatttttttgtttacttatttttttggaaatttagattttatgaacgaaacaaagatcttctccaccgacgttttaaatattttgctgatttgtttttaaaccccatgtgtggtacgcacgacggcctactatttaaattgtgacaataactataggtgatattgaatttaatatttttattagaacgcaaatctctctgtgtacaattcgaaagaaaatgtaaaaaagctttacacaataacacaatagttttagtcaaacaaaaattaatgtctactataaatcaactgtatggtaagatttccataacttttgccgtctaaatattttttaaagcaagatcataaaatattcaaatcatcgtttcaagatgttacagtattttgatctttttataacattttattgaaataaaagatattaatttgttgagaggtgcaaaacaacattaatatatttattttaaacaacataaatacaaaatcattaaaaaaccaatcttttatttaacaagtgataataaaacttttgaaacttgatgataattaccatattaaaagccaataattatcaaattcatgtcagtgctaatgatccatctaaatgatcaacaaggacaaaaccaacggcgccacaatggtcacgcaaagagtccaaaaaaatctttgtcattcaccgcccagaaactatggcatgcaaaacaactaagtctttctcacatttgtccctttcttcacgcatctcaactcaaaagcctcctgatcacatcacccacacttatctttacgttacgctcttaaattactactaactttcggttagcattttaacttgtttataaacaagctcatgatcatgagggggattcacaagtagagtctagagaaaagagagaatgggtaagaacaataccaaattccttatgcaatttgcaacttttgcaatggttttaacctttgcgatgatggtcaaagaagctacaagcatgtccatttgtgacatggacataaatgatatgcagaaatgtcgcccagccatcactggaaacaatcccccacctcccgtcaatgattgctgcgtagtggttcggaaagctaatttcgaatgcttatgcagatttaagttttatctcccaattttacgaattgatccatctaaagtcgtggctcttgtagctaaatgtggtgttacaacagtccctcgttcttgccaaggtattttcatgtgatttttgaatttgtagtaagatcttgagagtaattaatgacagagtgtaacgttttttattcgcgcagtttgaagaactaagctgaggacaaatctctctatggggctgcaaacatcgctggatcttgacaagatcttgtcttgcatctgaagttacaatgtttttatatttcgttaaaagtgaatttacaatgttttcaagtgttctgttccaaataaataacaaagttttaatgattagattcaccttgtgtatgtagaagaaccgtgtgctatacgttaatcaaaaaggttaagtactagttttttttgtcctcgagtatccaaaacctaactcaccatcatgcctttctccatgaagagaatcatactaagaaactgcgaaaaacagagaactgttcacgtgtcatggttataaaccataattcttggtaaaaatctgattgctaacttgtggtaatagaagataggcaacacaattcactagcagtggatagtgctacacaagctttctttagctcttttgaaattggtgacttgcataatacggaagcaaatcacaaaaccatagacttgtccttacatgacaagaagacagtgacttgacaaggacaaaacaaaatacaacgaccaaaagccatcggtgagaaaatatctcccatagttgtccccttttttgtacatttcaactcaaaagacgacttgactaaaaagacacgtgagtcgcttttaatagtttccacttagcattaacgttgctaaaaaataagctcattagatttaagggttttacaatagagttgagagagagagaagattaaaaaagagagaatgtgtaggaacaatatcctgatgcaatttgcagctcttgcgatggttttaacggctgcaataatggtgaaagaagctagaagcattcccatttgcaacatcgagacaaatgacttggtcaaatgtcatccagctttcactggaattgaaacaacccgccacctccgggacctgactgttgcgcattggtcagagccgctaatctacaatgcctttgcccgtacaagccttatctctccaggtttgggattgatccatctaaagtcaggcctctactaaccagatgtggtgtaaacactcctccctcctgtttctaaggtaaatatcatagtaaccgcaggattttgctgttcttttctgcaaagaaagaaaagtcttacgtttgttttgttgttccttgtgtaacacgcagattgaagaactgcgctgaacaaaggccgtatgccgcagctttgtctcgatctgatgaagtctcttaagttataatatgccttttcgtgtttaattcgaataaatcggcaactttgcaatatgataactgtattaacttttactctcaactttcaactttcgagtcttaagggaagacggaattatcatgggcttttaaaaggctttatgctacgaaacacactatcctcgtttaagcccatattgtatgatccaaataatattggtcagctatttgcctatttcccactttcagtcctcgagaaggaaaatgaagttgactgagaatactaacaatgtttttcctaatcttttactaggttttcttgtatttaaattagattcacaaatttttcactcgtaaacaaactccttcgaaggaatattaaaagtaaaataaaaaaataagaaataaaagaattgcaatgaaaaagagttggttagaaataaacccaacaataaaaacttttattgagatgtgcattgtgcagtatgtaacagagcacgcctttttcaaaacacacgttttcgggaaatgtatatatgagaaactaacacctatacaatagggaaagaaaataagctgcaaaaaccgatttagccatattcgtataatatagctaataatattgtatgacaaaggagaatttaaattttagtgtcgtcctctttcacttgtatctccttttgattcatggagattccattccatagctaagcaagcgctttgtaattgggaggctttatcccctgctcacctgttttaagttttaatggaatttctaatggtttcgacaaaaagaaaatgtatatattgtatgacaaaggagactttaaattttaatgtgatcctcttttacttgtatttacgtcacaactgtacaagtgtcagtcgcaacatttataagtgtaaagtgatgctcactctttttttcttttcccagatcatcattactagtagactagtacgtagcctatcccttccagctgtttaagaaaagaataaaaatctttcgaaatatagaatttgtaaaaacgataaacttatatttgtacgtctttcatttcactcaattaatgttgttgttgaagatatggtaaactttctagaatttcaaagttttattagagcatcattaacaatgagttcttaaaaagttttaaaaatctcttaaaatattatataaaataaaatataaataaaaaatagaaaagggttcttaaaaatataaaattggtttttaattaagagatttttgatatactctctcttcttattaaaatcccttaatatttaattattattttgaacatcataaatgttaagaattttactaagaacccatcaagaaggatgatcttagtaatctatatatatatatttttgcagccattttgtgaaataaatcatagagttgagacttatttacaatggctgccattgactattaattattgatttttttccagcaataaattgattaacaaattaaaaatattctaaatatattcggcaactatttaaaacaaaaaatgtttgacaaacaaaaatataattgcaatcccttaaaatgagcaaaacccacctaaatatattctttatttatccaataaatttttttctccaaaatttgaactagattttgacaactattttaaacaaatatttgtttgataaaccaaaatacaattgcaatcccgtaaaatatttattttaattatatatttaaattagcggtgtaccgcggtttttttttacgggacggatttggcgagacgggtttggtaggacgttacttaataacaattgtaaactataaaataaaaataaatagatttaatttgcaaacttttatatatactaacttaaaaaataagttgtccccgcgatataccgcgggttaaaatctagttggtaatgtgtaagtacatagattatacgatttggtttggagaaagaccgtatacaaccaacatagttaattaagctataattagagtataaatagaggttaaccattagttatataccccataaaacttttagtctgatatcataaactatatattcatttctttttactttttggtcaaattaatatacaactaattaagtatatcattcaaataaaagtaaaacaagattcgaaaaccaaggttattggaaggagatggttaaaagaaacatagatataccatgctattatctttataaattataacacctgaataaatagattaccagttatggttcctgtctagtaaaaggtaaaggtttcccgcagtggaaatagatgttgatccagtaatcagagattgatataagaaaggcggtttgtatcttctaatcaaagagaaaaatcataatagaaaatcagagaaacatgagaattgagaagaatatcaaagtctttgagtggtgtggctaaaaccaccgtttctaagtctaagggacatgccatggcatcaagccagtggtactctccagttcctctttcgcaggatgatgatcttgaagaagaagaagatgagaaagaagaagaagaagtagaagaagaagaagaagaagaagaagaagaagaagacgaagaaggtgaatggtcgctcaagaagaaggtgtacgttgctttccccaagagcttcggcggtggctttttggtcgataggaagaaggagaccaagatatccacggtggacaagtcttcttttgggcaagggacccacatggactacgttgactatggaacaagcagtgggaaaagcaacgagcaaaacaccatcaaggaagaggagaacaaaatacctgagtatggtggttgcaacggttgcccaggatgcattcgatgcggatgtcgaggatgtagcggtggctgccgtttttgccccggttgctgtgcgtgccagtactaatttaaaagaaattcaccgtaacctaattatcattctgttgtagttttaaattattgttttttacttttcttttgtcttaaatgtatttttttcgcttttgtttcttgtgttatttagtactagtattgtgtaatgttaatttgcattatactattactcctctaaataatcttctgacacaaacaattaaatttaaaaaacattataacaaagtcaaaacaacatagtcataatggtcttttaaacaatgtaatatttcaaacaacaaatcaatttaaacataagcctttccaaatgggcctgacgaactgaagcgcgtggccggtatgtagttgggttctgcggaaaaaatgagaactacatatgaaagctttccatttctggggatttcgcatctcgagttcattgagggaaatggaaagaagaaaaaaacaatctttggaaagttttctaattataagagagaagagcaattagggtttttttggacgtaggaacgagaaaaaaaatatataaatatggctctgttcttcagccgaatctcaaagctttctgtaagatactatctttgttcctatgtcatacagtactttctttgattcttggttactaagtccgatgtttggttcatggaaattgacagggacgcaggaacaatgctcgtttcttctcatcattgcctccgtccccatgcttggtgctgaccactaagaagttgcgagggtctccagaggagggcctaatcgtgcatcacaagttattcgaaccggctacggaaaaaaaagtgtacggcaatgagaagaagtatcccaaagagcttcatggagctccgcttctgggagcatcgaaaggttgggtcgcttttttcaaggagaaagacattagtgtgcatctcacggatctgtacaagccttgtgtctcatctccaagagtcatatcattaccatcactcaagctcgactataaacccgcaactcatgccacggaagtgtgtctctcttcgtctgatcctgtccaagacgactattacgtggctgcaaagttcaatgactatcacgtaagtgtatgtaggcctcgttgggactctgactggactcacaacgagaccggttacagtcttttaccagcctctgagctcatgtactccaagagagacaaagccttccactttacgagttttaagggtctctacatgggttctctgtatctcagtaaaaaagacgagatcaagtataaagagatacgccttagaaacctgcctaagattccagaggcaggttgggagatgttggataaatgttccatgaccaatcacttagtggattctccctctggtgaacttttcttcatcaagtggtacgtatttatttaagattgttcgctacttttactcaatcaaagcagagtagagagatattgagctacttgtttctctgtctaggtacacacagtgtattcacaaagaggacgaagatggggatttggaatgtctccacagcaaaactaagcggttcatggtctttaggcaagatgggatgagcaaagactttggttacactgaagatattggagatctctgcatcttccttggcaagagtgaagccttctgtgtcacggcaagtttgtacccagggctcaaacctaactccatctattaccttggccctagatttggttcttacgatctagcttctggtacaaacagttccttcacgttcgatcgctttggtaaaccctcgcttgttgtcccttactggatccattcgacatcttctctgagctctagctagtatctgggcctgccttgtgcttttgtgtctaatattgttcttttctggatccttgtacttgttagggttagggtttgggtttgggtttgtgtgtgatttgaagatttgaatttaataatttatttatgaacgttattatgtatgccacaaggcctggaataatccagaggtgcttcttaagttccaacgactcataaattccttagatcgtttcattttcaatgacttgttcttacgtgacaagaagacagtctcttgatattcttacacagaaaactacacgacttgacaaggacaaaacaagataaaacgaccaaaagccattagtcacgcaaaaggaacaagctctgtaatttaccaactggagactaaaagtctaccacatttgtctgtttgttacaatttaactcaaaagacgaccgacttggctaaaaatacccgtgagtctaccttgtactagctctcacttctcattaatctttccttgtataataagctcattacatgtaagagtttcacatatcacaacagagttgagtgagaaagaataagggattagaaaaagagagaatgggtaaggacaacaccagaatcctcatgcaattttcagctctcgcgatggttttaacagctgcaataatggtgaaagaagctacaagcattcccgtttgcaacattgacacaaacgacttggcgaaatgccgtccagccgtcactggaaacaaccctccaccaccgggaccggactgctgcgcagtggccagagttgctaatctacaatgcctctgcccgtacaagccttatctccccactgtcgggatagacccatctagagtcaggcctcttcttgccaattgtggtgtaaacagtccttcctgtttctaaggtaaaaaatcaaagtaacctcaggattttctcacttgtttatgtaaagagagaaaatcttacgtttgttttgttgttccttctgtaacacgcagcatgaagaactgagctgaagtcaggcccagtctcccacagactttgtcttgccctgaagtctctaagctataaatatgtcttttgctgttctgattcgcataaatatcaactttgcagtgatttttcagtcaccttatctattatatagatgaaccatgttctactattaatgaaatgaaataaagtacttgtttttttgctaactccattgtgtactactttcttgagtatttaaaaattgactccttatgtatcttccgtgcaaagaacccaaatcataatattaagagatgtaaaatacatttgacaaataacaaaataactaggcatttgtagttgacaatatttgaaagtgactacacaatatgatagcatcttaacattactttttagatctaatgttgtcttaatccattactagtaatgtcgaaatgtactctgtttctcacatttttattaaattttcatttatgaaaagagagagatagagcaaaaaaaaagccaataagtctcccacatgtctctttgcaacttgcagatatttcaactcaaaagacgacttgacttgacttaaggtccatatcatacttatggttgaaccaagaaaaaaaaagagacgactagactagtagaagactaatgagtctgcaacccataccatacgctcaatctaacttgtataataagctcattagatttaaggatcatatggaatagtcaagagagaatggatacgaacaataccagaactgtgaaatttgcagctcttgcaatagttttagccgccttggtgttgatggaagaacctacgagcattaccgcatgtaacatcaacgcaaaccatctggaaaaatgtcgtccagccgtaattggagacaacccgccatctccaatcaaagagtgttgtgaactcctccaagccgctaatctgaaatgcatctgcagattcaagtctgttctccccgttttagcggtttacccatctaaagtccaggctcttctgagcaaatgtggcctgacaacaatccctcctgcttgccaaggtaaaatcaaaataccattaagatactaaaaaccggtagactagtaggatcccaatatgaagtatgaagtaaaaaaggcttacgttttgctgttctgtaagtgcagctttgaggaactgagatggagacagaccgttctagcagacttcactcgaacttgtcctgcaactgatctgaagtcttacaatatgtcttatgttccgatccaaataaattacaaactcgcagtaataatcgcagcttgtgtatatagaagaaccttgttgtatacatttaacaaaaactttaagaaactgttttagctaaaccaactatcctactttcttgactataaaaaaaactaactcatcatgatttccccgcggagaacccggatcaattctgcaacacaaaaagagagaattgttcgcttatcatgatgaatattgtaggcacctcttcccggatgtacttattaattccggttacacattattgatcaagtgaggtgcgtttgctgcaaaatgtataaatttgtgtggtaataatggagggtatacctagcattctggttggttttctcgacgaggtccaccgaagataggcctcatgtatgtgtcgtcaaactttctccagtagcggtggatggtgtacacaggttgttccatcagaagggaaatactatctttagctctattgaagttggtggaagcagactcgtcaaaggaaagaagaggaagtgtcgcatcttctttcggagaacctggctcagtgcgtttacctctatttccggtgttgtgacttgcatcttgaggaaggagataattcacaagtggttttgtgaggaaaccaaagacctgtttgttacatgacaaagaagtcattcttttgatcttaacacagaaaactaccagaaccagtagggccatatactaaggtagtatttgttttaccagtgtagtaaagagaacaacgatagtggtgttggtgaccatggcagcattcacaggatccaatgtaacaccggagtatgtgaacttggcacatgaaagatataccaaaatgagatataatggaaatgttactaattcaatgtaaaagtaatacaatagagattagagataatatgaatgtgcaaagagaaaaacctgcttgaaagccagagcaattgagacagcacctcgcattagacctgcccaccaaatgatcacctataaagtatacaaagagagaattatataacagaaactttcccattctcggaccattattaattttttattttagtgcttctgataatgtaactgtaacaaacaagagctaaacctgatgcttaaatgtgatagactcgtttctttcagtgtgcctgttcatgaaatttgttaagaccgagagtggaaagacaaatgctgctcgtccaagcaatactaatgcggttatgacaccggagacacccagagtacccccaaagctgcaagaagatgattaatgttacaagtcttcattgggaagagatttcagaaacaacgagtcaccaccacagcttaactaacagttaattggcgattaacttcgtgtcaagagagaagaagacatagaggatgtctttgggataatcttgattctaggtatgcatttaagaaatacacgaggttcatatcaaaatgctgtgtattgttttgacaaaacactctaaacgctctaccagctgataaatggatacgactttataccttaagctgcttgtcttccactttgtaaaatcaagagcatctgttccaacatacagaaatatgaatgtctccgcaataaaggacaacattgcaaatacatgcctgcaaaatatagatgcacagtcagacaaaagcaattcctgcaaattgagacttcagcgaataaacaattgtctgatacattgcctggaagtgattcttgagctctctgtcacgttatatgatgcataatgcgacattaaaacaccacagaagaaaacagtaagaattccacttaatgagaagagctgcaagagaacaactatattgagttaaaacagagaaatgcagcacttcaattccaaatgaaaactaaaaagtagcgttcatgaccagtgtattacctcagccaacatatatgaaaggtaagccattagaaccatgatggcgagttcgcgtgtagtagaatgtctgtcagcaaccatataacaagatcaatataaaggcacatcttatcactaaaaaaaaaaaacttaagcttgagatgaaaaatttgcaagtttggtgtacttttaccttccaaaatacaaggttttaagaacaaaagatgttattagccccacctgcaagacattcacagttctaagattactcatgatatgcttcaaacagagtaaaaaactatgccaactcaatagcttacaccaattccgagaagtgtgcttgttgagaagaggtacaaaaagttcccaaatacttgcagcgccgtccaaccggttaggctttcaaattgaatcttttgcacggcgttgaacagtacaactgaggttgcatcattcaccactccttctccaaagactaagctgtatagcaatggtgtttcatcttgatggagaatctgtaaaagtttaagatgcaatgtaagaaaaaacttttaatagaagaagtagtaagacaaagaatcttctaaatcaagaacctgtagagtgcaaacagtatcagttgatgagaaaatcgttcctatggctgaatcaaaacaagaaagcattcactctcgcaaactgataagtaataaccatctcaacaagaaatgaaaagaaacatagatcagtgaaaaatcttaccaagatagtctctagcactcaaccccttaaatcccaacttgggaaacagccaccaagtccctggttcacattataaaaacaacaaaaatagagatggtaacaactccgagataatcaactttaaatcatatagtcaagtcattcaaagattaatgaaatattttttaccaaacgagataatgacagtggagatgaaaactccaatcacaccaaaggacatgatggttaaaaagttgtgaaaaaacttctttttcttaacttggaacctgccacaacaaaccaaaaaatcttcagtcaatcaccatcatagtgtaatctaacccattaaccacaacatagtaaccaaaaccatagtaagcttacccagcattgaagattattggaggaagaaggtaaatgaagaagagttcttcatcaaacaccaaaatatgtgaactttttcctttactaataagtaagatcactgttcctgatgctgctccctacttgcaacaaaaccaatcaaaaatagtgataaaattgttctttaagagcagaaaagctcaaaactttagctaaaacaaaaaaaagaagaaattttgaagaaaattactactaaaatggcggtaatagattcattaacccatcgattctcttcaagcaagtggccgataactaaacatagacagagaatggcgatgaacactgagattggtatcacctgaggatgctcagctgctagtttattcgtcacaaactctgttaatccgatactcatttttcactcgataatgttttcgatttcgtcgattttgaaaacaccaatcgcaaacgaagaaggcacacagagaacgatagagagagagacgaggaaagagtcagagagtgaggagagatttgaactgcgatgaacaaggcggtggttacaggtggcgaggagacgaaagacacgtggcatgtttccaacgtcatcagactgagtaaacgtgaggctttttggaattgtactgcatcttgggcctttttagggcccaaaactaactcatcatgtatttttttcttaccggatttggggatttttttcttttttcttttttgggtctaactaactcgcgtaaattgttgttctttttccttaatttatttttacctcttgttctttattctgtttatataaaattatgaaacttgaaaactcaatatttattacaacgaattatttggtgaagactcgaaccaatcgaaataaaacactctactgagtaacggtcccggttgcaacagccaagacgctagaacgtgatcgtttcgtttggtcgtgttttgatgacgtaaaaagtgactcagcgacctatttcaccacgtgtaatctttaacgaccatgttctaggacctacctgacttttaatcgatcatccaccaccgccttctcaacattttttaagatactagtatcattatagctataatataaattaagaaacttgtaaatattataattaacgtgaaaacatagaattcggatatataatgtgtatattagataaataataaatctgctcatatgtgatatgtatatgcatatatcatatatgtaaatgtagccattattggaatgcgtattgggtaatgggtagtatcactagaatgatacaatttttcttatatacagagaagagaagaggaaacaagaaaaacaaatacgttccccgcagtagactttttatttgttggtaccgtagaggaaaacagatatacaccaattactataggagtgattaagggagaaattgcagggatataattgatatctaatagccgtttctacactaatcctaattataacaagaccaatgattgacacatgtatattgcaattgcatgcattatatagtttattattatgcttgcttatagtttagctggttttggaaacaagtaggtagtaataaagaaaaacaaagagagagtaggtcgtaataaatgaagaacgcataactataaaaaataaatacacaaatatatgtaaaacaattgtttggtttctctaggttggagacaaccaatcaaaaaattatattctaatttaaaataaaacttatttagttatcccatgaaaattaaactcttgtattctcaaaaaaaaattgagtcaaaattacactcccaatattttctgtctgcaataaagatatggagacacattgaaaaacattttagtttatttatgaaaaaccaaaaaaataaaattttagttgatgttttctttttaaagtggaaaaatgtgtcaaaaacaaaaagtcgaagttcttttgttttcccttttaaaataatcaacgatcatataaattcgaatcccacaaaccaaaaagctctctctctctctctctctctctctctctctgagtaaatctcagtttttggtcgaagttggtgaagtcgccgccgggacaactcaggttgttacagatgataaacatgcgagataatccaacaatgcatgtcttacaagcttcaaagtttctatttttagctcttattttgatccagttgctgtctactcaactctttgctcaaagatctaaaagtccatggcaaacactcactggttagtgtcttctatctccttcttctcctatttattcaatacccttcactgttaatcaataaatcagtagaaaagttgcttccttttgaatcgtttcatagaaatcaaagagaaaaatttgggggttttctgagtttcatccaaagaaaaatcgaagctttcttataggtttcatcggattttgtttccatttttgtaggagatgctccccttgtcattgctcgtggtgggttttctgggttgttgccagattcaagtctcgatgcttacagttttgtatcgcagactagtgttcctggtgctgttctttggtgtgatgtgcaactaacgaaagatgcaattggactttgcttccctgatgtgaagatgatgaatgcttccaatattcaagatgtttaccctaaacggaaaacttcttacttgcttaatggagtccctactcaggattggttcaccattgatttcaacttcaaggatctgacaaaagttatctgtaagttcacgcgtctttttgagctttagtatacattctaatttattggactagtggatactagttgtagaaagatcttatgttaattagtttatctatgttttaggggtaatttgtctgtgacatttgatcaaattgagtaaattttagtattgttagatttgattgctgctgttcattgaggtgtaacttgcttgaatcttcttcatacaaatcattctcatagtgaaacaaggaatattatcacggtcagcggcattcgatggaaacagttacgggatatcgacagttaaagatatatctacgcagttaaaacctgagggtttttggttaaatgttcaggtagctcttttgtcagtaagtttcttgttgttttccattttttgttgcagtgaaagctcactctaatacggctgttctttattcagcacgacgcattctatgctcaacataatctgagcatgagcagctttctgctatcaatttccaagactgtgattattgactatctctcttcccctgaggtgaatttctttcggaacattggtaggcgttttggacgcaatgggccaaagtttgtgttccggtttcttgaaaaagatgatgttgaggtgtcaaccaaccaaacctatggatctcttgcgggaaacctaacattcctcaagacttttgcttcaggagttcttgttcccaagtcttacatatggccaatcgaaagccaatacttgcttccccgtacatcttttgttcaagatgctcacaaagcaggattagaagtatatgcatcaggttttggaaacgattttgatcttgcatacaactacagttttgatccattggccgagtacttatctttcatggacaatggagatttctccgtggatggcttgctttctgatttcccactaacagcatcttcagctgttggtaagtaaatctcttcttctgtatcacatatactgctatagaaactacaactacacaagtaaaaccatttttcacttttcctttaaacttttcttgttcctcagactgcttctcccatcttggaagtaatgcttcatcacaaggtatttgagctattcatatgcgttttactggccacattattgatgccatggcacaataataactaacggtagatttttttaatcttctgtttggttcatgtcacagtggattttcttgttatatccaaaaatggagcaagtggagactaccctggctgtactgacttggcctatacaaaggctatcaaagatggtgctgatgttatcgattgttctcttcaaatgtcatcagacgggattccgttttgcttaagttcaataaatcttggggagagcacgaacgttgtccaaagtcctttcagaaaccgttctacaactgttcctgagatcggctcacttcctggaatatacagctttagtctggcatggtctgagattcagaccttgagacgtaagttttacccatattctcttaaaactgtcttctccgtatggcattcttactctaggcagtgtgttgtgctggtagatccttgttcttacgataactgagttagctgcacgatggttctttcacggtgtccacggcaaatactaattctagttatttagaggctaccaatagatgcaaaatatcgttctgttgcaactttatctgtcccttgataatgaaaaagtaatctttctgttgatgtaatccatctcaaaaccggtttttatctgttttaagtgtcattgattatgtttcccccccccccccccccatctttttgcagctgctattgaaaacccctacagcagggaattcactatgtttaggaatccaagggagagaagttccgggaagtttgtttcactttctgatttcttgaacttggcaaaaaactccagctctctcaccggtgttttgatcagcgtggaggtgagttgtataatcacttttagacttttatcggtcattagaataaaagtgatcttcgtcatttcttttgatggttaaaacgagtatgatttgtttccttcagaatgcaacatatctgagagagaagcaagggctcgatgctgttaaggcagttctcgatacactcacagaagctggttacagcaacaagacaacaaccacaagggttatgattcagtcaactaacagctcagtcttaattgacttcaagaaacagagccggtatgagacagtgtacaaagtcgaagaaaccatccgcgacattctcgacactgcaatcgaagacattaagaaatttgcggatgctgttgtcattagtaaaaaatcagtcttccccaccagcgaaagtttcaccactggacaaactaaactagtggagaggctgcagaagtttcagctccccgtttacgttgaagtgttccgaaatgagtttgtttctcaaccatgggatttcttcgctgatgcaactgtcgagataaactcgcatgttactggagctggtatcaatggaaccatcactgagttccctctcacagccgcgagatacaaaagtaaagtgaaaaccaaaagaatgtctttaaagcttttctgttttcataacattttagagtttttgactgtttttttttgttgttccttctcagggaactcgtgcttgacccgcaaagacgtgcctccttacatgatcccagttcagcccgctggcctcttaaccatcgtgagtcctgcttcgttacctccagccgaagcaccaagcccagttttcacagatgctgatgtcactgaaccaccattacctccagtctcagccagagccccaaccaccacccctggacctcaatcaacaggtgaaaagtctcccaacggacaaacccgagtcgctctatctcttcttctctctgcattcgctacggttttcgcctctcttctacttctgtgatcacattgatccgatcacccgcgcctgtaggatttcattgtgagattgatcgagtcctcagggaattttttttccttctaacagttcttgggattctttgcagtgatgagtttcttgtctgttcatattattcgttgtcttttgtagaatttctggccaaagaggtaaaattcttggacgtaaatttgtatcattgttgtaacattattcactgtaatgttctatttaaactcttgtcttgtgtgtacgtacttgtaacattatgattgttctttgaatattgttgtctaatcgtaaagattgggcttttaatacaggctacttatggatccaaattaactaaaatgggctttagtttaaagcccaagtacgtgataattcaacaaacttgacaactttctcgagatgattcagatctgtcgatgaagctcttgtctggactgggtttaacaacgaagacagagatcttgtggggatgtttcttcgtgatcattggttctgtttccttcttcggattcgtcattgcagtcgtgtcgtcgaatgataggcactattgcttcttgattccattgactctaccagttataatggttgctgtctactttcattggcttagcatgaagctcttcaagcatgcttgatatatccatcgatcaccattttaaggatctattgtgagtttcaatttcactctctcttgacaattcattactgtacgtaacagaaaagctatggatgtggatttcttgattaaattgagacaactttgttatcaaagtagatttgtttaactttagtgattactgcaaaattatgtagatgaagagcttgtattacacgtagtgacttgttactctcaattaaatcttccaaagcatatggttacattattgcaaaaactatagcatataattatagttttgatccagatacaatgtgaagtttccctaagatacatatatgactaatgtagtttcgactttgagtgaaaaactttggtggctatcgtggacggaaattatacaatcttctagtcaatgatgaagtagtaaccggattgtctttgatcagtagtgggattttgtaatcaggatctgcaagattgtcatcatcatcagttaaatctgtatcaacccaagatgtccaatctacctcgctctctgtatcttcatcgtacgagagctctttcttgctttgcatgtcattcactttatcaactaatcttagcaagatttgatggtttagtacttcatagtccctgcatttttagacaagagaggatatatgttcaattgttcatcattttctgagtttgttttggttaatcaaaacattatagtatattttggttatacctgtatgacaaagcagcatgtagaagctgagctgaagcaagaagagcaaataaagacctgataaggtttatcatccatgcttggcgttctgtatcattcacgtatcgtaaactcgccacttctaatgccagagtaacgcacaaacctgcgtttgtataaaggaaaatgtttgttaaactaatggaatctagtgttacgaatattgtgtgaaatagggattttggaatatggtcacttaccaatgtaaagccttggccttatgatataagtttgttttgtgcttgtaaacatgtagatgacaaagattgacaagaagtagatgacaaaggcttttatcactcgcgactcgagaagcatcgcattgtgcaaagcaaacagcttatccaaagctacaaacatgtttgcttgtttagcctcaaacgctacctgcaaaaacagattgttatatattgattttatgtgacatttgcttgtacagcttttgaatatttgttaagatttgggaggactgacctgggcttccaacattgattttgaattttcaaacaagtgatcatgaacctcctgaagcttttcttgccgctttgcaagatcttcttgttgctcctgactaaattctttcaaacgttgcaatgtattcctacaaagttgcagggaaaacagaacacaattagctcttggagaaaagtgtcttgcctttgaatttaaactgataaaatgtgtatttgaaacttacctactctcttgcagtgcctcagactgaaaccgggtaagaaactgaataccgtcaagagccacggtttggccgtctaaaagcttctgttgtttatccaacgaactacgagtctttgttccgatgtcatcggttgtactctgcaaatctatcattttggttgataggttatttccaagtacacttatttccacctcaatctgctctgtatcactcttcaacttatctactccttcttggatgttagtatacgcatcgaggaacatgtccattccatctttcaacgtttctttcatctttacttgaccgtccctgagagctagctgtgattctgcaatgttcttctgttcttgagagatttctactgtttgttgagataatccactcacactagtttctaaggtgtttgtcacactagccacgttttgaacccgaacatctagtgaccctaaagaatcatgaatcatgcttgaggtctgtattaaagcatcagatttactctccaagatatccaatttatcttctgtatactgagctgtattcttgagctcattcacaagcctctctatctcatttttgaacgcattactcctgccataccaaaaagaagcaaattgagaatccattttggcaaacaaaagtaataacagctagaaaaatattcatggtaaattgtttttcttactgtaattgttggcagatggtgttggtttcaagcaagaaatcgagatagatcttatgctcatgatcatcaagcttcttgaggcaactcatcattactgattcatctttacaggttggaaacgccggtcttcccgagtctttgatgaagcaatcgctcaaataccaagcaaatctctttctcttttcttctgtagcaatcgtttctttgcagccagccaagaggtaactataagcattttgccagcaactggttagaccaacaagcttgttttcaaggacttgaaccgccttctgatcactgaaaacttccatggagaagtcggggttggatttgcgagaccgagaaaaagaagaagagtatggatcttctgctgaggaagaagaagaagagaaccatccccaactgtggcatgttaatggagaatctaaaagtatgatcaatagaagaaacagaagacattttctgctgaaacgatccatttaatcggatttgagatcttcttcttctcgaggagccttgtgattgatcacctacgaacaaacaaaagagacagaacattacattctgagaatgttgttgtttatataacagaaaacttggagcgcaagaaaaggaagccccttgaacttccaattagataaatggaagttttttctttttttggtatcatcgtcataaataaagttcataaagtttataaaaaaaaagattattggcaaatcaagttgcagatttaaaaagaagaaaataaatctcattaaaatcttcagaaaacaatctttctaaaataaggaagaatctgtatccactttgtttttcgttttctgagattaatacatgcatttgaagtcgtatcaataaagataaaccaaaaaccattattactaagaaacaatatcgaaaaatagtctgaaaaaatcacagaaaaaagtacaatccaaattttatcgtaaaagagaacaagaaaattacacgacaaggttaacttcaagatcgatattgggagaaaaacatataagaacaaaaaaaaaactaaaaatagttatatgacttcgaatcagagaagaatctctacgtttttgtcagtcaatttcataacagagaggcaaaacaaactaaagtaccaaaaataaacacgaaaaacaatttcaattctaaagaataattttctcaaaaaaatatttgcatgaatgaatgatgaatctaaacaaaacacttactttaacataagtttcaaaccaataaattaaagaatgagaatacagtgatacaaaaaaaaaacacaaagcttaccagaaaacagaagaattggagattgtttttgagtcggtgattatgaggaaagtgagaaatgcaaattataaagtaacgaacgtgtttgacaaaaagatggaaacgtttcgggaacgtttggtttacttcccggtttaatttgattttggttatgtgattaatttattttcggttcggtttaattgtatttggttcattggtataagaattttttagtcaaaagcaaaatgccaaacaatacacagagaggaatgatggaatcttcagctttaataaatctgcagactctcaaaattccgattcatcttattgaagaacaattttccggcgaaacagccgatgaagtctcgcctgaatcttctgtacctttcaccggcgattgacttcacttcagaatcgagagagaagaaatcgatggaaaactaaaaatagaaagagtttcaaattctcgctctctcttcaaaaccgcaaatcaagggaacgagagacgagagagagagatgagtaaacggaatccgaagattctgaagatttttctgtatatgttacttctcaactctctctttctcatcatctacttcgtttttcactcatcgtcgttttcaccggagcagtcacagcctcctcatatataccacgtttcagtgaataaccaatcggcgattcagaaaccgtggccgatcttaccttcttacctcccatggacgccgccgcagaggaatctaccaactggctcctgcgaaggttacttcgggaatggatttacaaagagagttgacttccttaagccgaggattggaggaggaggagaaggaagctggttccgatgtttttacagtgagacattacagagttcgatttgtgaaggaaggaatctgagaatggttccggatcggattgttatgtcgagaggaggtgagaagttagaggaagttatggggaggaaagaggaggaggagcttcctgcgtttcgacaaggtgcgtttgaggtagcggaagaggtttcttcacggttaggttttaagagacaccgtcgttttggtggaggagaaggaggtagtgcggtttctcggcggctggtgaatgatgagatgttgaatgaatatatgcaagaaggtggaattgatagacatacaatgagagatttggttgcttcgattcgtgctgttgataccaatgatttcgtttgtgaagaggtttgtgcattttactcattgatctggtggatttgaagattgtgttttggtgaaaagattgcataattggagacttttcattcaacatatgcagcaatgaatcactgattttgagctttacattgttcatattaattaggttgtggttgtgtgagattcttggaagactatgtagttatgtgtggtggttatatcttgttggtttgatgtttggtttgctttttgtttggctgcagtgggtggaggaaccgaccttgcttgtcactagattcgagtacgcaaatctcttccatactgtgacagattggtatagtgcctatgtttcgtctagagtcaccggtttgcctaatcgacctcacgttgttttcgttgacggacactgcacggtatgctcctcttcttgttcatggtcatgatccttatatgagcagggaaagtccagtttagacttgtagttagttactcttcgttataggatttggatttcttgcgtgtttatggttttagtttccctcctttgatgaataaaattgaatcttgtatgagtttcatatccatgttgtgaatctttttgcagacgcagctagaagaaacatggacagctttgttttccggaatcagatacgcaaagaacttcaccaaaccggtttgtttccgccacgcgattctttcaccattgggatacgaaaccgctctttttaaaggcttgtccggagaaatagactgcaagggagattcagctcacaatctgtggcaaaacccggacgataaaaggactgcgaggatatcagagtttggtgaaatgatcagagcagctttcgggttgcctgtcaatagacaccgctcattagaaaagccgctatcatcatcatcatcatcagcctcagtttataatgttctttttgtccgccgtgaagattacttagcccatcctcgtcatggcggtaaagtccagtctcggctcatcaatgaggaagaagtgttcgactcgttgcatcattgggttgcaactgggtccaccggtctgaccaaatgcgggattaaccttgtgaatggcttgcttgcacacatgtcaatgaaagatcaagtccgagccattcaagatgcttcagtgatcataggagctcatggagcaggactgactcacattgtctctgcaacaccaaacacaacgatatttgagataataagcgtcgagtttcagagacctcatttcgagcttatagctaagtggaaaggattggagtatcacgcgatgcatctggcgaactcacgagcggaaccaacggctgtgattgagaagttaacggagatcatgaagagccttggctgctaaagacaaaagaaaaaacaagaatttaggatagtgagtgagttctaatctccggtgaccggtgagtttgtcatattttgataccttgtatttttgtatcattttttcgatttggttaatgatgtaaatttggcttttattttttgtactaaacatgatttctaatggttatcttatctattattattttacaattcctttttaaaaggaaaatgccaaaatggtatttgcatagtggatgaacaaaggtgataatgtatatgtcaaaacagagactttccctgacgtgtttcttctagtaaataaaatagtagctgtcgaaagaaaaaatcaataaagaggacaataaaaataatggagatgcggggtatcgatccccgtacctctcgcatgctaagcgagcgctctaccatctgagctacatccccatatgtgtactgattcaatttagttttatataaatcagatttataaaaaacaaattcaacgaaacatttattgccaagaaaaagagcgacgtaaaatttaatttgagacaaattggaaatttcattttctactcatatttcattaatctaaatatctaatatgtataattcaaaccgatttaccttagtaaagatataataattgaaaattctttaacttaaagtaggatcaacgactcacacgatcgcagtatatcattgaaaactcgagatgtgattaaactttattaatgatgaaaattataattttttaaaaaaatggtataagctacaaaaatcacttcaaccaaatcaataccaattgtaatactacaacgcggctgtataaaaaaaaaaaaaacgtcggaatcttcaaactgacgtcgtttgaaaccaaatcatcttcacaaaatccgacactgtggctcgccggtaacgccgtctcgcgtcggtaactgcggcggcgaagaataccacatttccggtacgtaataaggataataataatacggatacgtcgcaggaggttgttgttgttcagtatacggaaattgttggtagttcatatactgagacatcggagacattggcgccgacacctgttgatacatcggcgaatattgttgccacggtggcagaaagttttgaggaggaggaggagtaacgtgaccataatccatgtggattaattgagcatgtttcttagctttacgaatcctcagaataatctcagggctgatcttgcctgagagataagctaatcctttcgtcgcatcgattgtgtatgttacatctgttcaaaatcattacaaaacataacaacattgttctaatgcgcaagatttaaataaaaatgagaaaaaaaaaaataccatgaatgcctttaaaaatcttatgcatagatttgtcccatccactagtctgagtatcaagccttagaatgcaagtctgcaagaaaaaaaggaaccaagtcatgatgatttgttgaggatgtgtaatgtcatcatggatacaataatgatgatgagagataaagaagagaaaccatttgagaagaagaagaagaatgatccaacatggctttgtgctgatgagaaagagaaaaacttaactgtttccaagtattttggttagaaccaaagagctgtttatatagagactatagaagatattttctttctacgtacgatacaatttgtttttgttaattaaggtatttagattaatggtattaaatcctagtacttattgttataatctggacattgtattatacaatacctataccatttatgtactgcaaattgatttgttactgcatctgccttcacacgtatctccactgcttgtggtaaatgaaatttgtgtaacaccaaatctttcaaaagaattaaaaatttctaaaggatatagtgcttaaaatgacaatgatcaattactatttagagacgaccatataaagatttcgaaatttcaatttgacatttccataattagttctggacttaattagtcctagaaactatattatgaaaacaaataaaggtaaaacacctttttctcattggctcatgcatcaaaaaccatttttcaatctgttttcaaaatctacaaaaaggcaaaagaataaagtaggaaaaaaatcaacgagcatgaggaaatttgagcttcttgggtttcgttaaggagttgcagaaagaagagaaagctcctttgatttcatcatggattgggatagccaacgagagcagcggtaaatcatgttggggacttctggtttgttgtctaaacgagacagagtgagccaaagccgtttgtcttttgttgagtccttcaaggatgaaggagaaggcaccaaaagtgagacaactctgtagcattgcttgcggtgcacctgcaaacacatgatcatggagacttgttagcttagccagagtagatgtgactatgttcatcatcaaattcctatagacagctctatcaaacgtaaatagctcacatagttcatcatatacttgcaaatgcggagatatgaattcagttcttaccggggaaactaagagcaaggccagtacaacacccagcaactccaacattaatggctgcagaatggaggaaatttgaacatataagcaaagtcatgctacgagttgaatattacatcgtacgagtcagaagggataaaagagccgcaccgtcatctttgcctcgtatttgttttagaaggcaaacaactaaactgtgtactccagataaaaccgcaaaagtctaacaaagaaaccacaattcattcagttgcctctcaagcatacatgaaataataaccttatgcagtttcaatgaacataatactcaattaattcataaagacttaagatttaggcacctttgcagactgacccgcatccacaaatgatcctttaaaccctttcttcttaaacaatccagagcctgaacaccaacttatttccgtgagatttattgttcaatcacagtttcataaaaaaaacaacgacacacaaagtaattctctattagtcaacactaaatagctaaagctaaattgactgcaaaacaaaaccaatctgttctataaaagctacaccaatgaagtctacacaggccattgttgttccttaagactcaatgtttgatcaatccttaacccaagtaatctagtttttcctctagtcaacgttaacattagcctaaacacaaacttcagagtttaatagaaacttcaaagctaagtttcatcaacgattagtcaacctcgaattcaattactttgtaatcaaataaacgaagaggaattaaaaaaaaaaaacctcaccatagccaaatacagagcccatgaatgcgccactagcagcatctccggcgaaacgtacaagacaaacggcgggagcagggattaccaatgctttagaagaagagtcatgatcagtcatatcattagcgtcacggttaggttttgaatcggaatcgagactcgtatcgacgttaatagcgtttgaagaattctcggccgccatagcttaagacctctttgaagcttgaagacacactttcgttttctacctaatcttcaaaaattagaaacagagtttgcttttttacctgtagccaaacactatattcattatgggcctcaattcggcctcacttgggcctatatgttatgaagaaattgcagaaacttatatatatagattttttaataaaatgtaagaacaggcctgcccaagatgggcaagaaattgcagaaattgcccaagaagtttttttgttcttgaaatgaaatgataaatttgtaacatgaatcagtagtgatggtcatggtcttgatatatggctccaaactcagatctccatgcttgatcgtctgtatagttgtcatagctcacaacaccggttctgtgttctgatgatgatacatgctcttcttcctcttcttgctcattctccttgaaccatgcctctaatgcagaccctggtaatttgctttctgctagatattgcttcattgtgctcatttctgttttgtgcttactctttaacttctccatttgctgtttcaacttgtcattctcttcttccattatgccgaaacgttcctgcaattatggttttaggaatcagcatgtagaatctataatgcagaatctaagtgtccaaaggtttttttttagttggtgaaagtaaaagttacctcagaggattgaactgcttgctcagcttcacggagtctgacaagtaattctccagcagcttgaacagcttcaacagtatctcgcagctgaattttaaggcccttgttctcctttttcaagaattctctttctttctccttctcagctctaatagcagtaagttcagctgagaaagcttttgcaaaacgcttcccgtggcgacctttcaaagcagctttagccgctgctttcttcacatcaactattcctgccatagtcacgctatgcctctcatctaattcatcgtacttctcctgcagttctgtgtactgctcgatgaatctactgtgaccaagcatagctctacttagagcatcatttaactcctctgtagccattttctccttcttgagctctatctctagatcctctgcgtgtctacgatggctatcaatatccatccttagatcatctgttaaagatatccattcactctccatttctgtccacctctcacgttcttcttctagcgcctcgctgttgttctcagtgttcttggtaaaatcaatgctcttcctcatttggaaagaccgtaacagcaacgaagatctaacattatccgttgattttgtaggctgaagcttgcttttgagctctgcaatctcctttagaagagcttccttttcactgagatcaatccttactttcccaaactcttcactacgttggtttgtttcatatgtttccttcacgacctctgtctcatcttctccatcatcagacttcattagctgcacaaacagataagcatagctaaagttgattatccatgtcttgcaaacaatttactaatgtgcttgttttctttgaaatataacctgttgggttaccttacttgactcctgcaaagcgttctttttgtattcgtctaactgaagaattataaaaacaaagtgtcagcaaactcaagttcaacatataacactcactagtctcaccataagttatttacctgataagtaagctgctcaattttggtagcctgctcgacacacatgttcttgagatgcttctcgtccacgcaagcttcttctattgccttatatcctccctgatgataaaagatacaatagtcaaaacgaatagccttctactaaagaaactgaaaatgaacaaaaggaaatgcatctcagggtttctagacatacttgagcttcttggtcaagtttctgtctgcaagaaagacagaggagaatcgatgatccaccttcttttggtctatctttctgtaacaatttaaccgaagcactaagattatcatcggcttcatcgcaaggcttcagagagagatgcccaaacgagaaggaaacagaagatctgtttgacagtgagctccgttggtgacagtctataatatttagtcctctctggagacttgcagctagagaatctgtaggacttaaaggctttctgtttccagtggaggagctctcggttacattcctaggacttgcctgaaactttgtcgacgcagccacgctcttcctaaaattcctaatctttggagattctgacaaaggaggctcttcaagaatacgtgattgatgtggtaaactgatagaaatcccatttcccactgcgcttggaccagaatcagccaaggcacaatctttgtgatccttgtgtttatcaacagagcaaatctcgtctccactcattgaatctgcttcacagcctgaagcacttgcaaaggaggattgaatagaatccctcaaatcatcagaatcacagttagtgtgaaacttgttaatgtgtttactcagttccactacatcatcatcatactcctcctcatacattgtttccttttctgaaccttgtctgttttcacacgacatgactaaagacttgttgatgctgtttctcaattgactcaaactctccctcacaaagtaaccattcttgcttccatcaggtttgtacccatcagacttggttcttattagttcctcctataaaccataaacccaacattacacacaaacacaaatacgcaaccaataagtgacaaaaaattcaaacctttaggtcacgaatctggtgacccaatgaatcatcttcctctgtaatctcattagccattgagttagctcttgtgacgagtacactcttcgcttcaaactgttgtaattcaatttaaaactcagagacggaaacaataacttcaaatccaaaggaactaaagacaacaaattatgtaaaatcaaaatgtatcaaaaccctaattatagaaagatcttaagttatatgaatccacctgagtagattctttagggagaatctgttgagtcgcagatggaaacactttctgaggcgactttttcttcaagtgaagatcgtcgtcgttgttgagatgatgatttgtttgtatgtttgggtcacaaggaggagagttctcgtcgttggatctgaaactctttttagtatctgcattttgaatcgatttctgcttagcgtagatggatctgggaagcagatttcgaatagaagaagtcgaaatgtttcctaagaaccgactctctccgatcttcgctggtgacttcatcgttttcataacagagattgaggaaagaagagatttttagatctagagataagagacgagatagagagagagaggatttgaacgttatgtgttgtgagagagagacagaggaagacgataaagatagcgtttttgtattttgaatgtttgagtcgattcgaccgttggagtaaatgtgggacgcactcggaaatgggcttcacgtgttgggcttttttaaatgggtgttttatttccgtaacgtaaatgggcttaattctcaccgtaatttatttctctttataaacatgtcatataattgatttcattaacatagaaaaattaggcgttcggatattcgggtcagattcgggttgggtattttgggttcgggtttttcggatttagaaatttaagacccattcgggtaatttaagattttggttcgggtttggttcgggttcgggtttatttatatattgaaatatcaaaattttgtatgtaaatctattaaattacttgaaaatttcaaaaatttccaaaacaacacgagtaattttgcttgaatatatttaaaaatacacaaaaataactaaatatccaaaaaaatcctaatattttctatatataagtataaatataactaatatatatttatatttaagatatgtttgggtacttattcgggttcgggttcgggtccgggtttttcaggttttaaagtttagacccgtttggatattttaaaagttcgagttcaggttcggttcgagtttttcggatcgggtttagatcggttcttcggatttggatattatgcccaggcttaagaaaaatagcagcactgtctatatatgttgacggtgtacaaaatcatttcagttttatttcagtaataaagagttctatgattacaagtaattttagttgaatttgtggtgatagatgagaattttgtggggagaataattaaacaataatttgggattgggagaaaagttgatttgtacgttaaataaatggaatataagattttaagcaactaaaaggaaagaggtaggcatccagatgatagtgacattttttttttcttttgttataattgtcagcaattatagtttgaaatttttggcattagaaacatatataaccaataattgtcaagagaataaaagaaaacaaaacaatgatattttatttacacatgaataatgacaatactatataaaaaaattcaaattcagcactttttggatctttttattattttagctttcttgtgggttctacacatcttcaatatttttctaacttttaaatatcatatctaactttaatttgtgtactcatgcattcacatccactcattttcttaagaaaataatattttataactttacatggttgaagaaagatacagttacagttcaatttcacatatttatttcataaatcccatactatattacatttacttaagtatatttgcatttcattttaactaaagttcatatattttttgtaacatacctttttattcatctgaaatcgctccttacttgtgtaactaaagttcatcttcaatattattatgatattttcattaccatctacaatattaacccatttatatttacagaaaaagaggcaaaaatataattaaagttaaagatcatgtgataatcacttgatatgctttgccaaaaactgacgtgtaggccccaaagcccattagctccgaataattaaaaaaacgctctcttctatcttttcatcttcttcctttttacctcaataactttgcaaatttacaaaaagaaccagaaagactccattaacgcttttgccagccaacaacaacaaaaaaaaagaagctcacagcttttccatcttccaaacatctctgtaagtgatttcatccgcgtgaagtattattattgtaaagatttcttttaataagagataaagctttatagctttcaatctaaacttttcacagccgaaacagttgaaaatttgaagtctatgtcccaccttcttagtggtccgccattgaagtgactgtgctaaaccctaatcttatctctctttctttccgccgacccttcaaaaaattccaatctttttttgtcaacttactaacagtttgcatttaaaactctctttgaaaattgtcttgtttgtttctaactttttcttatgtaacccacccacatgcttgttcttctttctatcatcttcttacacgactacgacttgtctttctttaccctttttttttttgttttgtttaaagtttctctctttgtgggttcttgttgttagagaaatcagctgcctcagatcagagcttggttttggatttaggcaagttttcttaagtaatcagctttaccatttctgttgtctgtgttgattgattgtaagctgtggcaggatttttgagtttctttgatgattggatcgagcaagaaactttgaaactttcagttaattgatgccttggttagagtttgaatttgtatgaaaccgctcataaattgtttgacttggttagagtttgaatttaaagacttggtaatacctaaacttgactctagttcaaaatttctttattgttgaatgtgttatcatctatgttgagattagccttgaattgttgtctaaacttgatctgtggattttggctgtgttgattgttgatgcatccatcttgaattacaagtgactatattgtgagttgggatctaagggagcagagttcgtttccttgttcttgagattctctctattagctctgctctgcgtagtttaggcctataacgttctcaattctgattttgacatgaaactgtccttttggttggtgtatctcccttacatatagttttcaaaatctgttaatcaacattgtttgagttttaattatgatctaaatttttgttttctttcccaaatttttattttaaaacttgatctttcggtttatattacattctgatatattatcacaagatcccgttctttccgggttcagtcttaatatctgctaggctgttagacgcattatagaatagcccgtttgcttgctaaagataccatggcatggtgaatattaacaaattgctcagcttggtgttgtacttatcatggacacatagttcactttttttttagtcatgtctcttctggatgtgcaagtttccaacaatagactctatctacatgtgctgatactaataggccttcatcttttgcaggattgtttgttaggttttacaatggactccccacaatctgttgtttcaccattcaagattggtgagtcagagaatgagaactcaaattctgtgcagagttctggaaaccaatcgaatggcataaattccaatgggaaagattctaaaagttgtggccggcaagaccttgttggtgctcttgaggtttatgtccatcaggcaagggatatccataacatttgtatatatcacaagcaagacgtttatgccaagctttgccttacaagtgatcctgataagtctgtctcgaccaaaatcatcaatggcggtgggaggaatccggtttttgatgacaatgttaagcttgatgtcagggttctggacacttccctcaaatgtgagatttacatgatgagcagggtgaagaattatcttgaggaccagctgcttggttttactctggttcctatgtcggaactgctcttcaagaatgggaaactcgagaaagagttctctctttcttccactgatctctaccattcgccagctggttttgttcaattgtcactctcctattatggatcctaccctgacgtgatggctattccctctatgccttcgtctgtttctattgatgaaactaccaaggatccagaagggtctgaatcagttccgggtgagttggataagatagagtttccagatcctaatgttgctaatgaaaatgagaagatggtttccgagtattttgggatctcttgttccactattgactcagaaacttctgacagcttggttacttccgatgctgagaatcatgtgactaattctgtcacttctatactgaagcaagattcacctgagagcagcaatgcaacaaatggagctgcttctcctcacgcttcagctcactccgccacagaaacaccaaaccatgaacatctctctgtcgtgaactccaaagcgagttcccaggagtcagagagcgaggcttctggtgagacatctgaggagaagactgtgaaatccgtcctcactgtgaaggttgagccagagtcaaaggtggtgcagcaggatatagtcgacatgtacatgaaaagcatgcaacagtttacagattcactggctaagatgaagcttcctctggacattgacagcccaacaaaatcagaaaattcaagctctgattctcagaagctgccaacaccaaagagcaacaacggatcccgtgtgttctatgggagcaggcctttcttctgagcatctcttttaccaagttcagagaaagaacgcaggtcacccttagacttttctaatgaagaaagactaatcctaatgatgtaattttataatgtactatttcatgttgtatctcccatctggtcagcttgatgctttagttgatgtgagttattattacgtatcactagcctttactctattagaactatgtacgcattatatgaacttctgctgcctaatcatgtttgtattttctgagttactgcgttttacatccacaagaatctttaaagcatagtgataaatgcttagattgcttaattattcgtgcaatcatcatatggtgtgactttcactctctggtcctactttttctttgtgaccatcaaagaggaggtccataggtggggagagagagaggcaaaggatccaatgattcagctttctgaaaaaatcttgagaacaaatgtttggatgttttttggttagttgaaatgtccttttcacaggatcttgaggttgcttttctgtcttcataccatgtggtaataaaaggtaagggattcaacagtaagtaagtaaaagattcaaaacattatcgtaatgcaacataatttaatgaaaatggttttgcctattaaactactttctcttactgtttatttgtagctagctagcaaccattagagaggaacttggatcacttcatgggctctggtgatcatatgccgtttgcaaatccaggcgatggacccatcgtctctgtatctaactcgccagaggccaaatttttctgcaatatccctcccggttgagcaagtctgttccctcaagtaatcgatgagccactgttgagctgctctttgttcttgttcctgaatatctctatctctgcctcggttcctacccaatgcagcagcgacccctatggctcctgcagctccggccgctccagtcatgacagctgggttggctaggtgagcgatagtatggctcaagtcaggtatcatgtgtcccatcccagctgcccagtttgctcctatcctcaatgcaaaagtcaccagtttcatgaagtttgtcatgtatggagccaagcacttcacagcttggttgtctatctgcattacgtcacaaccaagctgatcctctacgacgtgcatttcccgcctaaattcgcataacatgtgtatccttagagcgaccatgccaggaaccatagatgtgatcagtcgtctcccgtagttctctgctctgatgaagtaaaacatgtttggaacttttctttcatccatctggacattatagttgacaaggtaattcactttgtgatgaagctggatcagaagtctgtgctcatagtatctcagtccttggatctcttgtttcaggtcgcgtatctcttgctcaataatcttcagtctctgaagtactgcttctactcctttagcaattccaccgaagctaggatcaactttttccagctcattggtcaccggtacatgattatctgcttcggggttttcgtctgttggaacttgtagttcttgtgctaagttgtgcagatcatggtaccttctttgcaggacttctctgaaatcatcatcagagaggaggttgcgggctaaatcaaatccggctcttagaacagtcttacctgaatctagaacagagtcccatgtgtgttgatagtcatacatagtctctgcaggaactgatgataatgcttcttttagtctgtggagggaaacaaactggctttgtcggaatcgcggtggagtcaagtcctggacgcattgtggtcttatgatgtgctcaaggaggattacacctcggcagctgctctggatagccggaatgattagctggtgaatgagcctcagagtttctgtcaagctctttgatgaacaagccagaacatcaatgtaatttcccaactgtcctccaagttccactctaatgttaataccatggatcgttatagcaatgaggtacttctcaagactataagtcgccccgtgttggttcttcagttccatgattctgttgtgaagatgcacctgtgcatgcaacatgaaaaattggtaaggtttgagttaaagagatgaaagaaacagaaaagtgattttgagcccttgcctgtaaacgagggaagaatccagctgtgagaaacatgtgacttgaatcatcgcactgaagatgacggcctgaataaacacagtcatgtgtgtttatctgccatttctgtgtctttcctctgccttcttcgagaatcgatgggactaacaatgaagagtctggactggaagggtcttgctcatagcaaagttctactttcttcatcatcttcacaaggtcacacgcatcaaagtgctcaagtacctttgaggtcatccctggaattggactctgtaaactacttctcaaagtcttctctagctctttcctgctcacaaacccatttctttccccagtgctttgctttcttacatcaagctttatcaactgagtaagaacctccccacaaaaccattcatagtctagtatcaaaaagcccaagtcatcaaagtaaatcacctctcccatttggtggaggcatgtggctatagcatgccgtcttgtctccacaatctgaatgttctcgttgcgagactttattctcagggaaggaaccttaaactggcagaggtctgcaaaggctttccatctcataataggtttgttcgaattctctgatctccagtctgataagagctgtactatatcattgcagagctgataaacccgaggaactctttgaaggatggctttgctagtcatccgaatatgatgtgtgagtttactaaccgaaggagatgatcttgcatcaactgtgaatacagtcggataaaattccactaaagcctgaaacttatctctcagtctctgaatgcaacccacagttgcctgaaagctttcagattgtagattgattttttcggaatgtgtgagaacaattgtgacatttggtttcatgcattgttggatcgcttttctcgagttggaaacgatgaatctaagccagtattcaagctcttcctctacttctgctggtgttttgggttctttattgctcggtttcctaaacaagctcaatacgatcaagaagaagcacgggcttgggaacataagatcatgaagagcaaagaactcgtgctgccccgcaagattccacatcgagatctttgtctcctcgtccttgaatgtctttattttcatcccaccaactgttttaaccacttgctccacaggattcatcaaatttctcacattctccacataaggaaaaccggaagcagacgaactttgcagtatagagttgcagagtgttgtctttcctgcatagttttgtccacagaggaaagctctaacgctctttggctcagtaagtggcatatccttgagtgaatcatccgtctctgcttcatctatcttcctaccattgtgtcccagtttctgataaatctcatctgctttccctgaatcttgaagcggagttctcgctaaatcaatttcttcaatcaatggattaatctgcaatgtctcagtgattgcctccaatactctatcacctcttacccctttgcagccttgtaacgaaaaccgtcttaaagacgcgttcttctgcaagctcttgaagatatgtatgaaatcatcaggtcccaaactcgcatcgtcatgaatcccaagatgaaccacagtctcatttgttgtcaccatctttaaaactgctgtaagtccatctcttccaatctttgtattggaacctccaaacacaattgaccgcaatgtgatgttagcttgtaattgcagagcagagaatctactcaatggacaaagcaaatcctcaacaccaacgctcccaaaccgatttccatcaacatacaaactctgcaagctcttgttcttgaatagtccagctgcaatataaacaacagctttgtctttaagacctgttttcgaaagtttcacttctctcagagtcttgttctgttccaaaacccatctaaactccttcgcccaccgagagtttagcttcgcacccgtcatatctagagacctgactgttgtattcatccccaaggctgcagcgactctgcaagaaccagaaatgtcaatctggtaaatcctcagagttttgctctcaggcaagaactcaacaagctttaggcttctgtctcgtttgtgatctccactccacatatgaacctccatttctctgttcatacccaaaacagcagatatcaatggcgtagcagtgaaagggctcgagtcgaaaatggagaaaagtttcaaacttgagttcatttcaatcatcctcgaaagctcttcagctccttttgacccaatcgaatcttcccaaatctgcaattcctctaacgaatcgttaacttggagagccgacccgagaagcgtagctcctctgtatccaatactcgactctaagaacataacctctttcaaaaacctgtttcttttcagaatctctgagagctcgttgagacattgttcactgaacctgttctttctgaaagcaagctgctttatcttcgaggtgttgtctaacaacaaacccaagctctgcaacagctcgatttcccaaaagattccttcgaattccaagttcctgagagacgtctgcgtctctaaggatgttgctagctcgatgaagatctgggaaagtgaagtgaggttgtctctagtgacgttgatgttcatggagctctctgttattagctgacaatgcgtggtgtttccggaagaggagaaagatagggtttgaagattgaagaaagtttgttgtgggtctttgattgcttgaagaaaccatgagaggtctttgaagctttggtctggctctgactccatctttagacagagagaagaaaggtaaagttgaggatttttgtttctttattggtgtgttttattttattttgaaaatttaatacacaatctggatattgatgagttggataaatgttgagtgacttttattttttacttgttgagccactgtaatattgactaaattattgttttatcaataaatattaatacattgtattataagaatttgacaagtagttctttttgtaatgttttgataattaattacatatcaattacattatgatgaaacttaaataaaaagttttaaaatagctagagatatttttttgtcaaaaatagctagagatataaatatgtaagttgttttgtcataattataaagaaataaaattctatatttctggacattataatttggtatagatagtgtgtgtatataagaaacaaatccacaagtgctttatcatcaacaaataaaaattattgaccatgaagaaaattaaaattatcgtaaatttgttagtaaaatttctcgtaaaattctgcaatgtggaataaaaattactttactggggtaaaaataaactttcacgtataaagcttttacaagaaggaggcctaaaagtcgcaaaacggcaaaagtcttggaccgactcttgttaatgggacctaaatgttctacggcatgtctgtcataaactcataatattgatttcgttgtttactaattctagattaatcaaaaatgtacattttatccaaaaaaaataaaagttgtttaccaaaaaagaaagaaaaaatggtggtaaattttctcaaaatatagtttggtcatatgactacgacctagttacttttagtttatttccaaatacgagtgtgtaatattaatgtttaactacatgaaagatatgaatttttttcatttttttgaaagatataaatataaataagagttttcacaaacttttcttccacaaaggcacaaattataaaaacaaaaatagctttaaaaaaatatatatatatatatatctcattagggatacatgcaacaaaatagtcatatccctctcttacacaatatttctcccacgctaattttttttttaagaaaacaaagttttcatgaacaattcattttgtaaacaagaaaaaaaaagtacaattacaaaacagagcacagaactctgaagaatctttgatcgaaaattctacgatctttgtttggttattctatgaaagaaaaaaaaaaacttttttgagaagcaaatctaaatccaccttgtagtatctttggttgtctggctgctacgatctgatctttatgtaagaagaagaaaaacaaaaacggttctttgtttttctcttttttttttttttttttggtctaacaaaagagaaagcaaaccataatctttggcactgtgatcaacaaagttggtttctttgtcatgagaacctgttcaaactctgcaactgaaatttggttgctttcaatctacaaatctctcaacttttttttttgttttcttggtttttgataacctatgcagcaatacctcaacaagtaaataaaacacagatcagaacatttcgattgcgatcaaaatgtatccaagttacaagttttattgagatgaatttttttgttacctctattagtttgtctatttccaacattgtagcttccattgtaagtttctgggtcatttgcagatgggtctgaacctacattgtcaatatcataaccgtaagcgcgagacaaattgtctagctcgtgagaagactgagatggtagctgctgttgctgccacgttgagtcgctgtagactgagccgcctctgtacagttcccctatagaaccttcaaaaccattaaatggggacgaggaaagtccagaacttgtcccatagttccttccaaagccattgttatcattactaacagcagaagaagaaggaagtccccaatttcctctgttgtttccattcgagacattcaagttccaaccgggacctgcagtgtcggttctgtttccccataagtctctattgttcgaattgtaaggagactcagttctattgtgcccgattggagaggtgtaacggttcggggaagcaccgttgaagtaagggttgcttggaatacggttataaccaaacgtagaacttgtcccatcgcagcttggattcaaattcaaactcaagtcatgattcaaaccgaggccaaaagcagaaaccgcatttctaccactaccaataacaggactaaaccgacgaccaacaggacctagactgttataaaaaccaggaccaggagcaaagttgttaaagtagctattagcaggcatcctattagacccgcctccatagttaacaccgctagcaagcgggcttcggatattagaaacaggggaaatctccttaggtacagctcttttgacctcaactagtttcccattgagctcatggaaggtcttgtgaagaactctatcaacagcatcatctgaatcaaatgtgatgaagccaaaacctcttggcctctgcgtgttatgatcatacattacaacaacatcagcaatagtaccaaactgatcaaagtagttcttgaactcctcctcggtaatgctagacggtaaacctccaacgaagatcttctttgtccttccaccaccaccatggacaggtgacataaggtggataggactagcgtgtcgctttagcacctgctgatcatctcgaggcacagccttcttcgcctcaacctgcaaaacataaatttgatctttacactttgagaaacaaagattgagagatgattcaaaaacgcaaattgaggaagttgcaataagatctgaactttgtttgttctgctgaaagattgagaaatgattgaaatcacaaaccgtgcggccatcgatgatgtgtttatccatgatcactctctctgagacacaggggtctgcaaagacaatgaagccgaagccacgtgcacgacctgtggcacgatctctcatgatcacagcttcaacaacatcaccatagttgctaaagtagtctcttaacctttcttcgtctgtatcccacgaaatcccaccaatgaagagcttccccagatccgattccatcttttttttttctgctccaattcagagaaacccaaaaaaaaaaaaatcgagtaaggagatgaaattgaaaaaaatcaaaagacttagaaacaacatacttttcttgtctgaaaatcaaagacggaatcagataaataaagttgttgttgttgtcctaatcaaattgcgaatttgggttatcatcaaatctgaaaaaaacaaaaaaaaagcatcatcaaatcacaaaaccaaaaacccagaaacgtgaagaattattaaaaaaaagcaccatttttggagatgacccagatgaggaaatgtggagaaaaatatgaaaagagagaaacagaggatgtttttgttcatcctataataaacatcttctctctcaaaggctttattaaaaacctttccttttaatgttttttttatctgtaaatggtttccattaagaaagagtttctttctttgataattaaaaagaaaaaaagagacagagaacaatagttagtctcacatataataataataatcttaataataatataatggggcaaaatatttgagatttggctttcttttggtttaagcatcttttttttttggtagatagttgagattaaatataatttttgatttaaggctagactattactactatcatgatcatggagacccataatatccctatcatttatttgttacctaaattttcaaataaacaatagaaaacttttaaactatattttattttattttataaaacactttgcaatttgcaattttgtttaaaatggtgtgatttttactcttggacgaactctttccaatatttttgtattctcaaaagaaaatatcatgataataaaatattggaaatgagtcgatgatgaccaaataccttttttattacaagctctatgcatttttcttctttcaattttttttttttttgcttttaaaattgttttgtaacattaccattctatcatttaaaacaattaaaacagtgtacatgtacatagtacaaaatttaatacttgagcgccttaatctaacttagtggtcagagattctgaattgtatcctgacatcttaaaatcactttagtgcaatttaaaataaaataatgaaaacagtaatggagtaaaaaaaacaaaaatagttcattggaaggagaataaatggacctaaataccaacttgtcttgtgtgtaggcaaaacctagcctaaaggatc

SEQ ID NO: 905 - DNA, 3542 bp, Arabidopsis thaliana
tttctggcctagtgatgtttatggagtatttaaatgatgcattataaacaataatcaaatcatgaaagttgaaattatttggattttggagtactgtgttgacagcaacaaaaattaatggagtatttgaccatttattgacaattttttttagttattttgttccttatatatctctctcttaaattgttattttatgttgtgaataaatcaggaagaattcaaattacttgggttcatgatcgtgcatttccatcaaaataaaactacatatatcaatattaaatcacaaataaatagaaaacttctcttgagagtatagcctgtgtttttttaaaaaaatttcctttttcttttttggtgtgagtagaagaaatctcgaagagacggatagctagataggagaagcgattctacccaaaaaaaaaaaagataggagaaagcgagagagaagaagaacataaaggtggtctaaaaaaaaaaggtggtattttattaaataagaatttctatatgattaatattatattgaaacgactgttttcttggtgtaacatgatggtgatggtgatggtgatggtgatggtggtgtgtggtgtgattatgcgaaggacaccaactttttggaattttaaatttttcatgcaaagttgtcattttaagattataatatcttttgtttttttgttttctttcttcttttaaaattgttgcaagctttatcaacttggaaggacaacaatgttaagactattcaaggtttccttcttacctaattttgttatgacacaccacgcatattatattttcatattgttcagctttgatcgttttatggttatgatacaatatacatttgaagagtggttttattgcatattaatttgactttttatgattaatctgcattttttgtggaaggtaattaaaagttcaaaatttggcgatttggagggttttgtgtgtggagttatttccttgctaattataggttggtaaatgtatataatttacagaacaaagttaaagaaagaaagaaaaaaaaaacaattaagattagtctagcaagaccatgaatattgattgtttactttcttttttttttcaagagaagaagacgcagcccaataccaaattgatattatatggacaaggaaactaatctgatccagagttataaactaaattaatctatctgtagacgaaacccaaagtgataaactaaataggcccaagagatttgaaattgacataggtgttgcacgtggacttcacgaatattcggcaactctaatcattgtacatagggacctgaaaccaagtaacgtcttgtttaatcgtgttatttaaatatgcagtggctacatgtctccggaatactcgaaagaggggacatacttggtcaagtcagatgtttacagtttcggtaagctacgtaagttgattcgattttagagtccatcttcttctgttatagtcaaaagctattagagaaaaacattactatataacttttactaacaactgcaggcttggaagaaatggagcgtgcagttgataaccaaacatctaattaaccaaggttcattgtatacactcatcaagaaacaacaatacgaccagctccattgttgtcattgttttcaccgtcttcgtcatcatcatctaatatcccatcaaagaacgggtcgcagaggagctcagctgcagaaggtctagctctcggctgcgcgatgcatttttcaataaatgccttagcttctggatcattaactttgttgagagcctctggtttgaggcctttgctcacccttttgtatattttggcgacgctgtcacattcgctataaggaatctcgagtgacacaagctccaaaacgcacattccatacgagtatatgtcaaccatctcagtgtagttctcctcgtacagctcaggagccatgaactctggtgtcccgaggatcgagtgagctaaatggttcttccccacaattgcagctaaacctagatcaccaatcttgacctgatcattttcaatcatcaagacacaactcaactcaatcacacacacacactagtagaacaatttacgattgagtaaaatacctggccgatgttgccattgacgaagatattgctacagttgaggtctctgtggatgatgcaagggtcgtgagtgtggagataatccaagcccttgagaatctgtttggaccacttcttcaaagccctcatagagacgtgtctgtgcttcttccggtactctctcaggtttccggaggtacagatctcggtgatgaagttcaaggtgttgtttctctcgtctctccacactttatacagggtgatgatgttactgttcttaaggttcttaagcaacctgacctccgagtaaagcctctcggtcatggctggatcatccgaaaaacatctcagtttgacttggttccaagccacctcgatgccttcttcttggtcaaaggctctgtagactttttttacggcgcctgagccaagaagttcgccgtaccgaccgtatctacctgtcggatctacctccacgaaggactccgagtccttgtccttttcactctcattatcatcggagctcgcacaagtcatctgctagtaaaacagactcaaaattctgattacacgaatttcacaacaacaaagaagatttcagataaaaccagtttgaaattcagttttccatgtactagaatcaaattgaagattgataactaatttaaaaaaaaactagatcggtaacatgtatataagaaccctaaataaacgtaagaagaaaaaaaaaaactccaactagaacataacacatatacacacacacataaagagattgaagaacacataccattaaaaatcgcttgaatcggaggagagaattatcgaaaattctttgctgagattttcgtaaaggagaaaaacgtaacggagcgtgatagatttagggaaaggttttaaagaccaaagaagcggaagagattgtgtgtgtgattttaatatatatatataccagtaaatattctttctttttttcctctgtttttccatgcctatctggaattggactcttcaaggcttttaccaaatcgttgacaccgattttttaaggcaaattattaacataataataatatttgataccatattatttgagttattattattaccagtttaacatgggataaaataaaatttacaagttaaattgtaaaattaattgaaatagatttggtcattttgtgttttaaaacttttcttttgggctttttcgaaaaaaaacaaaaaagaaaaaaaaaactttttgggttaaattttgtgtcagaacttaaccgcataatcttatagttatttagtataagaatgtaattaatatatttcgtggactttacataagtaaaagtcaaactttcggcgcgtgaagaagtaaaacaatcgaggccgtcgtttttttatcaattggaggagcaagaataatttagagaagattaaaaccacgaaggcggccatataga

SEQ ID NO: 906 - DNA, 86699 bp, Arabidopsis thaliana
gatcatgggacgcatgtttgactttttttttttttttaacatcttcatcttattgatattacgaagaaaagtaatcaaagcgtaacgctgtgaaaattacaggtataccgtggtcttttatctatggcaattttggtagggaatgattttacagttttttccctcataatttcatgatattagataaatgaatatatgtggattcaaatatttaaaatttggatattttttaaaggatatcgtctatatatatcaataactaaaaactaagtaaaatttttttaaaatgttctaaatatttttctcgaatttgtttttggtataaacaatcaataggttcaagattcatttccacatcgactttagatatatcttaaaataaatacctgaccaaaaatcaaatcgtttcaaaagatcaatgctaagcaaggtttgtgtgtttcttgttgagattgatttgaatctgcatctgcaatgaaaagacttgagagttttcatattgattttagacttgctaagatgtgtgtttgtttgtgaaggtgtgaagaaagggattgtcgaaagttgggaaaaacatgaagaaagtgagactgatgaagacgatcttgatataggcattagtcctaatgcctcttctgagaagaagaagaagaaggagtcttggcgtttagatggtcgaggaaaggtaaaagatttgcttatattcctcttcttgttgagacaaatatagagttgagaaagaattactttttttgtgttttcgtctggtaagttcgagcaagtatgtggagaaactataccctctactctgaggcgagaatgatatagatccgaaatggttaccacttctggattagttgagcacatttggtttgaaagaatcacgctttgttgaaatgtacgagagacacatgccatcccttcagattaaagtgttctcagcgcaagagagactcgattacttgttgttaaggaaattaggtagcaagtaatgatgaataccattagtttatagagagatccaatttctcaaaggtttgtgttcttgtgtttgatggttttcaacacccttaaaaagtaaaccggtaaaattcatcgtgggagtcaaaattggtagagtttaacatgcttattattaatttgcacacccatttcagcatttgacagttgtatgagtgtaatccacacacaaaaaaattgtttagcaaattgttatacacaaaacagagattaggtaataagaaaattagcaaattgttacagaaaatatattctcctaagttgtctagcctctagtatcccgataccatacaatccacaaaacagaggatggaataaagtgagagaggaaggaacagaacaatacataagaaataaaaagcaacataaaagattgggtgttcttgtgagttaattagaagaagatgaaatcgtgagatgtttcctagtgaacctggtgatccgtgatcgtgtgagtaaattcaggaaatcaagatacataatattgagtaacagaaactgccttgtttttgttaactttttggtgtttcggtacttccctttgtaccttcactttgtcttaacttgccttttgtaaagattacgaacaagttctaatatcaatataatctttcaaagaaaagaaactgccttatttttaggaagtttatcttccgttacattattttttattgtacttcccttttttaaaaaaatatgacgtggcagaaaatgattggccatctaacttatgttttataatataaatgatggaatttagaacccgagcagtcgcacccctcaccaaccttcgcactggctgcaaatgcaagcctttcctgttcttctcattacacattttcctatgttgtagccttcatgtaggcaaaaatctccacatagtatggcaccattaggtttattacatgttgcaggcggtgctcgtttgcttggatttttaagatcacatggatgtttacgctttccttgtgtcattcctaatagatttgtgaccaatgagttagagatattcaagcatatatatatatatatatatatatgtatatatataaatataaatatattagatttagttagatctaaataaaaacacattatcattaaaaaaaatacaacgaactgatttttagttgtttcacacatcaatatttgcattttcatttgctttttcaagtatattactctcttcatctcatgaagatatgttttctagatattatttttttgtcattaaggtaaaagttttgggtttccaatgtaaaaccgttacctattttacctttattaaactattaagtaatattatactcgagaatattatactttaagacactttttaaaaaacatttccgtggttagacactttctaaagagaaggcactttaaatggataatttgaccaatttaccctctaaccatatatcgctttatctctctcatcctcctattctttctctctctttctctcacgttgtcgaaaaataaacaaaactcaagccaaaaaaatatatttattcctttttctttctttcctcttcaacaaatcatcagcttttatgagaaagagagattgagattcaccttctttaatttttcgcgtgtgctttgatctgacttgaaggaaaaaaatttcagaccatcaatttgagaatctgccctatctggctgatttagttacatgactcgctgaatgcttgaattggatttacggtttggttttcgttttatgtttttgttgtttgttgcaaaattaatctgattacttgctctttgattctttatcttgcttttccaatttcatattcgagattattctcttgaattggagattaaagcctcgtagtggacttcgaatcgtttgatagtaatggtcgaatcactagttgatggaactcgttgcttagttcatgtctagtgaatttgattcacgattatatttgggttgtatattttcagaaaatctagttattttatgtgttcatcataaacggtttataagttttttgatggttgattcacttactgaagaaccatgttgctagttctggttatgtgaaattgatagaaattttagcttagatctgagattaattttcattcacatatgttagattgatttctacatttgtgtttaagatatagatgttaaaaatttggtgcaaaatcgagaagattatcttaacacagttaaatgaacagacctcagtggacaacaatttctggacaacgatttctggacacgttcttctttacctttttatctcaaaatccaatcgagaagatcatcttaacagagttaaatgaacagacctatgtggacaacaacttctcgacacgttcttcccttgaatttgtgatcatttatgttatattttgagatgttttgtatataaaatcaaacttggacttgtattttaaaacttaaaaatcaaattgagaagatcgtcttaacagagttaaatgaacagacctttgtggacaacactttctggacacgttcttctttaccattttatctcaaaatccaatcaagaagatcatcttaacagagttaaatgaacatacctatgtggacaacgacttgtggacacgttcttcccttgaatttgtgatcatttatgttatattttgagtgtctatatacaagtgaactaatgtgttgaataagcaaaaaaaacagatgatttgttttgaccaacttgtgattcttgcatcaccaatgacactcttttcattaaaaaaacaattgatgaaagctctacacatgaaccatttgtgttccagtgtttgtcatgtttctatgtcatgtttcaccattacgccatatggtcaagtctaagtggacaatttatcatggactaaactatcattaactagttgggttttgtgtgttgctatttgaaagcaatgtctacagattgttcttgggttttggagacatctaagattattgggttctacataaataattggtgttggaagcttggatagtttgtctccatgataacttgtccacgtaaacgtaaccatgtggaaataagtgattctcataagcaaaagaatatgcttttaaggttagacgttcaatgaaacatcaatttattaagaaagaatcaaattgtaccaaacaaggcgatcaaatggatatgaaatttaatactggaatttgctaacttgggttttccataaactctcaaatgtttgattttgataaactcttaaatgtttgattttgcaaggaaagaaaaaaaagtaataatgagaagagaaagagagagagagcgaaaagaagaagcgacgaagaagaaggaaaaaaaaggaacgtggagagatgaaactttttttttaattataattttttaattttcaggggcaaattggtcaaaagtttaatgaaaaagttggaaaagtgcctcatccctgacaagtggctcaaaaggaataaaattctctaaaagtgcctaaacgtgtcacattccctattatactccctatgattttttaaaaattaattttctagaaaaaacatacatattaaaatatatattaaaaggtgattatatatatatatataagttttgtgatttacatttcaataattcgaagccaatgattttcaattatttttcttgaagtttacaatttatctatgataactaataaatattgcatagaaaatctaaaagaatcaaattttttaaaacaaatattttttttagaaaaccaattaattaagaacagacggagtaatgtattctttaaagtgtttaaagagaatattatttcttaaagaatgttaaattgttagaaaacttatctttgtgggacgaagaaaatattattttcttttaaaaaaagttttgtattgttaaatctaaacatatacatcaaactttaaaaatcaaagcaaaaaaagaatatctctccttttgcatgcttttgacatattgaatttaatagctaattttcttaattaagatgttaaacttatggattcatgatttgaacaaaactgaaaaaaagtatatggaagcgttggtgagattcatacctatcaaaatgaacaaaaggatcaccaaccgaatagtaaaaccaactactgtattttttcttcttctttcttaatttctctctttattaaaaatttgttaattatatcataatcttaactgttgtatataaagtatttcttcctaaaatatacaaggtgtacgcaacaaatgccaataaaaatggtttcaaattaaaaagaaagaccaaaactcatatgaacctcaaaaacatagtatgctacttttagttaaaataaactttctcatttcaagttctattttttttgtcattcgcttagttattaatgctcaaaaagccatttctgaggattgttatttacataagtgacatgaagcatcacacgatctaaaagctgttagaaccacatacgaaggcaaacacaatcactatgtactaaccgcaaggtataacaacaacaacaacaaccatgacatgtcagactagttgtaccgctaacacaatcagcctcaacttaggtgttgaaatcgcatcggacacccttgaccatacatcaaacgagcatccacatccacatctgcatccgcatccgcattcacatcgtgttcgttctgaacttaaaccagtggaacgctggattcaagtttattcatggaccacccatgggaacctgctatctaagtagcactaatgccggtataatcatcaatataacggttcgagagaaacgatcgaggctcaaacagatgacatctcttcctgttatccgtatatatccacataacatagcaagaatacaatatggtctctagaggaggatggtctgcacaaaccaaccacagtaacacaataaagaaaaagaaaaacaaaggctctatacttgcattatttatcttgattcttcctaggttaggaatggaataacattgttctttgtaatctatgatctatatgtatgtatgtatgtatgtatatcatgacacactaagatagagatattggtcttaatctcccaacatatttatttgttttttattaattcgaaaatgttttgtaaaaaaaaaacacaaagctttatatgtttccaagaaaatctgattgcagagatcatcaacatcagcctgtaaagaatcttctccatgactgccatggaagaaacccacctgcaaataaaacagaaacaaacactaaagtatacttttacattttcaaaatgtaaaagaaagatatagagagaaatcgaagttaccacattcaggacaacgaaaatactttttgtctcgagaaacaagtcctgttcctccacattcttcacatctcttctgtgcaatctgaaaccaaaactcatttttcaatagacaacacaaccaaataattaatgtatgtgtgtaataatacatactattcttttgctgaattcaacacctgcaacaacgaatggtatgattccagctgcaagatcaattgatttattataagcttataagaaaaacacattttttaatcacatcactaattagctaattaattaaattaccaatggttccaactataatctgccacgtaatctccgatttgcctgtctccgccaccgtgtcagctagttcacttagagccgacgtcgttttgagccgtcgattactcatcgtcatcatgccgccgccgccgccgcggcttcttcttcttcccggagaaacgaaaccagccgtggattttatctgacgtggtcttgatctaacggtccacagagacggaactctacacagtgaagaagcctccattgtcgccattatgactcaagaaatcaaattcaccgatgaaaatatgttaaaaaaattgggccacgtcgacgttatttcgggtcgggttcgcgccaaccgcaaataccatcgtgtggctttaaaaaagctgccaatcaaaaatatattctaaaatacattaaaacgacggcgtgtaatcggaaaacagtaaacgccattagagtcttgtgtgtgttaataatgaatctcaaaacaaaacttttttgtttgtttgttttggaattagggttttagggtatattcgcaatcactctaatcggataattcctctactctgttaacattatcttcttcttcgttcctaccgcaaatggcgggtttctcactgtactgttttaaaaaccctcgaattctctttactcttccgtcggaatcacctctctttgttttgggttctgataaatgttcaccggcgacgagacggccgagtagaaagactcgtgggtttgtcgtgacgtacgcgcactctaatccgaagataatcaatccgaagaagaagtcgaggtatgggcaaacgttatctccatatgacagtgatgaagatgatgatgatgatgatgatgatgatgatgatgactggttacttaatgttagtttcttttgttttctcttatgaaatttgtttgattttgagattaagggtttaaaagatttgtcttttctttaggatgatttcgctgaggttacagagtatgagaagaagaagcctaagtcacataagcaaaccattgctaagaaaagtttgtcttctcttgatttgaatctgcatctgcaatgaaatgattttgctaagatgtggctttgtttgtgaaggtgtgaagaaagggattgtcaagcctgaagaaagtgagactgatgaagatgatcttgatttaggcattagtcctaatgccacttctgagaagaagaaggagtcttggcgtttagatggtcgaggaaaggtaaaaagagttttgcttaaatacctcttctttgtcgttgagttgagaaagttactctttttcttgtgtgtttcgttagatgagttcgaggaagtatgtggagaaactataccctcggctcgcagaagagattgatatagatccgaaatgtgtaccacttctggattacttaagcacatttggtttgaaagagtcacactttgttcaaatgtacgagagacacatgccatcccttcagattaatgtgttctcagctcaagagagactcgattacttgttgagtgtcggtgttaaacacagagatatcaagagaatgctcttgagacaaccacagatacttcaatacactgttgagaacaatctcaaagctcacatttcctttctaatgggtcttggcattcctaattccaaaataggacagattgttgctgctaccccttctctcttctcttacagtgtagagaattcattgagacctacgataaggtatctgatcgaagaggttgggataaaggaaaccgatgttggaaaggttgtgcaacttagccctcagattctggttcagcggctcgacataacatggaacactcgctacatgttcctctccaaggagttaggagcacctagagacagcgtagtgaagatggtaaagaagcatccgcagcttcttcactacagtatcgatgacgggttcttgcctcgaatcaatttccttaggagcattgggatgtgcaattctgatatactgaaagtcttgactagccttacacaggttagtagattgcttgattctttttcatacttaaatcaaaactagaatgtttgttctcataaacacttgtcaaattggtctgaataggttttgtctctttcactagaagataatctaaaacctaagtacatgtatttggtcaatgagctcaataatgaagttcacattctgaccaaatacccaatgtacttgagcttgtccttggatcaaaggatacgtccgcgccaccgcttcttggttgagttaaagaaagtgcggaaagggccattccctcttagttcattagttccaaatgatgaaagcttttgtcagcaatgggctggaaccagtgtagatacgtatctcgcctttcgccagaggctgttactcaaggagtttgcaaacaagtatgacaagagaggatgatgatgggaatctcttcttcttgattaccgacaataagtcaacactttggttagtttcctgcttcaaatccggtaaaagaggttcatatgcagaacctgtgaatgactcattaacttctggtgaaacgcgagatactgcaaagattgaactttttcaggaaagtaactccagagaagccggcttggcacagacatcatatttgtttaccagatgagagtttcctcaatcttttccaggttttgtctacattttaagttctgctatgtcttgtggtaaagttttactctctttttctcctcttctttctaatgaatcatggagaagagaaaagaatccatgtgtagtattttttggcctagtatatatatacttaatactaataagagcatcttataaaggtattgtttgttatgtttgatccttctacggacaagacgttggaagaaagatttttaagttatgtagattgagtttctttgtgtgcttctttactttatactctatataaacattgtgtcttcaataatttctttgttaattttaatttttttggtaatagcttcttttgaacaagaaaaaaaaagatcgtcttggttgaatgactaaaccgtatatgtaaaacccatttgtttattttctacacaacacaaacacaaaattacatacaaccaacatatcctgccattattttactaataaattatcagcgaaaaacaacaacttaagttgacctataaaaatgtgaaaaaccagtgaatagaaatttgttaccaaataaaccatctttgcttttttgcaaatgaacacgtaattcttatgagtaaacgagcgcaaatctaagaaaagagtaaaccatctttggatttgccaaacccctccaacatcatgtttgcagttttattcttctatgattaattaatcatcttctgatttgcccttcatcttttcattttcactcgtttattacttttctgtgcaccgaacaaaaaagatggtgaccatttatgattgttaagttttatttgttctagttactactccataattaagaacttgcaataactccatcttatttttaccattatatatatatatatatatatatatttttttccctagtatcttactcatgctccatacgtacttaatttctcccataaattcataaagataatcttttaaaacaaaaatatagtcttgtttaacaaataaacaatagtcattctcaccacacacactaaaaaaaatagacaatagtcaatgtttgatagtctgaaatcgatagaaaagtgttcaaaccaaatcaatctgcaatatggactatagacatctctacaataataacgtgacaacataacgtaactatgagtctgtgacatgtcaaatacacagtatacactcaaggacatgtatacatataacacatggagcatagcatagctcatcatttagatttcttctaattacactactggtgattttcactcagagtcagggaaccagccaatgtggcttcaaaaactcctttgtaaagattcaagttcataaataaaattcagtttgcagaaaagaaaaaaaaaacagatggatcataattaattaatttccacataaaaagaagtttctaccatataatcatattactcataaaaatatattaatgtatcttaaactaattacagacttatttatttttctgataaatataaacataatcaaatagatagagttggattttaagttaaatatcctttgtattgtgtattaatcagaagaaatattatttttaataaacacaaaatcatatctaggagatgagtatatatctcttccagcatatgtactttaatcttagtagttatcaatcattgcaaaaaatatatgttaaaacatatcctaataaaaaaataatatattactatatgaaatttaaacacgttattttcttgtatttaaattatactaaattgatccttacagtatttctttgaatttttttatccttacaaatgttaccaaaaaatattaatttgtaagaagataattacaaacaaaagaaatgcaatgataaacaaaaaaaaaaaaaaggttaaaaagcgcaaacaaaaaaaatagaaattaattgtgaggataaatattacataattttatcttggaggatatgtaatttttattttttttattttgataagcatgatatatataatggagatgatggtaatgtttatgtttgaggaagttaagagctacatagagaggctccaagtatttattaaactcatctttctcacacgacctttcacctccaaagactcccaacaaaaatcataataaagaaatacaaaaacgtaaactttgccaagtttttttttcttcctttctttaactctctcactcccacgaattcgtgagaagaaaccttaaaacgttttttttccagagcacgaaaaaactccccacctcacttaaacttttttccttgtgcaggagacatcattccccatgaaagtcgaagcttttattcccgccgttttattgctctgttttggggtaatgttatgtttaaaaagctcgtgtgcgttgcagataggtaacaataatgagttgaagaattacataagttgggaagatttgagagttgtggaagatggaagaatagagagaagttttagcattaaggagaatagtaattgggtaaccacaaacgctaacgctaacgcgaacgctactaacgtgagaagagtgattgtggttgataaaaacggaggaggagattctgttacagttcaaggagctgttgatatggttcctgattccaattcacagagagttaaaatcttcattcttcctgggatttacaggtaacttacaaaaaaagatttaagacataaaccgtgtttgtttttttctttgtatgttattaatctttgagaaacgtctttgggagtgtggggttttgtttccgaagatttcgtttttttttttgtttttttttggtgtgataaaagcagttgaagctaaattcttgggttagtgggataatctaagcataagctgcttacgtaaataaaatcgtgggtctcaagaatctttgtctgtaaaaccgtagaataagaatctttgtctttgttatatactctgttctttttttgtcagaatctttgtctttgttatctactcttgttttttttcttcagaatctcttctctgctatgtgttgtttgcagggagaaggtgattgtgccgaaatcaaaaccgtatatttcgttcataggtaatgagagctatgcgggagatacagtgattagttggagcgataaagcttcagaccttggctgcgatggtaaagaactcggcacttatagaaccgcctctgtttccattgaatctgatttcttctgtgctactgccatcacttttgaggtcctaaaaccctctcttttactattattccttgtctactttctatgtgtattgtgtttttatgttttgaattgtttgtgatgtacggattgaggcagaacacggtggttgcagaggcaggggaacaggggaggcaagcggtggcgttgagaataattggggacaaagctgtgttctatagagttagggttttgggatcacaagacactctttttgatgacaatggatctcactacttttaccaatgctatatccaaggcaatgtagatttcatctttggcaatgcgaaatcactttaccaggcaaaaccccttccatttgatcttcttaaatcctttgtatcgaaatccatttgtaaagatattgatcgaagttttggtgtttggtaaccacaggactgtgatatccactcaaccgcaaagagatatggcgcgatcgcggctcatcatagagactcggagactgaagataccgggttctcctttgtgaactgtgatatcagtggtactgggcagatttacttaggaagggcttggggaaactactcaagaactgtttattcaaactgtttcatagctgatattatcactcctgtgggctggagtgactggaaacaccctgagaggcaaaggtaaaaaaaggatcttgaaaattgaaaactcatctctgaaactacagcatttctctctcaaaacaacatcaagcgaatttcttttgcaggaaagtgatgttcggggagtacaattgcaggggaagaggagcagagagaggaggccgagtaccgtggtcgaaaactcttaccagagatgaagtgaagccttttctgggaagagagttcatatatggagatcaatggctgagactctaaatcctttttcaaccggacataaaggtccagctagctaacaggagatgatgatctaattctactctattcatttgtaattagtttgaatttagagagaaatagaatctgcatgttttaactcataccaaagtaaatgaaacccaggttttggttttagataaactaaatttcttacaagctgatacgaagtggttttacatggagttttgtgacaataaggcaaaatacaaatggatatccttttctcctaataaacattgcataaataaaacctaaaacaaccagtactaatgaatcctatgcttagatgattggttaaaacaaatgcaaccaccaaaatcatgcctcttcaattttctatacaacctttacctactcctctctcctcagcaccaaccaagtcaaacccagaatcactttttctgcaaactatgtcaatttatatatatacataaaaagaaacatcaacgtttccagagatgtggcacgtaccagaattaccatcattatgtatgacttcaagcaagcatctttacgttgtcaccagcgtggtagtagtttttgatagggtgaagactgattctgatttgcgggccttctcatcattaagggtaacatcatcttctttgtggtcctccacggtattttcatggttgacataggttttagtttcgttacttccaacctctttatcctcttcttttgaaagtttgttttcgtcatcttccttaactaccacatctttatgctctttgttctgttctcctaaaagggaattgtacgctttctcaccttcaggttctgcctcctcaacaatatttggcatagcactgggttttgcctttgtgtcttttgaaagagtggacaacatggaaagcttggattccgagctactatcagaagatacaatagcgagtatttcgggtttaggatcgatatcaacccagctatctcccacccagtctctggaaatccgaatatcctttctgagcactgttaagcataagttctcccctaacaccgtgaaaacaaaacacatgttagtcgtaaggcagagatggagaaagtggaggcaactagagagtaaaagatgaatataggaacacactaaatcataccagggatatatattttcaagtcctcagtatccggtttgccagtggcaattacaacaccttcccaccaaccatcattccaccatgcatcaacagcttcaccaattgtaagatcaaagtatgctgttttaacatctcgaggagcaggtcggattgttgggcggttggacaaccttataccaagcttgtcaggcatagcagatttaaaagccggcacccattcctacacaaaacaatgaggaaaaaaaacacaattaggtgacaaacataagattaaaatagcttccatttccagaaactaaaattaaacagccaatggctgtggaagcaaatatatacctcaaggtttccatatccatcctcgtcctctatatcatcatactggagttttacctgtttccttgatacgtccaggacagtgcatctaaaccaacagcctctaataccgctatcttgacacagaaactctatttttgcatcagtcttaaccactccgttgtaacaaggatgtttctgaacattggttggtgaaggaaatcttttgcccgaggcattaagttttagtctcttacatgaagattcgtaagttgttaacagatgatcagacataattcttgctcgttttttcatgcttctctcagcaccaaccattacattctcaccctcactccattcttcatcttcctctatattcatcgcacagtctacaggaccagcctccatagaacttaagcaagacataatcggttggtccaaatatccacgcaatttactcaaatcaaaaggtttaactttgctgttcctgagttgccgatagcacatgtgtacccttgccaataaagaattcggaaaggaagccacacactcctcataatgctcacgggtcaagacagtggcaggaccatcaacacattctgcactgatgacctgtgaatgaggggtgataaaaacctcttttgggtttgggttcttgagagcaactgcacccttcacttcttttgtgtagtgaaaccacctcactttgaccttttttaggccacgcttatcctcatacatatcttccagatatgcaacgtaccgatcctcccctttgctcaagacaaagacaaaagattgaacctgaaaatccaaaagaagaattacgcctccaagtgagtagtctcatccaagatctttacagatacaaatcacaagaacagtcaacatatatcgaactatgcatgcactgatgccaagtcttcaacttacccctattgttgtcccatttctgcaaaatgatgggtaatgtttgagctgtttaccacacatccaaggagctcctgaccacataatctcccaactgtgaataatcaagtttatgggaagacggacctgtaagagagattttcccatcagtataacaggaaagtaaaatgcagtgacaattgtatgagagcaacaagcagctaaacatcacctcttcacttgcttgagctcgctgagcagtaaatccattgcttggaaattcgggagatccattagattcccctgactcacattttggtgactctgtaaatgacaatataacaagtgctttagaataatcagttataaagttagaagagaccaacataaaggaagaattcattccttctccactcaacagacaatttgtcacatatggtaaaagataaagataaatgcgtactcgaccagtttccttgtgtactctgcttagacagcattgaagtgagccaatccacaacttcccttctcgacctccatttgaagccagaatgaattgaattctcaggaccatgaatgcgcacaaactcctcagagacaacatagaacatgtgcctaacacttctctcagtaccaatgacagctaggatagattcaccggcagaatccttgaggaagtaatgaacaacacggttccctcgctcttgggagacaaaatgctccttccactcgacaaaatgatgatcattctcacacatttttcaaaataaaattgattcggcaagcatcaaacgctccaaaccctcctttacatcagataaaaacactaactactgccagttcaaagtcaaagtcttttgtcctaaatcaagttctaaagcaaccccaacgcaacaatctctatataccaatgacagtggaaacccttaaaaacctttaatctaatgaccaaacaatacccctaaaatcaatcccctgtgccgtggaaatcctaaagcaaatcactctaatgcataactctgatcaacatctttcccagcttcctacaacacagctaaatcgtcgaagtctctgtaaatttccagcttttaagaaatcaaataatccggacgaagaagaagttaggattagagaaagcagataagaacccagtgagcggagagttatgaagatctgtagaaagatcagagactaagccatggaaacactgatctaagctcgagagcgccgccaaacaccaagatacgactttgactgcggtaatcagcttaagcatgacgaagacgaaatgggcatctcaaaattttcagcttagaatagatttataccgattcctctaaggtttgtacagaacaaacaaatgattcaggagaaaaaaaaagtgaactttagaagcttagaatagcggcgagaagacaaaatcgacgatcgatttcggagatggagaagaagaagaaaatgagttctgattaaggtaaacttggagaaaataaggtattcccatggatgatgatctctcttctctctctctctctctctcaaagtcacaggggtttggcaaaagcagctgctttggtgaaggaagaagagagagagaagaagaaattgtgcaattactacgaaatgacgagaatatcaggaagttattgggccttatatgggtctttaatgggccttaaatgaccgtggccgactaaaaaaaaaagtcaacgaaaagtcaaatagatctctgtcttttatttttttgttctctctcgtctctctggctaccgagaaaacagagaacgttaagaatcattgcttttctcgagaaaataatatttttaattgaatcgagaaactcttcaaagttgaattaagaagaatattacctcaattgagatttgagagacacgcatagagagattgattattgcatcgaatcaagcttggtttgttagtaatggcgggaatagctttagttttagatctactgaagaaatctcaatctaagaacactctccactcatcttccttctattccgcctccgccgccgctgtttctgctgccgcctctgctccttttgcgtctaggtttctcttcgggtatgtattctctctctctgtagtggatttggatttgttttgactttcactggatcgtggtggattgagttattggattgattactaggtttctgattttgtttctgattagggtttagaaattcagaattgatcatcttctattgctcaattgaataagaaaggttgcagatttatatcagttactagtaaagatcatattttgcaatccaatttgaagtatagtttaattgtggtgagattacaattatcgatgaatagttttagatatggtttttgatgttcagggcgttttgagttttacaagctctgtttctattctatatagatctcttgataggtttctgcattcatgtgtctttttgatactctcggtgattaccacttcatagagaactaattggcatgattggttgtgctacgacattgactcagattatttatgtttacagttcttttgagcctagagttgcgtattgtgatgctgctgctgcaatagatgatgattaccttggtgctatacggaaaatgtctgcggatgttttgcagcgtcaaccccttgcgtatatttctaggtccaaggaatacaatatccagccaaaaccagttctctcggcctttgagttcagggcacttgcaatgactacagtgagatcccttttgatgttttatttgcctcttttggagcctaaaacggcttcagaggatgatgatgatttcctaaacaatgctgcagaagaaaaccgccacacagacttgattgttcctcttaaaaagtcagcaaagcaaattgcccgtgaggttagtatgcatttaaggttcttaccatctgtagttgcttcatgatgtcatggtttaaactgctaatttcggtgttatgatccagaccacagttgtgaccactcggagagtccttgaaaggctggctctgagttatgtctcacagcgtatggcatggaaacttctaaagggtaacatcatcttccattacttttgcttccacaacaaacttgcgttgtaaaaaaagttagtagacatatttagctcgatgaactaatagagcggagaacataaatatattatgcagatgtgcctcagtcggctttacgcaaggctcagagagggttgccgacacatgtatatatctttaaagtcagccaaacaactcttagaggtataataaaacattttggtttctctactcttcgtgaccctcccatcaaatgctccttctttttccagatcagacattgtttagttctcctgaagcctatatgcatgttctgtctttggctgtgtttatgcaggtcacttcctgggaatcgcagcatcatgggtagttcaagtaggcattgaaatctacagatgtgtgttcccgaatgttaaacccgaggaagaagaagaagaggagaaagtcgagatatcacagcaagctaaggatctcggaaacaaagttgtgggtatcacagtacgatgtggcgcgtccttagtatttgctgccattggagccgggatatgttcttgccttatccgtccctccacgggccaatggatcggtaagctcacctcacccattattggaactttacagatagaactcgatagaattttaactttttggaccattgattgatgtgtattgtttgttctctatgtaggttgcgcgctgggagacttggctggtccgatggttgtttcggtttgcctgcagaagactcttcaagctgattattaagttcttgtgtggaaattgaattcttctacttgaatcttgatgatccaaatgaaatcatagagcttgttttttgtttctgaaatttcttattgtcttcactgaaccttaaaaacaatgatcaatagatttctcaaaatgtacctacttttgacaacagcacaataagtcaggtatttattttcctcggattttagttttgtatctgcgatttttcttctctttttacttttgtaagtagggattttgtgaactatcctcttatgcaaacgtgaaaaagaatgcttggaagaaaaattagtatttgaagtatggttcagctaaaccaaaagcctagcttgggattcgagatgattgggaatggagaactagtttgtttggtttagggttcgggtcaactaaagattcccataccggatttaatttgaacttcttttggactgcaattaggcttattttgggttcggggtcagttttggatttggccatttgggttagtttataggcctcaagtctccaagtccaactagacaaaactcgaaaatcgatattgtgaagtgctcttttatctttcactcttcacacaagcatgcattaagtgaatcaaccaagcatgcattagttttggtgtctaaatctctcaggcccttattaatacctacctatgatctttctcaaatctttggtacaatctcactcatttttttatcaaccgaatatacctaaaaatctctaaaaacgatgatcattgctgatttgctaaaagagggagagatattttcaattgttaatgtatagactagagactttaaagggagacacatcatcactaccaccacacaaacacgaaactcatatgaatggctccaaataagaagattgtcttagttagaaaatggacttccctctttaatataaatattaaatactttcacctactttctccttgcacaccaagccacaactgttttatacttgtccccacctaagataatgaatgcatgaatgcatggttttcaacaccctgaaaaagtaaaccggtaaaattcatcgtgggagtcaaaattggtagagtttaacatgcttattattaatttgcacacccatttctgttgtatgagtgtaatccacacacaaaaaaattgtttagcaaattgttacacaaaacagagcttaggtaataagaaaattagcaaattgttacagaaaatatattctcctaagttgtctagcctctagtatcccgataccatacaatccacaaaacagaggatggaataaagtgagagaggaaggaacagaacaatacataagaaataaaaagcaacataaaagattgggtgttcttgttagttaattagaagaatgttaaattgtcattataaaatattttttaaagaatgttaaatttctagaaaacttatctttgtgggatgaagagaatattattttcttttaaaaaaagttttgtattgttaaatctaaacatatacatcaaactttaaaaatcaaagcaaaaaaagaatatctctccttttgcatgcttttgacatattgaatttaataggtaattttcttaattaagatgttaaacttatggattcatgatttgaacaaaactgaaaaaagtatatggaagcgttggtgagattcatacctatcaaaatgaacaaaaggatcaccaaccgaatagtaaaaccaactactgtatttatcatggccatttttcttcttctttcttaatttctctctttattaaaaatttgttaattatatcataatcttaactgttttatataaaaagtgttttttcctagaatatacaaggtattccgcaaaaaatgccaataaaaatggttttaaattaaaaagaaagaccaaaactcatataacctcaaaaacatagtatgttatttttagttaatataaatattaaatactttcacctactttctccttgcacaccacaactgttttatacttgtccccacctaagataatgagtgcatgaatgcatgaaccatcattggccgatgcgtttcctggtgcatgtagctcacagccgtcgttctcacattttgttatttatgatcatacttttttttcattaaaaggaaaaaggtttactggtttggtttagaacaagaactactcgttataatcatacttttgtttaattaaaaaaacaaaaacaaataatttctagtacatcttatattacatactatagtttgatgataaaaataaaattcaaatgacgattatcatgtcgaaaagacaaataataattgtcttactgacctacctgcctgcctctatatatatactagtctttggtcgcctttactataaccaaacatcgagcttgccttagagtttgtctcaagcttctccttttttggtattttgtcttaagcttccttgcttctctttcttcttcttctctactctttctctctatttcaaaccttcgttttctttccttttttgtataaaatcttaaaatcaaccaagacaatggaaatgaaattgctctttacatcggctttcacccaaatgttcggctactcgaaccatatggatcaagccagcaactgccaaagcacccgcaacaaaattataaagatgatgaagaaagaagaattcccaagtggattccaagtccctcttcactaccctaaatactccaagtctgattacgaagttatggatgatctccgccttgacttgctcctcaaacaatatggattctcctttgaaggatctcttgaagacaagagggtttttgcaattgaatcatttctctggcctgatcagctttagatggtctatgttggtgttgaatgatcttatatcgctctccacatgcatatcaatgagcctatactcgagtggttgaatgtttttaaaattatgtcaaattaccatgtatatcaatcacttagtaatgttttagaactatgtcaaatactagtgtgtgttatatttctttgtgtgtggggatgttttgaagtatgcaattcttcacatatatatgtatcatatgagtgcattaataacatctttgatgtcatgtataacactaaaaaaatgtgatttatcgacttataaaaatcttaacatattgacattaacataaaacatatagattattgtatgatatagattaaacatgacgtcatgctggatattttggcttattggcttgtacattacttgtgattatgagtgtataatataaaactaattactagatttgcacaaaaaaaaaacagaaggatagaaaactaactagaaaattaagacattacatacattcttctatatgaaaaaaaacatttaaaaaacaaaacaaaacatttttatactaagatactaatgaaaaatcctatcaagaaaatgaagaagatcataaaaacaaaattatcggatttgaagagaataaattttgaccaaaaaaaaagaagataattaaaataaaataaaaacaagaattggccaactgtgagaacatcatcaatgaagaccaattgcgagatccgacaacaccgcttcttttgatttcgatcttactttcctgggtatgtctcaattcttcttcctccttcagttcgtgttctgtgtctgattgattactctcacaaaactcatcttttcattgtctaaaggtctaatctttagctataactcaaaatctgtatctaagttctgacaagtttctgttacgaaattcaaattttttgatacatatgttcatttctcagaacaggagatgtcaattttggcgatggttttcgtaacataaacatgagatttgattgttctgtgcagatctcatagttaatctggtttgagtctagaaatgtcgagtgatgcagctcgtacgccattgttacccactgagaagatagataccatggctcaagatttcaacctgaactcaagaacttcttcttcaagaaaacgaagattgcgtcgctctagaagtgctcctcgtggtgattgtatgtacaatgatgatgtcaaaatcgacgaaccacctcctcatccgagtaaaatcccaatgttcagtgatctaaacccgaatctcaggcgagtgatcatgttcttggctttatatcttaccattggtacgctctgtttctacctcgtgagagaccagatctccggtcataaaaccagtggtgtggtagatgctctctatttctgtatagtaacgatgacaactgttggatacggtgaccttgtccctaatagttccgcctcaaggctacttgcttgtgccttcgtcttctcgggaatggtcctcgttggtcacctcttaagtcgagcggcggattatctagtggagaaacaagaggctttgctcgttagggctttccatttgcgtcaaagctttggtccaacagacattctcaaggagttgcatactaacaagttgagatacaaatgctatgctacatgccttgtccttgtagtcctcttcattgttggcacgattttccttgtaatggttgagaaaatgccggttatctcagctttctactgcgtctgctccacggttacaacattgggttatggagataagagctttaactcggaagccggacgcctttttgctgtgttttggatcttgacgagcagcatatgtttggctcagtttttcctttatgtagctgagctaaatacagaaaacaaacagagggcgttggtgaaatgggttttaacgcgaagaatcacaaacaatgatctcgaagcagctgatctcgatgaagatggagttgttgggtaagaaagacatcagacatattctatcttctgtttccttcttcctcttcttattcttttttttttgtctattgtgtgttgcagagctgcagagtttattgtgtataaactgaaagaaatgggtaagattgatgagaaagatatttctgggataatggatgagttcgagcaacttgattacgatgaatcaggaactctcacgacttctgacatcgttttagctcagaccacgtctcagattcaaaggtaagcctcatcatcatcatcatcttgcgaagacgaatcagaatctttgtttagttataccttcacacaacaaaaagccgaagagagtgaacagtttttcgaaattttgtttgttttttcctgtttgtgtttgtaatgtaatgccacactctaactctttgatcgtttcttgatgctgagtgtataattttacatacatctatacatatgaagctctctagtgttatgctccatgaccaagaattcatggatgattctctcaaaggacagggtatgaagactgttttattgctttaaacttttttggtattttgattgatacaaaacattttcaaaagatagcggtttctcgcgttatggaagtcgtcgtttctcgaactgagattcatggcaatgagggtcaagccagtctcttgaaacaccttttcccatattagttcctttctctgcacctgcacccccgcctacaagctctcttaagttagccattttgttttctcgaccagagccgctcattttctgatctgcttccttgagcatctgcttaaaccgctgcttgcggctcgatgtgttactaccaccatcttgtagctgcgaaggaggagctccatgtggtcctaagtagatgttttcttcagctttactctacaaaatcatacaatgagagataaagagttaacaacatttttttgaaacttgtcttgtacgtaagaaatcaatcactaaccttaggagaagaaggttttgatgtttcaacttctgaatcattattattattaaccttgtcttcttcaatctccaagctcggaatcacaaacccatcagtgtctgccaccaatcaaatgatcgactcaagatttgtaattacacaagaagatacagaaatttgaatgattgaatccgatcacataaacacgaaagaaccctaatttcaataaagaaatgcaactgaatcgattaaagcgaaattacttaccccattcatcattgtcttctaccttgggaagattcgtctgcattacagatgtatccattgaagactaacgttcatggacactctccgaaggaccaacagtttacaaaaaataatttctcagctctttggcttttgaatgtgaatttatgtatcaattttacaataattcgattatttttcacctgattgatttttcgcgaaaccctaaatgttagagcttgggaaaagggggaaacagataaataatgatggtgttgaggcgaatcggatcggatccggattcgattgtttgcgattgacacggcggagaaggagatgttagggatacttttgtaatctactatcgatggtcggtattcagccacgtgtcagctactcattcgtgaaactcctagacgaaaatgttgcgttgtgctttgtgaaacaaaactagtactatgtgtttggttttttgtttatattagggaaattgcactctatatacatataaaattataaaattaagtattagaaaaaactactctcgaatcttttctctctatcatgaaaatacccttatatctctataccatatttgcttttgacgttaaatattttgttaccttttaataataatgttatcatcttcccataattatataatctttaaaatcaaatcgttggttcaatagctggtaatttgtttatatcgtcaattgtattattaacatgttaagtaggtttgtaccctaagttttttcatccatatatcaaaatcctatccatattttgctaacaatattatcccgataatacgttatctattaactattctgatgcacgtattttttctacatgattattcagtcgcaagtcaacttttatggtattcatgttaaatattttattatcttttaataataatgttatcgtcttcgcatatatatgtctttgaaatctaaacattggtttaataactgaaaatttgcttatatcgtcaaatatattattaacatattaagttggtttgtacaccatgtcatttcatccatacatcaaaccccatccatatttcgctaacaatattatctcgataatgcgttatctgctaattatcagagttttaccatatcactttgtaggggtatatttgtcatatagattttaattgaaaagagatacctaaataaatggtattcatgtacagattcttaattatttgatggtccatgtatagatttttaaatcaccctttatattattgctttgtctttttttttttttgtgaacattattgctttgtctctatatctttcatattttcacaaatgcagtatgccatatcattttgtagttacaagagtgtagagttactatgactatgaaaaacaattaagtaaaatttgcttattataacttttaagatataagaaatcaaattactttttcaaggaagcacaaagcataataacgaaatcgttggatccaatccaacaacactcgtatcggatttttttttggatatttaccacaacagctaacagtagtaaaagttgtatctccaaatgaaagcacactattaatatttcaagattatcgaaatttgagtatcaaacaatttaaccgccaactcttgttcttttattaaaacaatttttcagttcatcgctatcaacgtttcacaatcttacgatttaataacatcatttcttagataatttcttttgttagtattatatgatatcatatcatatcatatcatatcattgatatcatatcattaaccatctcatgattaccattgaaaacaaatggagtcttttgtgagacaaaggtaggttcctaaaggataaagtgacaattccctaaatttctttaaacaatcagaggaagaaataatgatcacttcagttgagaatattttcaataaatcagatcgacaatcctagttgacaaccaaaaaaataaacgacaaacttatgaagggggtaacttctagagaaagattaaactagtacaactttacaagtagttttcaaccaaagcttaatgatactaatatttccttaacaaaaacaagcatccttaattagtgggcttcacatggatttaccaaattccaaagctttttatagatttttcaaagtgttttattttttcaaatacgtacatgcaaaaaccaatgcttttccttttctcgaaaaaatttagttgcaggtgtaattatgtaagtgtgagaaaacaaataaagctttcttgtttggttcctctgacttcctctgatttctctctctctctttctcagacttgtctcaaacttttcaagaactcagattcgtctcttttcaatctctcttcttaaatcaagatccaaacatcgaaactttggtttaaagatttgaataagtcataactcaaagatccattaacatcaatggataacgacacaatctcgacttctctttataactagctctgtctttgtttttgctttgaattaaataaagtttctataatggtggaaaaatctgatgatgaaaagcattttactcggtgttgctttctttcacagctgtcactgctgttttttcttgtaaccctaatttcatctgtagctttcctctgtttcttgaactctcaaggagtctcctctctcacaataaccatggcaatcttgttcgtctcctcttctgttttcttgttacgaatcttcaaggaaaagacaagactatgtttggctgaggggtcccaaggagaaggctacgattatgaagatgatgatgatgatgatggtctcattgagattgatcttgtgagcgaagaagcagagactatagaggcaatgagaaacattaatcaaagtcgactgagaattaggattgaagaagaacaagaagaagatattgatgatgtgaatatggaagaagataatcttattgagattgatatttccattggatccattaaaagacgaatgtaatttagtttaatagatctcatgatcacaccatcgtgtaatccgattttttcatttcaaatgtacaaaggaaatccaacattttaatatattattgttctagatatttggtgattagggtttagggttttaggagatatatatcaatccctttttatagatgcatatatatatatatatatatatatatatatatatatagtactaattaactgtggtagttcttttgcattaagattgtgtaatagattgttgacaaaagacaaaagattgtgtaatagattcctgaaaggttttgtaaaacaaaacaaaagagttgcaatttcttcgaaagtactctccgagcataccccaaactccgctaacttattttctatgccaaaacacttgtctttctcttattgcagagtatatttttcttcttcttcactatatcatttaaacatataacttctttttaccaaatttttggttattgaaaaacacttttcctttaactttacgaatcaatatacaagcataacttataatcatccaccacactaatcatcatgcactttgttaattgttatggcttatgagtcttatgacttaacatcctttttaatctggtaaatctagcaaataggaatcctctgcaatctgaatcttgtttcgaaatttgagagtatgttgatcttgcgaaaatcgaaacaatctttgcaatgtaagaagatatgaagccgcatatgactaacaagaaagttggtctttatgtcgtctaaatcagaatataagagcatctccattgcctatgaaactcaggagagttttagaaaactcaaatattaatatttaatttaaaaatattggaccatgaaatatgtaagcggaagagccacaaaacaactattattttgtttttgttctttttttagctaaataagtaataaaatattcaaaataaaaagaaggaaaaaatgaaaataaagaaaggaaattcaacatttctatatagaattagttattaccattaagttaaatctaaaaaagaaagaaatcttatccttttaaaaaatagtcaataccaaaattaatttcattatcaaaatgtaatacacttattatatatggaacaaaattgtcaaatacaataaggttaaaatctactttacagtattgataaatgataatcaatcatgactttattgagatatcaaatttaaccttatcatcaaaacataaaacatagtatagtatatatgagaaaaactatacaactagaaattatacgtagaaaaaatcgttaaacacccgctaaaaatcatactataaaacacaatagtatacatagaaaaaccgttaaacacccgccaagtttagtaaaaaaaccgttaaacacccgcaaaaaattagtaagtatacaaatttattttatatgatcacaatattatacgtagaaaaaaccgttaaacacccgccaaatctaatactactaaatatcgatcataacttcattaaatgaaaaaaaaactcaaacataatattaagatctacataacttcattaaaatgattaaagatctaattatttttcattttttggggcaaatatttagatcttctaatctaatagggaatgaactcaaagaaagatatttgtgtttgaagataagtaaactgtaccggaagttgggttgtgtctaccgtcaccgatccacgagagtatcgaacacgaaatctgaaccgttcacaggtccgacgtggcaataaactgtatttaaaatccggttttgagtctgaatccttaatagaaagagatcggagcgttggtatcccttttttcttctctgattcgaacagaataaataagaaccccaaaaaaaaaaaaagctcactgctttgaagcctttggatagcgaaggtgagattccaaagtcttctcctttcgagtctctttgtacactctgagcttgttctctttgtttagcggttgaatcttcatagcttcgtttatattcgcatgtggttttttttttttttggttttgattgttgtcttgcttcttgaagtcgcgtttagggtttgtgtttttttgtgttctctttgatttgtgaatttgtgttagtttagtttaggtttagagagagactaattttgatttctgtatgagctcttggattcctctgttgttgtggtttggatctaaatctatgttttataccacaaagtattcagattgaggaaaattttggttacccttcgtttttgatttggaattgaattatgaagaacttattgtatgttgtctatttcctttaaaaattgaatcttttttctcaatttctcgtgttagagcccattgaagtttttattgagttgtatgtagaaagatgggatgcaatgaagtttacatgttgatataagttttgggttatgtaacccttcttttgcgtgacttttgtttcatgaaatttctgccgctattgtgtaagtttttaacactgtacttatattttctacagcgttctggtgttttctggctttaagatctactgaacattgggtgtgagcaatgggggaagaagatacaaaagtcattgtggagccaacggcaaatgggactagctctcttcaaaagacatcagatgcaatcagtggaaaggaagtgcaggagaatgctagtggcaaggaagtgcaggagagtaagaaagaagaggatactggactcgagaaaatggagatagatgatgagggtaagcaacatgaaggagaaagtgagacaggagataaagaggtggaggttacagaagaagaaaagaaagatgtcggtgaagacaaggaacaaccagaagctgataaaatggatgaagacacagatgacaagaacttgaaagctgatgatggtgtttctggcgttgctactgaggaagatgctgtaatgaaggaaagtgtggagtctgctgacaataaagatgccgaaaatccagaaggagagcaagagaaagaatcaaaggaggagaaactggaaggagggaaagcaaatggaaacgaagaaggggatacggaagagaagttggttggtggagacaaaggggacgatgttgatgaggctgaaaaggtagagaatgtggatgaagatgacaaagaagaggcactgaaggagaagaatgaggccgaactggctgaagaggaggaaacaaataaaggagaggaagtgaaggaagcaaacaaagaagatgatgtggaggcagacactaaggtcgctgagccagaagtggaagacaaaaaaacggagagtaaggacgagaatgaagataaagaagaagagaaggaagatgagaaagaagagagtatggatgataaggaagatgaaaaggaagagagcaatgatgatgataaggaagatgaaaaagaagagagcaatgatgataaggaagacaaaaaagaagatatcaagaagtctaacaagcgagggaaagggaagactgagaagactcgcgggaagacaaagagtgatgaagaaaagaaggatatagaacctaagactccttttttctctgatcgccctgtccgtgagcgaaagtctgttgaaaggcttgttgcggtggttgataaagattcttcaagggaattccatgttgaaaaggtttgccaatagtttactttgtttggtttatatatagtgtttcacggttagatctattagtaatttgcttttgataatacagggaaaagggacacctctcaaagatattcccaatggtatgttcatattctacatattatccttagtccctctcatccttaattagtcgttttgttgaaccgtctttttggctttagttttcttaggacttactcgagctcatagtcgtttctattactggatggctctttgtgactttgtaggcttgattttcttttctctatattttatttgtttctggctttgtcaatcttttttatgttagatgttttccttttgatttagtgactagagcctggtttaaaatgcaagaattcccatggctttgaagttaattgtcatgattacattctctaaatacttcattggtcccatctactcaatagtttatctgctctttaaatgaaattaataacgtgtatttatctctgcagttgcttacaaggtatcaaggaagaagtctgatgaagttttcaagcagttacacacaattctattcggtgggaagagagtaaaagtgagtatctctttgtgcccttttccattttagcttctccattagacaatttggtaaactgtcaatctcatgcatgttcttgtggggggttccaatgaagtttgaagttcttaggactgcattgtggtatcgttaagattatagagaatctgctaatcatattcatatgtgactcgattttcttactttgacaggctactcagctcaaggcacacatattacgcttttctggttacaaatggcaaggagatgaggtgggcgagacaacacattaaaattttataaccaggctcatctcatatttcttacataattttcttcaatgatatttgacaggaaaaggcaaaattgaaagtcaaagaaaagtttgagaaaatcaacaaagaaaaattgctggagttttgcgatttatttgacatatcagttgctaaggctaccacaaagaaggttattaaggctacttatttctaagttccgttgtttggagtttcttttactgtaatcaacttggcaactgactggatggtacttttcctccaatataggaagatattgtgacaaagctggttgagtttttggagaaacctcatgcaacaactgatgttctagtcaatgagaaagagaaggtaagtttggtgctggaaaggccttctgttcagcaattaagcctgaaaatttattgtgcatattacaactttctattttttctattgaatagggagtgaagcgcaaaagaactcctaagaaaagttcacctgcagctggaagttcatcttcaaaacgatcagcaaaggtattactcaatagcttagaactggaggtttaaatccttgtgctagaaatttcgtctttgtgtctggtccaagtacctgaattctgattcgtttctttgggttctttacagagccaaaaaaagaccgaggaagcaacaaggactaacaaaaagagtgtagctcattctgatgatgagtctgaggaagagaaagaggacgacgaagaagaagagaaagagcaggaggttgaggaggaagaggaggagaatgaaaatgggattcctgataaatctgaggacgaggctcctcagctttctgaaagtgaggagaatgttgaatccgaggaggagtcagaggaagaaactaaaaagaagaaacgtggttctaggacatcatctgataagaaagaatcagcagggaaatccagaagcaagaaaactgcagtccctacgaaatccagtccaccaaagaaagctactcaaaagcgctcagcaggtaaacggaagaagagtgatgacgacagtgatacaagtccaaaggcatcttctaagaggaagaagactgaaaaaccggccaaggagcaggccgcagcccctttaaaatctgtatcaaaagaaaagccaggtttggtcataccattcctttccaaaaaatctttcatttaagaatgaagtatatatgagtacatgctttgtcagaagcttgagcaatcttaacctttgatcttatactgcagaagtttatccaatattgcagccattttttctttcttttttctgacactatgtttaccctgtgtttgttattcttgttttagtaataggaaagagaggcggaaaagggaaagacaaaaacaaggagcctagcgatgaagaattgaaaactgcaattattgatatcttgaaaggggtggacttcaacacggtgaggatttgaaccatgaacatctgtgtcattaaattacagtaaatgagcacagaagatagatatctaacaaatgctttatcattttctgacaggccactttcactgacatcctcaagcgactaggtacagaggagatattttcctagcagttattttcttgtttgatggtctttgcattggtttctgttttgtttgattaacagatgcattgtttttgcccgtctttcagatgctaagttcaacatcagtctcgcctcaaaaaaatcatctataaagcggatgatccaagatgagctaactaagctagcagatgaagccgaggatgaggaaggagaagaagaggatgctgagcatgaggaagaagaagagaaagagaaagctaaaggatcgggtggtggagaggaggttaaagcttaatcacaaaggacatgaatctagttgacttactagctaatcgtcaagggtgcctcctcgattgcctagccttggtcattaggcaaatatatcagagaatgtaatttgttggttgtttagtctggaattgtactacaagcagatatatttttttttctaaaaaaacttttggagtcggagggaggacgacgctgagaagtagtagttttaagataagcagctttgtttgtgtataccatttaacataagctcctttaggattcatgcccaacttgaacacccttttgatttttgggtttttattagtttctctcatgcaatttcgtttctgtactatattactttgcccgttttgttttggtcaagtttgtatgatgccgacactaatgatactgacaatcaagaccatgcagagaaagaagagagacacaagaaaataattcatatcgacctattcaaacaaaagaaacctattctactgaataaagcaatgtctaaccagcagggcagaacaaggaagaatcaacttggccagtgctaatgaagaataaaggatctatgccattgatgtggatgtgttcatagctacagaaacttaaagaaaatccatgaaaatgaagaaatgtaacttctattatgtacacacttgaacaaggagcgaccagatttccttttcaacaaaaaaaaaaaatgatctactacatcacttttggaaatcacaaaaacacaatcccaaaggatgctcatgctgttacatttgtcatgtctcatgacctctgaagttcctaaggcagatgaggagcttacaatatgatagatacatacaatacagcccaaatggctaaaacttggagaaacaagatcagtaacactggccaggctaactatttggctgcaactaatacaactacacaacaacaaattcagaaacagttaaaacaagaacatctaaacacaaatggatggaaacccaaaaggccaaaacatcaccacaacacactggtctttagaagtttcacataaaaaatggcaaaaggaaaggtgtctaataacttaaagaaggtaaacgtttgccaagtttctttccacttctaggtaactaagctgagttgaagaagagatttcaccagtaagagtcttcaatctttgacaagagtctgcctttctatcttcttcctcatcttgctcttcttccataagggggtttatagttttgcagtaactctcaaagtcaatctacccataatgttatgaatttaagaagacaacagaaaccatagtcagtaaagaaaagggcaaaagtataaaccacaatgataactatcaactcgaaaaatcattgagctacaagagtatacacaagttagacaatatgcccttgcagacggctaaattttgatcagaaaaacgaaccaggccagtaactagtcaaagtcttaaagcaaaaaaatcaaaaagaatggtagaatttacaatacataaggaacaaaagttaccatcagattcaactacttacttttatctgatactcattcagtagtaagccgccttcttttcccataatcagtatcccttgattttgagcgatggttatcctcgcgagacaaccgcgatttgttgtgtcctctggatgatcggcctctgttccattcctcatcatgttcaggttcgtccctgtgtctagtacgatgatcaccaccatatcgttctcgttcttctctatgacgatccctctccctttccctttctctgtcacgaacatgttctctggagcgttcacgatccttatgatgatgttccctctcacgctcacgaccggtgtctctatcatcacgatgccttctctctggcatatcataaccgtgaccaacatctttctccctcggtatgtccctttcataaccagcatctttatcctcacgattccttctatcagatgaaccagaccattccctttctgaagctctttctttttccttcacaggatttggacgagcccctctttcgtgattaacctctccatactgatgatcagatgcagcttcctccccataactcgattccgcagctcttccactacccagatcttcaccagcaccccaccctccactgttaggatcccacattcccatattatgccctccatcaacaccagcattaggcatcattcccattccattcatcggcatccctcgtccaaaaaatgctggattcacatgaggtgccactccaggtaaaccaactcctcctacaggagggaatgatgacaaaagcccaggaaactgtggacctggagccccagggaatcctccataccctcccattctcgccatcggtccaccaaaagcttgttcaaacccttgccccatcattggttgatgcatcatattcataggaggccctgtacccattccttgaccaaacccaccattacccatcaaacctcttccacccatcccattaggcctattcctcattggaccacctggtcctctaccacccattccttgagcattgcctctaccccaattacctctaccaaatcctctattttccccaccttggaaattcccgccaatggcgttgttgttgttgttattgttgttgttggccacgagtggtttacttggaggatcagcaggccctcctctcttagcttgtgcaattacagattgagcctgttgggtcctattcacctgtgcctctcccattctcttaaccgaatatggggacgcatactcaacaacacaaggcctaccgttgaatggatacccattcagcgcatctttgcaagccgaagctgccacaggatcatagaactctacttgacaataccctttcgacttcccactagctttctcatcaaagaacttaacctccttcactgcaccatacttgcacaactctgcctcaagctccgcatcagttgtccaccaatgcagatcccctacgaaaagaaaagctccaccgcctcctccaccaccagttcccccgccaacaacaccaggcatagcgatattagctccgttcccaaccatgttactaccaggtccaggaggaatcccgccattaacattacccatcacaggtctcatcaaattctcgttattccccaacacaggcggtggtggcaagagaccctgcgaaatattattccctctaggtgcctcgagatcattagcccgattagaagcttgccctagctcaactctcagcccacctccagtaccagtaccaattccaccaggaatctcctggctaacatcgcttaccttaacctcctgagctccatatccactagaagcgaccaccacatcagtaccacttccacttcctcctcctcctgactctgcttctgcttctttctcaacgctctcaccaaccaaaccaggtatcgaaatcgaaacctcagcttcacctaaaactggttcaaccctatcttcctcctccatattaaccttctccttttcctcgtttctagatcccgcttcgtcgttctttttcatagactgaagaaacccttctccaacattaacgtcgttataaagatcctcataatcatcatcctcttcctccgccataaacccgtcgtcagcaacggcagatatcgcctcgttttgatgaaattgatccatctgatctctcccatctccctcatccatcttaaaagactcttccttgtgataaaaaaaaaagctcctttctcgaatcagatttatcacaagcttacgttatcactcgctcgaacatgaacaatctcaataaaagaagagattttgcagaaattttgtcaccggagacaggacctgttgctagaaaccctaatccggtagatttgtgaaatttcttggattttcttttttgatttctttacaattaaaattatttttttcctcgatggaatccaactaatttcactaacatgcaccgtacacagtcgcgcattgtagagcctttttctagtgtagagatgacacgtgttttccgaatttacgagaactaacaacaatccaatacgcgtggtttcatgacccagaacaaatgggcttgcttttaatgggctcacttatgtgaactacctgtcgttcaaactttcgaaaacttattaaacgactcgtcgtctgatcatttctgaataaaacttcctgtcgtctcataataaccggttttagccggttaacggctacttcacttccgacaatacaggcgccaccaacggtcatatatctctcgattatcacaattcacaacgtttcgtgtttaaaataattctctttcttataataaatccattaaccgaaacttgcaaatacttattttactaagaactgagaatcagaacactttggatttttgttatctttcccagaatcagacaaaacaagaaaaacgatgcgtcggtttgctgtaatttacatttttgtcttcttaatttccatttctggtaatgtaaaagcggccaatgcacccgctcaatcgccgagactcgccgtgaaacatcatcctccggcaaaatctcatcatcttgttatttctccgttaaaggctccgacaaagtctcctcaaacgcccactttacatccgccggcaaaatctcatcgtgttatttctccgtcgaagtctcctttaactcctactttacatcctccggtgatccaaaaatctccagaggcaccatcttcgacgaagcaaacatcgccttcaaagtctccggagaaatcctctgtttcctctccggcggcctttgtgactccatcgatatcccctgttctttctccggcgacttccccatcttggaccactgcatctccatcgaaatcacctgtttttactccgacgaattcccctgtttcctctcgaaccattgcttctccattgaaatcccctgtttcgtctccggcgacttcccctgttacatctcgtaccattgcgtctcctctgaaatcccctgtttcatctccggtgacttcccctgtttcctctccgactacatccacgactcctgtctctacgcctgcaacttcccctgtatcccctcccactacaattccagggaagtctccaatctctgctccaatgataagtcccaccacctcaatagaatcgcctgccaccaccccatcaaaccaaccaccagtctccgccgatgctccatatatcgcagcaacatcgccagtaacaacccctgatattccatcaactccagcgaatacgccggacatatttccttacggacgaggtccggtgagtagttctgcaccagcgacggcgaatctggctccagagactgctgaggttcccgccggagccaagtcggcttctaaattcgttcaacatgatctcctatgcatatttttgatcttagtagccactttggttcttccagctaactagctttttgtcagactataagaagactcttcagtatatcttgtaattctaatgaacaagatacttacttgttttgtattgattactttatagtatattaatgttggtagattatatttgttagtacaatatgttttcgtaaaaacaccattttcttattccatgatatagctatgaaaaaaatcaacaaacttaatagaaacttgataaaaagaagtttataaagcaacattcaaacggaagaaacaaatgacatttctcacatagaaagtttacttgaatcctccaaatcattaacttgtgcaaacctgaagggataatcttggaactgcttcacattgttgaacatactgtttcctaaaccccaatgtattggctccatataagctgtcctctgtaccatcggaccatatggaccatccgaacaactcccgtaaaacaagctttgcccgttcgctatcatcggctctgtcacattcgagaaggaagacacttccgcagtatttgaggtcatctggttattaaaagggaagaaagagagcccgttgtaatccatagtaggcagaggaaacaactgatactgctcaaaacattgccgattgtaaccgcataaaccaagttggtcattagaccaacaactagtgtcaggaaatgtctgattcctattcgtagcctcttggatcttgttttctactgccatgaaaaccgcatagaggtcatttaaagaacactggtcgagctttttgtcccatgtaggatactttgtcgcaatcgtcggtttctccaccttagtgttgtttttctccaagcattcttgcacggtgtatgtcttggtgcagctgcttgacgcagtgtctctgtacttggttaagatttcacggactttgctcccatcctttggccataactcgggctccatgaccatttcgtcccctgctctgctcgggccgtacacaatgacacaagtgtccacaccgcagagtgttgagaactcactggctttcttatacaaacatgctttcctcttcttgtaagtcgttatcctcgttttctcgttcgttatcctcgtcatctttaccatctttcgacccatccagatacctttgcttcaatctaaaaagccataaaagagtaaaacacaacaatagatcataatcttgaaaattgaaatagtaatatcatcatttggatgtaacgatcagctaccaaaacatacagaaacactacaaatttacaaccaaagcactaatactagtaaacattttgttgtcaataaaaaatttgtaactcatatagcttttaggtttacattttaacatttcatagcaatgtaagccttacaaatgtatagggaagaaagattcatattattttattctcaattttttcactaataagcataatccttatcgttttgtcaagcttcctatgcataattccaaatccatatacgattaacacgaatagtaaaacagatgggatattaacataaagtaaatgcagagtgattactagaagaaaaaaagaatgtatataataccttctttaagagctctactttctgaagtttcttgatttaacaatggagttcctctttctgtgtttatataagacacacgcaaaaaaagaatatatgttttttttttttttttttgtcgtaaagaatatatggtttattctcgaatattgtttcctcccctaaattacggtagcaatgctgatattttatttctttccatgttttcgagtagaattaaagaggacgaagctatacaaatctttagtttctatgttcacgcacaagtgataagagttcagttaaaggaaaacattgtaattacagcatgatcaagaaagaagattttgtttgtgatttgtgccaattaattttctcaaatattccttttttgctttaattgaaaactttgttaatattcttacggaaatttggcgccggaggtggctgaggttccgtttgcaagttgcaacaatgttcttattggtcttcatggccactttggtagtttggttgtatagaaattagaaaaaagattaaagtttgttgtcgtaagtttgtcacacttctgtgatgactatttgtactgatactcgatagttcattttaatataatactaggagacatcgacaaataataaatttgtttcataaaattttaaactactagtagctgttggtgttgatcgattgatcggtaattcatagcctttgaaatatacatttaacaatttcaccaatcaccatatgctcatacgcactggtatgtaactaaaaaatgactagaacttgtaaaatgtcccatgcaattattacttagtgcgtattttgaaattttgtttttttatcctttattatctttcacattcgaataaatatcagctatatgtgataaacaaagttttgccacttgatgagtagtactacgagactgaaacgtgacatatcgtggacccatgatttaatttgatcaaactatatgacaatgaagacggaaataataggttaacttaaatatgtgagacatttttcgtatactatttatatgccaaattcactactataattggtaataggcagtgttgatggtggcgagtagcatgggatatgttctaatgggatattttacatgcttatccactaagggacgatatgtttccacgtcagcaaaatggttaattccattttctttgttaaaaaaccttattcaatggatatttaatatcatataaaaaaattaccatctaaaagtacaattagtttgactatatgctattcaagtcctcatagttttattattcaattataagtcagtcataatagaaatttaaacttgtttccatgttacacattaaacaccagtttgaaaaaatcaactctgatttttataataaaataaatgtaatctcaatcatctcctgaacttcaacaagtaaaacgttaattagttttgataatttcactgatttgtttcataaaaacacctatactcctataaataattaaatattgtaggcacgaggtatatagtagagaacgaaagttggggtcaattatagaaatatttaaaacatacgggcaaaaaatagaaaataaaggcaataaaggaaaaagtatagggtcaagaaggaattataaagttgataattttcttgatttaaaaattcagtatatatatcagaaaagccccaaataaattttgggtcgttaaaaagaaaagaaaaagagaaatagaattttgcgtttcaagtactccatctccgtctcttttcctccgcatctaaaaccatctgagaaatatctccgacgaaggagaagaaacgaaaatgacggagactggagtaatcggatgtggctgtcgcggagtcaccggcggcaatttcttccatcccggaggattttctttgaaatcttgtttcctcgagcagagtacaaagcgtaatcgtaactttttccgaagcgtttctatgattcctcctttcaaacgcggtcgtttcatcactaagttgcgttccgtcgccgggaacagccgaatctttaggtaattagtttcgctctcgctgttaaattcatgaaaaatggaaatcgattacatcattttcgttagtggaatcaatttggggaagaaattagttgtctgcgagtgaaattggattggaattaagtgattttttaatcgaattgttgttgttgttgatgaacatgattaatagcatggatgctcgagagaaatcacgatcgtttgtgttggtatcatcaaggcacaagagagttccagtttttgtgatgatgccgattgatacatttggaattgatgcttctgggtgtccaaagattaaaaggttaagtttcttgaaatgtttcaatgtacccgatttatataaccttacatggtatgaaatatagtataattcctttttcagaacaagacaagtctagtttcttcttttagtaaatgatatatctatctttattgtttcaggctcaaggctttaactgtatctcttaaggcactcaagttagctggtgttcatggaatcgcagttgaggtttggtgggggattgtagagcgtttctctcctcttgagtttaaatggtcactgtatgaagagctttttagactgatttctgaggcagggttgaagttacatgttgctctttgctttcattcaaatatgcatttgtttggtgggaaaggaggcatcagtcttccactctggatccgagaggttggtattgttagaattacaggtatttagttatttgtttgcggtagagatagaaggttgcctgatgcggatttttcttcttcctttgaatatttttaaggttgagaactttttctgatgaaaccttggagactatagatttctgttacacaatcatagatgctaacttgattatgttgtcgttgggaatgctttcctttgttacgaagtttagctcaactgcttttcaccttataatttccagattggagacgtcaataaggacatatactatagagataaaagcggattttccaacaatgactatctcacacttggagtcgatcaacttcctttgttcggtggccgtactgctgttcaatgctatgaagattttatgctcagtttttcaacaaaatttgagccatatcttgggaatgtgattgaagaaataagtataggtcttggtccttcgggggagcttaggtacttctgatcttctgtggactaccaccggtaaagccacaatagctacaataggagtttcttacacagttatctcttgcagatatcctgcacatccttctggagatgggaggtggaaatttcctggaattggtgaattccaatgccatgacaagtacatgtgagtgcttatttattgaaaatttgtatttgcctgtactaatcacacttacagatttatactacttggtttaggatggaagacttgatggcagtggcatcccaagaaggcaaacctcaatggggaagcagagatcctccgaataccggctgctataatagctttccatctggagttccgttctttgaggagggcaatgatagctttctctctgactatggtcgtttctttctagtatgttctatatcatagcctctttggtgattctgatataatatattgttatgatataaaagtggctagtaggctggattatagataacaacgtgaactgcttttcattgtaggaatggtacagtgggaagttgatttgtcatgctgatgctattcttgcaaaggcagccgatgtcttgcggagacgtcaggaagaagagaaaagctctgtaatgctggttgcaaaaattggtggaatctattggtggtataagacatcttcacaccccgctgaactaactgcaggttattacaacacctccctcagggatggttatgatcctgtagcttccgtcttgtctcgtcatggtgctgctctcaacatcccgtgagagcctttttctgaagttttcttttactatgtacataattctcagaagctgcatggtccagtttcactaacgagagaatctatcatatcttttcagctgcttggatatggcagatagtgaaatacctgagaaatatctttgcagccctgaaggattacgtagacaggtactttctttcgtaaacccttgatccagaattcaattatgttcatatgaagtatgtatgttacttgtatttagaccggtcactgttgaagcactatttacttccgtagagacacttcaaactagtctagtctctgtgttcttactgcgctgctacattagacaattaagcatgccttataagaacatgaacaaatcagcattatcacattttcttttgctagatacatgatgtttcgaagaagtggacaatacatgtgactggtagaaacacaagcgaaagatttgatgaggtgagttatttgcacatgctttagtcttatacgtctgaggtcaaagtggtggttattaaccattttctatatgaattctgcaacagatgggactaaggcaaatacgagagaactgtgtgcaaccgaatggcgacactctaagatcatttacgttttgcagaatgaatgagaagatctttagggtcgagaactggaacaactttgtccctttcattagacagatgagtgcagatatgtaaacacactcaccacccattggtgtgtttgtcttttgttacagaatcgatctttcctcaccatattgctttttcagatatgtgatgaggagaactaatcaaatcaaaaattgttatatgataaaatctctctctgtttctattcttcattttgttctatctctattgcaaaagtcttgcagaaacctttttcattggatcaaaaagttacattgtatgttttgattatcagaaagcgatccaatacagaaggtttaatcacagcaaatgtgttacatacaaagatattattgaatcaaaggacttgcctatcagcagcctcggcaacaagaggcaacctcggggtcagaccaaacaagcaagcagagaatccatagatcaaagagacaagcaagaagaggaacactgtgctgtccaaactcatcaccacatctaaaccaaacccatctctaggattaaagctcctctcaagcaaatccgggaaaatcaacaacacatcaagcacaatcgcctgcatcgtgttgaacctgacgtacctgctgaaattagggttcctcacaacgacgaagtagagagtgatgaagataagaaacccattgaaagggaagctcttgaaagctctgatggcgggaaacaaaggttggatgagaatctgaaaaggttggtactgtgtgatgatgaatttgccgtattgaatcccatcgaagaatgggtagaagtaacagacggctgagattatccgatccgatgcatcgacggaatcatcacccttggattggagtacgagtgtggcggctctgtccctggaaagtctaggttttgggaattgggtatcaaggtttagagggagaaaagaacgaccggttagggttagggttccggtgagagatggtaatggagcaaaaaactgagatattattgccattttgctctgtttttgtttcacttcacacaaaactgaaagactgcttaacacatgatgagaggataataaactaaactccactctgttttaaaagtttagcttaaaacattgtgtcgtcttcttatctttctaatatgataaaacggtacgtagttatttgaagtaaggtaacaattaaatagcctctgttattgtctttgttttttgtgtatatttaaatatcaaaatccaccggtataaaacggcgtaatgcctttgtattggacccaattctttcaattttcacctaatttaattacctccgtatttattttttagtgcacttcaatgtctcttgcatatatatattggagcaaattataaacataatgttcatagtgaaattgttagttggttttaatctctttttaagacaacatataatgtcaattgtatgtacgtttttcttgtttctcttaaacacttcttttgcgtttgcatttgcgattcctaaaccgccaatagtaaggagactatcaacgacagtgacatcaaattcaacagcgtcttcttgctcagccaatggaaatccaatcgatgagtgttggagatgcgacgaaaactggaaggacaaccgcaaaaacctcgcggattgcgcggttggattcggacgcgactcaattggcggtagagccggggagttctacacggtgactgattcaggagacgacaatcctctaaatccaactccaggtacattacggtacgctgcgacacaagatcaacctctatggatcatttttgatcgagacatggtaatacaactaaaacaagatcttcaagtagcttcatacaaaaccattgatggtagaggaaataacgtacaaatagcttatggaccgtgtttaactttatataaagttagtaacattattataaacaatctttatattcacgattgtgttcccgtgaaacggaatgctttatcgtcgttgggaggatactcggatggagatggaatatcgatattcgagtctcgagatatttggattgatcattgtacgttagagaaatgttacgatgggcttattgatgcggtgaatggatccacggatataacgatttcgaatagttacatgttgaatcataatgaagtcatgcttttgggccatagtgatgagtattccggtgatcgggatatgcgagttacgatcgcgtttaactattttggtgaaggacttgtccaaagaatgccaaggttagtacaatcttatatttctttttcttctttttttaatgtcaaatttataagctaaccaaaatattcgtgcttaaaataccaatgtgtaggtgtaggcatggatattttcacatagtgaataacatttatagagactggaagatgtatgctattggtggaagtgctaatccaacgatctttagccaaggaaatgttttcatagcttccaataatcagttcaccaaggaggtacgttcgtgacatgtgctccacaaaactaagagcgttttaacctcacaattagtacaatctaattcatagtcgactaatcatttagaaatttgattttcatgtgtcttactatatggattagattctagacggaaatgtttgctccatacttctaaactcacatgccctatacgcaggttacaaagcgagagagtgcagatggagacgaagaatggaaggaatggaactggaaatcagaaggagacgaaatggttaacggagctttctttacaccgtcagggaaagaggattctccgagctacgcgaaattttcgagtatggtagctcgaccagcttcacttctcaagaccacacatccatcagtaggtgttcttagttgcgaaattgaccaagcttgttaaaaacacaaacataagcttgtgaccaaatctagtgtttgtccttctttttcttttttgctcttctacttgttgtggttattgttatcgtaaataggatttgtactgaatgtgatgatgatcatagacccaaacaacaattgttcattgtcaatttctttaccaaaaaatttcttttacgagtcacaaagtttcgtcagtttttttatttataaatacattaaaattacttaacaacctttttccatcggataaaactaagattgacactcatcattaataattttatatatactcccattttttttagtgagtgttaacataagattaggaattattcgtatattgttagtttcttttattctaactttcccaatcatattgggattgagctcatcccaatatgtataaatagcgtactcaagagaccaatcatcaagtggctagtaatgtggctcaagacctaatttcgtagctagctacttttttatttgtattttgtatataacacattaaaggcttttttttcctttgattcaatgtaaatttcgttacctttcaaatttctgatttgtgatgatctgaattagtttttggactcattatgtgaaaatcagttagacaaatacaaaaacaagaaaaatatgacaagatcaccaaaatcaggacttgtttacatcatcaactaaacaaacacgtgaaacaagaacacacaaatatataaactaccgactatttaattcgacaaccaacttttaaataaataaaaaaaactcaacaatagagggaaataaataatcctcatttactttcccccaaaaaccataaataaaagattcacaaaaaaaaaaacatggaagaatagaagaaacgaagtgaaactatagaagccaagaagaagcaaacaagcagagcaagctcaccaccaaaccagccttagctcctccgatgatcctaaccgcaccagcatcatctgccgtcgcatcatcggcctctccgtcaggcccttcggcaggcgaatccgagtcaccaaaaggatcattatctggcgacggtgcagccttcttcttctttcctttcgctttccctttagccgcttttggagaatccgcaacatcaccatcctctggtgccggagcaggagccggagcttcaacagccgaagccttaaacaactctttaggcaacaaaaccttatcagtcgcatatatagctaaaggctgctcatcaataagagtatcaacgatcttgacagtgttgatccttgtcttgagggtaaccttctctccatcgttctgtacagtaagctcaaacttgttagctccatctgtcgcaagtgtgttcatcggaccattgttggatttgagcatcgccattgagtaatatgtcgggacagcgaggaaatcgagaaatgcttctttctttggagctgtcaagttcttgtatttgggcaagaaacctttcattgcatcatctcctggacagaacactgtcatgcctccttctaaactctcctgttacaacataaacacaatccaaaacccggttttaatctctcaagatcaatttggtctatcttgaagttgacttgattaagatagtgaagttgaaacttttgtagctactcaattataatggctagtgtgagttagtggagacaaattattgttacttttcatatttgaaaaagatgaaccatttttaaaaatttagttaatagaatttggtttcataaatttgaattggaaaactaactaattatgttccgataattgaggtaattaagtctatatgtttgactatatttgctaattgcttacgaaacagtcaacaccttttgacctttttctttttgtttcaaaaccaatgtggcaatagctattggctacaatacaacagtacaatcacatgcatcttttctgaataagtaacttctcatttaacaacggaaattaaaaggataatcattttagatagagctactaatcagtgttaattatgtaagtagtaaatatctgatttctttttttaataatttctaaatttatacagacacatgcatctacttattgattatttatgttataaatggaaaacagaaaactaatacttttactaaaatcagggttagtagtgataagtgtaccaattacatttattaattagtacacagccacatgcatataattattgattaattaaacagaagattactaattatcgtaattaattactaatcaggggtttagtatagtacctgataggtttttgaagctccagggttagtgagaagagtctcagcaaacactttgcatccatgagccgacattattccggtaagattcatctccgccggagcaggagtcggagccgccgcagtctccgacggtaaaactctactgatctgaataatggagatgttatacggaacttcttcaatagatttaacaaagaaagaagacagatctccaccgtcaggaccaaacccaactttaccacctctcagatccgttatgttaacgaatcctgaggttccaggagcagctccggtggcttgaaacagagtagcggcgagagcagagccgtcacggatctggtggagttttttggttccgaagtaatctaaaaggacgtggagggagagaatgtttttgagagttgagagtgtatagcctttagaggttaatgctgacatggcggcgttatctactgcgcaaacggttatggttcttctccggttgatttcgtcggcgaggtgtgtttgtgttaggaaatggctgaaggaagagaatgatgggtggtttgctaggaggcgcgtgacgttgtgcgcgtgggtttgagttgtgaggagaaggagaatgttgaagatgatgatgagagaactcatcttcttggccattgttggagagagtgaagagtttggtttggtgatttttgagagagtgtgagtgaagaagagcttaaagtgaggggatgaagaagaaggtggtgtttagtttttaatggacgtggtttttggttgtaattacgattgtgccattgtatttatttattgtgatgacattatttattgtatttattgcgaatttaagcttatgggcttttgcaagttttgtgaccatgtcaaatgctcttctttccagccttccacgggttccacctagctactattttagaaattattaaacgattgttgaactttctagaaaaatggaagtttttatgaactaggtatctatatatgtagacgaaattaaatataggatgaaacaagtgagacatgctaatctttctaaagagaaaaagtttatgattcagaaattgatatatttgtgcccatatttgtattattgtggtctagtttcgacattaagcatcaagaggaaaccattatttgaccacatcgccgctacaaatgtttgattgcctttactagacattattgcttcggattttaccctataatattgatactttggtagactaagtgtaggtaaaaaattgtaagtttatagaaaagtatgagggaaattaaaaacaataggaattgcgacaacgcattttagcctaaagcagattacaacagccttacgaaattcatttgtaattgtagcacatgtccccaactaatcttaacctaacatctacagagtgtttaaatgtcaaatttattttggcttagcaatatttatgatttgttctcctttttgttgagaaatttatagtggatcataactatcatgtgatttgtatgtgtagctaaaaatagaaatacctttttagactcaaaaacatacaaaattttcatattattatataatcaaacatgtcacgtgggagttggaagagtatctcttcgtcataaattaaggtatcgtaaacccattactccattattaataaaaattcaagctcatttcacaagcatagaatcttcttcttcttcgtttataaaacaaatctttatttgttccttaaagtttgattagacccgaatctacgagactttgactgtagcaatgtcatcagtgtcagtgtcggtgataaaacgtaagttaaagtgcatgaatgcgtgatcgttacggtcaggtaaaaccggagatatatatatgaagcaatttcatggtttatatgcaaaaattcaggggtacttgtgtaatttatgttgtctgaaaatggtgacgcaggactcaaggtaccgactaaccacgtggatggttgagatctgttatcagattctccaccgacaatcggtcggtccatgtactggctggactgagtaaaactagttgtttgaagatctgacgcaacggtttgttgtcccatgtcacttaagatacgatggttgttgtgttttataattaaacaacagtaatcacaaagcttctcaattcttgagagtctaaatatacatgatcaaatttataatatttcatacacataattatcatttggaacctgtacccatatcatataataacaatgctaacatcatttgtatctcattgatcctagtatgtgtcttatcattggcaacaaacacatggactccttcttctcctgtaatctgtatccaactacatccaggttttttcttcaaacccttagctttcatcatctctctcatcttcacaacttcatcccaacttccttcaaccgcataagcattcgatatcgtcacatagttaccggagttttcaggctcggattcaagcaatttccttgataagtagtccacaagctcagtcttacgctgtttgttgcaagaagcaaccaaagattggatcattcgtgcatctggcttgaatggcatttcctcgattaaccttaaagctttttctgtttctccagctgatgcaagaagatctaccataagtccataatgttccaagcatggtttcatactacgctttgaaacgatatcagtgaaaatctcgatagcctggttaatatcccctgcgtggttacatgctgataagacatttgtgattgtgatgttgtctggtttaagacctacaccttctaagcttctgtatagagcgattgcttcttttaagttaccatataatgcatacgccgagatcatggcattggagagaggcaactcgctgtatagcttacttccgaaaaccttctctgctttgtttatatctccacatttagcatacatgtcaaccaaagaagtttcaatagaaaccaaagaggaatgctgtagatttcttatgatgtatccgtggattgttcttccgatatgcaatgatgctagatgtgcgcaagcagagagagcgacagtgatgctaaatgcatttggtctcaggcccgattcttgcatctttctaagaaacagaattgcctcctcactgcaaccattttgaaccataccattcatcatagtcgtccatgagataagatttggaattatccctgaggattgcatctgcaagaacatatccttggcctcatctacctgaccattccttagaagacttagaatgatcaaattccatgttatcacatttggaggtacaccttctagctgcatcccatagaacaatctcaaagcctctccactaagaccagattctgcataggctgcaagtaacgtattccacagtatcaagtctttctctactgtagaatcaaacactttcttagcatcaacaatgctgccacacttggcatacatatccatcacagtgctggctaaaacgatatcagattcaaaactatgtctaatgcaataacactgcacctctttcccgagctttagattctcagtacgtgcagcagcagacattaatgtcgctaaagtgacacaatcatatttcagcttctctagtctcattaattgacacatgtagatagcatcttcaactagcccttgttgaacatacccagaaataatcagattccatgtaaccacatccttttcaaacatccgatcaaaaaccatctcagcatactctatcaaacccactttgcaatagaaattcaataaagatgtccccaagatattatccagctccattccatttacaatagcaatggcatgcgactgtttcccctcttcaaccccacccatattagcagaagcagataagcaagtcgagacagtgacacgagtaggctcaacaccttgcttcctcatatcagaaaaaagccgaatcgcttcctcattcttaccattttgtacataaccaaccatcaacgcattccaagcaacagcatttctgtcaggaatttcatcaaacaccttactcgcatcatccaaaacaccacatttcccatacatatcagctaaactactagccacaaacacacaatcctcaagaccagattttaccacatacccatgaacccctctcccaaatctactccatttcaacgcaccacacgctttacaaacattcggaaccacaaaattatcaggaaaaatctcattttcaagcatctcaacaaaacccattaaagctccttcacataacccaatcctacatttcacaccaataatagctgcccaagagaaaacattacgaaccctcaatttcgagaaaagaacttcagcaatctccaaagcatcgcacttggcgtagaatatcaccaatttagtctcgatgtactcattcctcgcgtagaaatcaccgttctttaaaatccgagcatgaatttgcttccctgtacttaaatctctctcgtaaacgcatccttggaggatttcaccgtatatctcaggaccaatgcgtaagtttctgaaatccatctctgtaactaaactcagagcttctttgatctcaccgttcttacaaagagacgaaacgcgatgaaagtaagatgtggaagaaggagaatgagcttgttcatcgtggtgtttagaagaaggtttcgatgatactgaaaatggaactttattcgggatagtgttgaaaggaagagaagccattcatgcctctctgataaacgtctctgaagataaaacagagttctttcgaatcctcgtatttaaattattttatttattatctcctcgacttcttttcgtaaaatgttctccaccgttgattcttgtggcaaatacagacacgtgtacggttttcatctgttactcgatacatatttgtaccgatcgcgattcgtatgtgtaccaaccggttttcgatttgatctcggtttagttgaattataacgttgaaaaatatataattcatttattagaatatacttcaaaagtaacgacaaaaaaaaaatacttcaaaagtatataaacaaaaaatttgagataataacagaagaagaaggtgacattttttataggcttttaatatttatctgaaacctatgtatgacctaaaagacaataaaagcattagctaacacaagcatcaaaacatatacgggaatggaagaggaatagtaagccatcgctgaaccggttgtaccgccttcggctcctcctcctcctcctccttggccgccaccgccttgtccccctccgccaatagtaccgtaaggataaggaggagtataaaaataaggatacggaggagaatacatcgtcgaaggtggtggacctggtggttggttgcaacagcctgtcgtcggaacaggagggcagcgagaacgtggcggtgaagactgtgaaggcggtgggggtggtgaatactgtggagacggtggaggagggttaccatatggagagtagcctgtagaggacggtggttgaggcggttggttacatgggtaaggagtgcaaaaaccagcgtttgaatccaaagctgagtttagattgacacagtttaaaagtgatagataaaaggtaataagaggaacagagagagaagcttgaagagacaacatgatgatgacttagagaaaatgatgagtgtttggtctttggttttgagatttataataaaaagagatgaattttttcctcggtttcgtattatctgccgcatggcattacacatgtcgggggtgttggaggatttctgaagaaaacgtttgtgtcttttagctgatgtagacaaatttttgtcatgtaatgacaaattaaaacgcatttgtattactttggaatatatagatatataccgatcggtaccattttcatcaatagatgtcccaaagaagatggattatgagtaacatgagttttaagataattgtgacaagtcgaatgaatcttttgctatgggaaagatgaagaactatgaattgtttcaagtaatcaaataatcaaattttacgttgaagacggggtttacacgatggataatatgtggctccaactaagctgttgcatgctcccgagttgcaattacattcaatcgctctggcccatgtagtgaaggctgacaagagcaaccagaaaaaagttgatgagggtcatttgttagtaaggtgctagccttcacaataaactgcttaattatgataactttaaccctcgctttgaaattaccatcgatgatggctttttggacaagtttggaaaaagtatccaccaaactcatgatttgcttgtgcattcatggtgctgggtgagtttgttttgactagtctgttgtaggattcaactacttttcaaatgatgcacaagctagtgttgaggtgtgactacactttcggacagtattgtatccgaggaaatattaattctgatggtgtgggttgtggtcttgtcgagagtggaatgaggactaacataacccatatttaagtctgcatgctgcatgttttttattaaaaaactgtgtgaggtatgttaatcttgataaataaattgatgatatataacaatacttatttatgaaacttagatatgttataagtttattcaccaaactgaattcaaaatggctttgagtgatgagtttcaaaccggttcgatagaacaagattttaatctaatataagctcatggttgagcatgcaccagaacgtcacatagaatcaatttaaatccatagtaaaccctgtcatatggtttagtattttacaaattacaacccactttatcaaatggtttcaatattcaatgtgttgacatttacctatatattttaaataataacaagacgataaatttacttatttaataactcattgtattggtttaaccaattagatgaatgttgtttacaatgattcaaggataccgaaaccgagttcaagttttgttataagatgatctacaaccgtgagcttgacacaaatattatcagtctaattctgggactaaagagattatggatcacatattcataatttcatgattacataaaaaaagtaaaaataaataaatgatatatagataaaaattggtgaaatgtattaaaagttgcaatgatatcacccacttaatttagctatgatattttaggttaatgtaattaatgtttttcttatatcaaatttttgtttagccaaactaaacaaatttgagaaatataataacatgccataaaataagttttatatgaatccaattaataccctaatttggattttcatttaaatatcacaaactttaggtttatcagggaaacataataaagaaatgttatataaaaatttagcaacacttttaaaatctaaaatctctgatattctgagaaatgtcaaaaaaaatattccagattgcatataataataaaatcataataaaaagaattaaaatatattgatacttcataaatagaagtcactgtccaagtctctgcttttttatacatcgagaggcagagaaggtgttcttcttcttgtccaaaagagaagacaaaacctaaatgtctttaggttacgcagagaaattatccttcattgaagatgttggtcaagtcggcatggctgaattcttcgacccatctcatcttctacaatgcaaggtttctattttttgtttccttctcctcctggggttttgtgggtttactctatttttctcgagattctgtataatttcacgttgcgttgattttttctctggattaatcgcttagctgtttagattttagagttgatccttcttgtgttctgtcctagtgtttgattttggatcgtaggttcatattaagcctttaagtttttatatttgtcgtttggatggtcgtgaagagttgttgaagagttggagaatgattagtacttaatgattcatataatctagttttaggttatacagtacctgtttttagacttgcattgtgttgtgttaattgaagaatgaaatttggtgataacaagcatcttaagattatgtgattttatttactgattatgtgaaaaccgttgtctggattcaaatttgtgtggagattttgactgtttgtttatcattgttttatctaacaagccaaaaggtctgataaaaggatttggttgctagatcttggcgtgtttattgtttatttcactattgtgctaactctggtgtttgtctttggaaatgcagattgaagaacttgctaagttgattcaaaaggtttgaatctttaccctctttcgtattcttcttggtgcttttgaatatatgtttttggtttcttgttgttatttaagtatctttaagaaggctggtttgatgtttgcagagtaagcatctagtagtctttactggtgcaggcatttcaacttcttgtggtattcctgatttccgaggccccaaaggaatttggacgttacaggtgtgagctaaggccatttaatcctcttttctttgactatctgctcgagtgatttgattttgaattctgtcattgattggtctgttatcatcacttcttgacttgattgcattgtcttggattatgtggctaatatacttgtcttttgtaaagcatcatctcttgaaagttaactcttgtgatccgtgtttaatggtttcagcgcgagggcaaagatttacctaaagcatctctgccatttcaccgtgcaatgccgagtatgacccatatggctttggttgaattagaaagagctggcattttaaaatttgttatcagtcaggttatcctcttttccctacagaattactttataactaccgtgcttgaacactgataggatcttgtcttcatgtttacatttctaatttcacttatatgctgccttcataaatgatcagaatgtggatggcttacatcttcgatctggaataccaagagagaagctttctgaactgcatggagactcttttatggagatgtgcccatcatgtggagcagagtaagccaaaaatatgttattgcgtttctcttatactgtgaccccttgtgattgagagctgtcataatctatccgtatattggaccataaatggtaacaacctttcttgaaatttcgaaggtacctgcgtgatttcgaggtggaaactattggattaaaggagacatcaagaaagtgttctgttgaaaagtgtggagctaaacttaaagatacggtcttggattgggaggtaacacgaaagcgttgcctttgaatcagagtccaccagttttacctttttatgtagttaaagaatttaagaaactgaattatgaaactttctttatatgactcttatgctgcaggatgctttgcctccaaaagaaattgatcctgcggagaagcactgcaaaaaggctgatcttgtactctgtttgggtaccaggtaattaatgactcataggaactctcatgtttgtttccttaacacttttgatcagttagccaaacaactctcttctctagagtatgttgcattttgtttgttatatgtgtctaacctctttatgcagtttgcagataacccctgcttgcaatttgcctctcaagtgtctcaaaggtggaggcaagatcgtcatagttaatcttcaggtaattgtttattttgttcatgtgcacgagatttaatgcgcgccatatatgtaaatgaaattttctccgtttgctgatattttctctggaatgtatatggcagaatgagttttctggactgtgtagtttgtgactgattatatttaccctttcagaaaacaccgaaagacaagaaagcaaatgtagtgattcatggtcttgttgataaggtaagatttacgttttgttgttttcaaaaattctggacataacctaagtgatgtttaacagattaccttcagcactgtgccccaacttgagtcttatagattttttcccttcattattctgatgtgcaggtggttgcaggggtcatggaatcgctcaacatgaagattcctccatatgtcagaattgatcttttccagataatcctaactcaatctataagcggaggtagcttttcctgaatctttcatggtttttgtgcaacatatatgtcttgtcctgcactgtaattgggtgtgtcaaactttttattaatgatgttaggcttcatagctctcactcacatgtttttcatttctgttacagatcagaggtttattaattggaccctgcgtgttgcgagtgttcatggattgacttctcagttaccattcatcaagtctattgaggtaatctctagaaactactaaaccaatgccaaaacaatcaaattcaatttttctgatatttttcatttgcaatacaggtttctttctcagataaccataattacaaagacgcagttctcgataagcagccttttcttatgaaaaggtaaaactaacctcttcttagaaatcagtttcttgtcctatttctaactcttatatatattctcatcctctttcaggagaacagcacgaaacgaaacttttgatatattctttaaagttaactacagtgacggttgtgactgtgtctccactcaacttagcctcccatttgaattcaaggtttattacgatccataaaagatctttgttatcttgactcatgaccatttttctcacaacattttcaaataacctgtgtagatttcaacagaagagcatgtagagattattgacaaggaggctgtgctacaaagcctgagagagaaagcggtagaagaatccagttgcgggcaaagcggtgtggttgagagaagagtggtttctgaaccgagaagtgaggctgttgtgtatgctacggtgactagtctcaggacttaccatagtcaacaatctctgcttgctaatggagacctgaaatggaagctggaaggttctggaacatcccgtaaacgctctagaaccgggaagcgaaaatcgaaggctctggcagaagaaaccaaggcataggaagaagaaaagaaagcttttggtgtatataaagaaacactagtctaaccggaataggtaatatggaagttattggcgttttgagagctgagtgaattttgtttttggtccacattcggttctcttgaaacaaaagttaaccaggaattgaaagagataatcttggttcgttgtcgtttagtatcggttgatttttgtagaagctagtgcattcgaaatattattaaaaaaaatttacaagatgatcaagcgatgccagaatctgtcgactggtaggaatctcggatttgaaaaatacataaaacgacatgctctcaataatccagtactgttgctattttagctttaaaaacctagtggtgaacaattaataatgatcaagaaaagatgttatagtacataatttagatatacattgtactgttctattttaatataatatgcaaataatgtaaaacaaatcaacgaaagttagctgtacttatatgacatcgtcagttagaattctttttttttttttatgtttttttattgaataaaaggataattatgtttttcattttcaagggattattttttccaagtggcaattaatatttcaagtgggaacatgtgtcaagcgaaactttttttttttttttcacaatattgattgcaacttttttgtttgacaacttttaactgttaggaattaaggaataaataaaagattcaaaaaaaatttcgttttttgtttgacatcaagagatggtctcctctcaaatgaaagtaaaatagaaatctatattcatgaaaaagattggacagctattcaaaatcaataatgaacgacttgtttttttttctattaacaaagaatagaaaaagaccaagcttagctacagctgtattacgcaagttttatatgaaatgaccggctaacatatatatgcaaggggaagaggagaatacaaatatcacaaaaatccaaatttcctttgtagcaaccatgagttccgtgggtgtatttcgtaaggaggaaatcgatggaaacccatattttgtgatattaacagaaacaaaagttgatcaaaaaagaagaaaaaaaacatattttttatgtcctgctgcacgtataaaatatctaaagttcaaacgaaagatgctcgagaattatgattatggtgacgataacgaagacgacgataatgatgctgacgaagatgccaaagaagatggcgatggtcatgacaagctgtatccattcaattcttcctctcacttccccaacacaagacgcggtgatcgacaaggcaaatctttgcttgactgctacctccctggaatctgtaagaaccccgtagttcctcttttcaggtacaacgataaagaaccttattgtcacatatcccagtgcggtgcatgcaaagggaaaatgctcgacacaagcaaagattatgcatgtctccaatgtcaaagaaagttccacagagaatgtgttgagtctccacttgagatcaaacacccttcccacccctttcattctcttcgactttacggtcttccaacgtttcagaagtgcttttgttgtgaaacatctctctacgacatgttttatcattgtgctacctgcgatttgagtatgagtccggtctgtgcgttgaagccggtacccattgtcatagaacaatcaagaagtcatcaccatcctctcacctttttccctgcacaagctttaatttgccatatatgcgccgtgattaagaagtttgatcccgcatacatctgtgtccaatgcgtctttgtcgtccacaaaaactgtatcggttttccacatgtcataagaatatcacgtcactctcatcgtatctcttttacgtcttctcttccatctagaaagctgtcatgcggagtctgtcggaaacaagttgacaacaaatatggtgcatactcttgccttgaatgtgatgcttattttgttcattcaagttgtgcaacacatccaaaggtgtgggatggaaaagaactcgaaggagtaccagaagaagatgatataatagacgatggtgagccgttcgagagaatagctgatggaataatactccatccgtttcatagtcaccatctacgacttgagatcagcatagcttatgatgcaaataagtattgtcgagggtgtgcccttccaatctatgaaggtcaattctattcatgcatggaatgcgacttcatcctccacgaaagctgtgcaaatgctccgcgcatgaaacgacatcctttatatccacatcctcttacactaaaagttgccaagcataatattgacggaggtatatttcattgtagcgaatgcaggcgtgttggtaatggcttcttctatgagtgtggtaaagagaataatatcgtccagctagacttacgatgtgcctcgattatcgaaccatttgattatcaaggtcatgagcatcccttgttcctaccctgggaaacagagaaagagacacgatgtcaaatgtgcaaatacgacagcggccattcaaagttaatttgcatggactgcgattattctatatgtttccggtgtgctacattcccatacatggcaaggtataagcatgacagtcattttctcacaatttccaatgggaaagaggaaagtgatcagcaagattggtgtgagatttgtgaacgcaaaatagtaaaagtaaaagaaagagggaatgtgctgtggaatcagaaagaagcattgcgatatagatgcaatgtttgctgcaccactcttcacatagattgtttacacgggaaagagatgtacatcaaacctcgggaaacagaacgagatcatctcacttttcacacttttagagacatggaaaggatatttattagagtccatctcaacagttctctctcccgacccgtttgcagtagatgcaatcgtcgttgtccattcccaatatttttcaaagggttaagactaatctattgttctctggattgtgttagaaatctgccacgtttttcccttttagtttgaagtattttgatattttggcatgttgtttttctaaagtataattttgagatgtaacttttcatatttaaaaagaatgatttatgtgatttttatttttattttcgttgaattttagccacagttaactaatcctatacataatagatgaagacgatgttcggaaaactagtaggcggtagctaggttcagtaggggcttattataacacataaatcgatgaatcaaagcctagatggaacatatatgttagtaaattatttacttattattctaatattttcttagttttataacaaaaaatatctatagaatatgaaatgtagtggaagtctacttcgggttcattaatatttttataccatgtttggggttcaaattcttagtgagcggagtttcttacatattaatggtataaaaattatttgagatccaaagtgatgtatgcatagtcgttggtaacataggtttcataacaaaactttcagttagatccaaatgttgtggagagagtttcgccataaagtcgatgttcgcaggaggtattcatcatagtaaaaaaaaaacatgcactacaccgactaaaatttaattaccgattttgaacgtctaattcgataaacttttttggtgttcacattaacacaaacagacaacccaacctcctccagtaaagcattagccatggattctggtggccacaacctccctctacaacctcaacctcttccagaaaattttcgtttgttccatttagaaaagattacatggttaaactaacccataacatattaaatttagtcttttaccaccaaaaaagatcaaattaaatttagatgataactgttaatacgaaacctagttcttttttaatctaacgttatatgaattgtagtattttccttggttactctttcagtagtaataatattatgtatagtacacggtaataattttacagttttgtcttatgtgaactcatgacatgtttccgttccatatgggatcctaaggccacttctattgcacaaataatagaagtgtctttagatattaaataaataaaataataaggtaaatgtctttaaattggtggagagaagggaattgtgtgtttgggaagacattaaagacatgtttttagagacatatttgcttaggtggcaatatatcattggttttttttttattcttttattttaatcacaaccaaagacatttacttaaatttgtgcaatgtagatactctaaggcttgctctaatcgagagtgtattttcatgtgaaactaatctttggaaagaagatccggaagagacggtctcatcactgatatttcatattaaaaaagattgtacagcaagaaatcaataacaaacaactttttcttcttataaaaactatataaaatatgtttaaccaaaaaaaaacaacactgtaaaagacttggttgtattcacaagttttaatattaaatggctggctaatacaaatatcaaatatgcaatggggagaaggagaatatcacaaaaatccaaacccccagttgtagcaaccatgaggaaattgatagagaacaatttttggtttacacattaacacaaacaagcaatccaacctcttccggtgaggcactagccatggattctagtggtattttgattgatcttcaaacttgaaatttaatttgttgtttatcaagtctgacttctttaaatttttttaatgttgcagtgattcctgagcaaaagaaaaaagaaacattgtctggggcgaattcttgatatatttccgtcttcaaagactttcgttcatctctctaattagaataacattaactataaatgttttagctgatgtttaagaaagtaatttagatgacaaaaaaaaaaaaaagtaatttcaagttatgattaaacattaaacaggattatgtccacttgataaaaggacaattgtgttttccaagtggtacttctatacattattttcttaagtggcaattaataattttaactggcaggatatctcaaatgaaacttttttttcacaatattggttgcaacattttgtttgacaacttttaaccgttacgaatctcggaattaaaaagaataaaagacttgctcaataatccaatagttgctattacaagttagtaaacgtagtggcggacgaaatattaatgttataagacataatttagaaaaaatatgttgtgttctattttaatgcatttttttttggtcaacattcgaattaggccatcttatataaagaaattggacgggatgaaaattttcattttgttccacttactaaaaaaactatataattaaactaatattagatttaaatattagattcttatcacaaaaaaaagatttaaaatgataactaaatttgctctagctttatttatatgcacggtagtattttccttgtttactcttcttaaagtaataaagattgtgtaatattgtacactcttattattatacaattttgtcctacgtgaagtcatgatgttccggttcccgttcccatcccatatcaagatggaatccgaaggcttgtttccaacttccaaccggagtgcattttcatataaaaacaattctttagaaacaggatccggaagggacggtctcctcccaaataaaaattgaatagaaatcaatatattatatttaaaaaaggtactccgaaaaagaccaagcttagttatattcacaagtagcgattcgagatcaatactgaacatcaagcatataaaaagaccaagcttagctgtattcacaagtttgtatcataaatggctggctaatatatgagaagaagaagatcacacaaaagaaatccaaatccccatcgtagcaaacatgagtgaagtcggtgtatttcgtaaggaggaaattgatggaaaattgtttttggcttacacattaacacaaacagaaaccccaacgtcctccggtgaagcagctgcggcggccaaaaaagctatgtattttggcgtcgacgacctccctcttcaacctctttttttctgtccttctgtccgcatcaaatttctccattccaaaccaaaaaaccatgatgatgatcatcatcatggtggtttcatgcctcatccgttaaattctacccctcacttcccttgtacaagaagccatgatcaacaaggcgagtcgttgcttgattgcgacaaagattatatctgtaagctccctgtaatccctcttttttggtgcaacaataaagaatttcgctatggcaaattcgattgtcgtgcatgtaatgggaatattttcagcacaagctattttacatgtctccagtgtcaaggaaagttccacaaagaatgtgtagagtctccacttgagatcaaacacccttcccacccttttcattctcttcgacttttcagtggttcaagtaatcagaagtgtagttgctgtaaagtatatacaccaaatatgtattatcattgtactacctgcgagttgagtatgaatccagtatgtgcaatgaggccggtacccttagttgtagaccacccaaaaagccacccccaccctctctcctttttccctacacaagcttctacagtttgcaatatttgtgcaatgattaagaagcttgatcccacatacatctgtatccaatgtgttttcgtaatccataaaggttgtatgggtttcccacatatcataaggatatctcgtcacccccaccgtatctcctttacctcttctcttccacctggaaacttttcctgcggagtatgtaggcaacaagttgacaacaattatggtgcatactcttgcgagatatgtgatgattattttgttcattcgaaatgttcattacttccaaggatttgggacggaaaagaacttgaaggagtaccagaagaagatgataagatagatgatggggagccgttcaagaggatagctgatggaataatactccatccttttcatagtcaccatatgcggcttgagatcgacaaagcttatgatggaaataagtattgtcgaggatgtgcccttccaatctatgaaggtcaattctattcatgcatggaatgcgacttcatcctccacgaaagctgtgcaaatgctccacgcatgaaacggtatcccttatatccacatccacttacactaaaaggtaccaccacgagacatgagaatcaaaaaggtaaagtttgttgtagcgaatgccgacgtgattgcaatggcttcttctatgagtatcgtaaagaaaaagaaatcttccagctagacctacgatgtgcctcgattattgaaccatttgattatcaaggccaccaacatcccttatttctaccttgggacacaaagaaaaagacacgatgtcaaatgtgcaaatacgaaagcaaggagtcaaagttaatttgcttggaatgcgattattctatatgcttccgttgtgctacttttccgtacaaggcaaggtataaacatgatagtcatttcctcacaatttgtgatgggaaagaggaaagtgacgaaccagattggtgtgaggtttgcgaaggcaaaatagaagaagtaaaagagacagggtataactggaaaggtaaaaaaacagaattgcgatactacaaatgcaatgactgctgcaccgctcttcatgttgattgtttatttgggagagacatgtacattaaacctggtgaaacagaaaaagagtatctctctttttccgatttctcatttagcgaagacgtttggaaatggatggatgttcgggctcttctcaatagttccctctctcgaccaatttgcaatggatgcaagtgccgttgtccattcccaatattttacaaaggggacaaactaatattctgttcttggtattgtcttaagattgagcatccaccgactccctcccgtgtttcttggtaatttgaagtatttttgacattttggctttgtttttttttttttttttagtttcagttgtgagatgtaactctttcatatgtgacttttattttcatttccttgaattttttagccacaagatcaattaagttacaataaaggaaaatcattgtcagttggctttataatattatagcttttacaagaaacaaatattatatcgcaaaattcagcaaaggagataatttaatgaaatttctctgttggagttttgatccttgaattgctattggaattcttgattgctctctccatctcctttgagttatctttgtcttcctatgttttttttggatgatttgacaaagccgtctagtcccaacattcaatttacatagcaaggtttcgattttttcaaaggacatgcaccaccaagccaagaggagagagaactaaaattcttaccgatcacatcacactccatcttgatctgaacaacacgcaatgcctaagattaaaatcacatttcgttacctgaatttccgggaatttctataaaaaaataaatatcgaagagagttcacttactagaaaatataaataatgctttgttcctctaaagagatctctttcatgactagtccacatagctcattttcatcaaaacagagatctctaagcaagtgtaatcaggtgtcttgcttgactaataagcatcgatcgtctccgagtctaatctctttgtccctttgactgttccttttacccattcatatcctcactacgtgttcatatctgcctcttccccacccaaccttcattttttaattaattgtttttcaaattttacgtactttacaaaactaactctttaccaaatcaagataatttaataataacttgaaattgattggagtgggggatagagaaagatatagacacatctgtaataagagagaccatgtgttgttacttgtttttgttgcagttgagtactgacccataactgcaaagtttgttgtccaaacaaatactattattttctaattaaaatatataataaatttaatacattgatatatatataaatatgtatatgtatatatatattttttgttcatgttgaatttaatacagtaaaaggttaattatatgttttccaagtggtacttctttactcttttttttaattggcaataaatcttttcaagtgggagtatattttaaatttttttttttttttcacaatactgattgcaacttttttgtttgacaagttgttaactgttaggaatctcggaattgaagtcatgacatgttctcgttcccagatgggatcggaaaggcttgttccaatcgagagagtgcatttttgaataaaactatataatctgtaatgaaaacaagatccggaagagacggtctcctctataatcaaaataaaatataaaacgattgtaaagctattccaaatcaattacaaacgactttttttacaacaaagaatataaaaagaccaagtttagctgtattctctagttttatattaaatgaccagctaatatatatgtgcaattttttaaagagaaaaaataaatatatatatatatatatgtgtgcaatgggtgagatgaaagggaagaagaatatcactatcaaaaaaaaaaaaaaaaaatccaaattcccattttagcagccatgagttctgtgggtgtatttagtaagaaggaaaaggatggaatataattttgggtattcacattagcacaaacaatagatccaacctcctcaaatttcaggctcaattaaaaacgtagtggtggacaagtaatgatcaagatgagatgttatagtttcataaattaatagtaatattgtgttggttttctaataagtccaacaaatcggaggggacataatttttttgttccagttagaaacaactatatagttgacatatatgttttaaaatttagacttcattactaagaaaggaaagacttataagagtttagacttttagtgatttgagatcaatataataaacgactattctttttataataaagaatttagaaagaccaaaaataattagttgttaagaaaaaaaacttagctgtattgacaagtttttatattaaatggttggctattaggcctgttacggatccggatatccgggatttttgaggtatccggatccggatccgtatccggcggatccgtcatttcagtctctggatccgtatctgccaacctcggatattcgggatcctgaagtctgtgaaaaagtacgagtatccgcggaccggatccgatccggtttttttttatcatcttctttcctcccgaacacaagcaaccgaacttcaccgccaagattctttccagaaaaaacagctccaaatctgcaacgaaagagtgaatccaacgccaaggggaagaagaagagatagaggcagcggttgtttcggtggaggttgaggatgagggtgatttggtggaggaggatgacgatttggtgccatggtggtagagatggtcgtttggtggaggctggtgtcgagaggaatgagtgaggaagataaaaggattaggttttttggaaaatgggccaagatatgggctggaaaatatcataattttaatttttagtatggcccaataaaacccataaacataaaacattgaatattaccggatccggatatccggtcatattttttatgattatccggatccggcggatataaaatattactatccgtatccggaaccgtttcacacggatatccggtttttcggatcggatcccggttccagatacggatacccgcggatcccggatatttgttccagggctattggctatatatgcaagagggagaaggagaagaaagatatcacaaaaaatttccaaatccccattatcgaaaccatgagttccgtgggagtattttgaaaggaggaaattgatggaaaaccatttttggtatacacattaacacaaacagacaacccaaactcctccagtgaatcactggccatggattctggtggccataaactccctcttcaacctcttttttcatgtcctagttcacgtatcaattttcataagcgcaatcacattgatggtcatgagactcaagagttttatccattcaattgttcccctcacttccccagcaaaagaaccagtactgatcaagaaggcgaatctttccttgattgggacaacccttatatctgtaagcttcctgtagtccttctcttttggtgcaacactgaacaacctgatccagaagattttcggtgtggtgcatgcgggcgtccaacgctcagtgcaacctattatgcatgccttatatgtgaaaaaatgttccacaaagaatgcgtagagtctccattcgagatcatacatccttcccacccttttcactctcttcgacttaccagttctccacagagtcaaaactgcatttgttgtcaccattatttcaacgacattttttatcactgttctacatgcaagctcattatgcatccgatctgtgcgatgaggtcaataccctttgctgtagaccacccaaaaagccattcccaccctctcaccttttaccctgcacaagcttctttagtttgccatttttgtgcctcgattaagaagtttgatcccacatatatttgtatccaatgtgtcttcgcaatccataaagattgtcggggtttcccgcatgtcatcaggatatctcgccaccaccaccgtatatcttttacctcttctcttctatctggaaccttttcatgcggagtctgcagagaacaagttgacaacaattatggtgcgtatgcttgcaataaatgtgatggttattttgttcattcaaaatgtgcaatagatccaaaggtgtgggatggaaaagaactcgaaggagtaccagaagaaaatgataagatagatgatggtgagccgttcaagaggatagctgatggaataatactccacccttttcatagtcaccatctgcaacttgagatctttagagcttatgacgaaaatacgtattgtcgagggtgtgcgcttccgatctatgaaggtcaattctattcatgcatggaatgcgactttatcctccatgaaagttgtgcaaatgctccatgcatgaagcgacatcccttacatccatatccacttacacttttaaacacggcatctcctggtgaggaaagtgtaagccagtgtactgcatgtaggcgtctggttgttggcttctactattttcattatttagataaacatcacgaacgtatagcactagacttacggtgtgcctcgattatcgaaccatttgaattccacggccacaaacatcccttatacctaccttgggaggactcaaataaagtgacgcactgtcaaatctgcaaagaagattttgatatggatagtttggaagtaaattgcatggagtgcgattatacgatatgtttccattgcgcttccttgccagaaaaagtaaggtataagcatgatagtcattttctcatgatctgtgatggaaaagaggcaagtgataaaccatactggtgtgagatctgtgaaggaaaaatagaagttgtaaaagaaaaagcgaattcgggggacaaaaaaaaaaaaaggttgccaacaaatagagacaaaaaagaaaggaaaatttataaatgcaatgactgctgtaccactcttcatgctgaatgtttacttggccagacatttacttcaaatctgctcaaacaatagaatctgttcagattcttctcaacagttctctctcccgaccaatatgcgatcgatgctactgccgctgtccattcccaatatattttaaagcggagaacaaatacttgtgttctcgcagttgtagtccgaattccaattaggcaatgtataacaaaaatgcgaggtactgacgacttacccattttccccctattttgatattccggctctgtgagatgtaattttctatttcgtttattattttttaaaattttatgtaagatgtaattttctttttttctctttggtttttttgttaattttttttctgaacttacgtattatgttttttttttttttaatgttcttgcatttttaagccacaatcaaatatgcagaacacaagtaaaaaaaaatgcagagagttcacttctagatgtccctagctttgtctgaaacccagctataaacaatgtccatccccctgaatcctcaaaaacaagtcatgggtatttcatgactagtccccagctcattcttatcgaaacagagaagttagactttgacgctgattttgaaaactttcaaatatattatatagaagtaatccatcatcagtttcacatttctctcgcctcttttgtgtttttttttcttcacatttgttgtacatatgaatatgatacaaagagttgataaataagaaccttaaaatacagagactcaacaaatatatctgatctgtttatcacaccattatttgatgagttgtgttgtaatatttgatctgatgaagtataataatcctctcagcgtttgtcatgtgagctcagtgtatagttgatgttgtctgatataatctattactccatcttcagtcaagtatttaaccgataaccctcgcgaaatgcattgcctgaaagaagcagaggaatgagcaagagaaatcattttttagtgtatatgaactgttctcgggaaggataaataaatctcacactaccttaatctactcgaactgatttgattaggaacagtattgtcaacgattttgacgttagcctgcgaaagaaatcgagggggcactattcagtaaaccatgtgcacaatcacggactgatacagcagagtcagaacagaaacctggtaatacttacacagttttcgtttaagatttcgtcaccagagatcatattttcaacatcttgtccttctctacggatgcacacaatgccataatctttgcaaatagttcttaacttcaaaaaccaagtgttgaaaaaggagcataactgtgagtaaatttgataaacacatctacgtttatataacaatgctaccttggtttacctgttcagggatccaaacaccgggagtgcagaaagatagcagtaaatccgagccacatagtagcatgactttgagagattctagcattagaataaatttgtgtttgtcatttgcgtagtggctagcacgtatgataaaaacatagcaagcaacactattcagacgacccagcaattactcccaaaatgtaagtgagataaactttgaatagaaagatgctaaaggcgacacaggacacttcttgcagttatcttaccctcgggtacatgtcgatttgttgttaagaaagtcttgacccttgataaaaccgtcaaagttcgttggtagttgctttgagatgcctgtagaaacagcttccacatttttgtaaacaacgcattgttccactaaagagaactgattaaaagcttttcgaggaataagaaagtacctcccacggatcaaccattacaaagtcagagctttgacatgatacattacacatctctaaacgatgttctgcagataaaaggccctacacataatctgatgaaattattagttctaagggaaactaaacagaatagtaaacagaagaactttgggagctaaaaaagaaaaagaagctcttagtttcatcacacataacatgtccattagcataggttcagaaaaaaaagagtcattatggaaagaaactaagattctcaagatgacaaataccttcttcttatatgcatcattaacaggagacatatatcctccaagaacatgaaatccttttgagcgtaattcatctctcgccagctctagcgacaaaaaaaaggaagagaacttatcagtttgatgtaaagaaacatatacatttgaacaaaaggtcacagcaatggacaagaatcaacaattgaaacctctaagttctgcagttcattcttgtcatatgccggttttataaaccaaaatatacaaagctaacacaatcatatactcaagaaacggtttcactcaagaagtaaacaacaaggcatataatcttaagctacttttgactataaaccagtattggattttcccattgaaacgagtcaaaacactgatcattatgcctcaaattgtgaaaactttcggattgatagaatctgaaacgccattgataaacatataaaaaaatgaattatatatctactctggtaaaagaactgaccaaacatgcgtaaatgcatgaaagtaggaggattgaaactcccagttgccacaagcactacacaagttttgtccctgtttcagacaaacaatcgaaaatattcaacacccggacggaattttaataataaacctggtgagaatctcatcatcataagtaaccaagcagatcaaatttacaaaatcagaattttcacaaaaaagacaaatgaagggaatcaaaatcgagaataagcttcaaaatttactcagtgtttgatccataagataatttctcgactggtaacgggacatccattgaactctgatgattgaatctcagtctcttaatggtagctccggcgaatgatcagggacagcgaaaataagacgacgacggcgaaagtattaaaagatagagagaaacgacatcgtatgaaaaaggtttgttaaaacgaaacgttttacagctaacgagaagatagatattagacacaatacgaagccgtttaaaactaaacgcatcgttcaggtagcgagggttaaaaaagctaaaaaagcttcattctatttttttcagtgaaaaacgaaagcgaaaatgaaatctttatccccaaaattttgaaattcaaatccgcgctaacagtctctctctctctctcgctctatctctagagtaggtcgtcggcgatgttttccgtcaaggagaatccgagggggaagacggcgaatgtgaagattgagaatcttttcgttcagatctttgagaggaagaggcgaatcgtcgagcaggttcagcaacaagtagatctctatgaccagcatttagcttccaaatgcctactcgccggagtatctcctccgtcgtggctctggtctccgtctctaccttcccaaacttccggtagttgttaaatctgatttttagtgctcaatttcttgtccgtgatggtaaatgtagatttgtttggctaattagagcaaaattgattagtagtcttagtggctattgagtaatgatgctgcgaagttgtttgatacttaaacgggaaatggattgaaagtttataaagcgtattaccataaatttgatgtcgaattactgtgagaagatggaattgaaagattagaaatggtgttagggttcataatcacactttgatgttgatttttctgtgataagttaaggagcattttgttaaggctagtattaacgtacattgcgtgtatatctgtttcagttacgattgaatagaagagtttctgtttgcgattcttattgtgatgtttgtttatatgtatacagagttaaataaggaggagattatatcagaacttctatttccttcatcaagaccttccatcgtttgtcctagcagtcgtcccttttcataccaacggcctgtcaggtttctagctgacaatgtagtaagacaagacctgacctctgtggtaaataacccgctagaagagcagttgcttgaagaggaaccgcaacacaacctctcacacaacttagtcagacaagtttcgaatcattctcatgagcaggatgttaatattgcatctcctagagatgtacatgagaaagagagattgccagaaagtgtctcaatcgattgcagagagaatcaaagttgttcatctcccgaacactccaagaatcagagagttgaaactaatcttgatgctacatctcctggatgtagccaaggggaaaaggttcccaaatgtgtctcaactactggttgtaagcggaaatcttcatctcttggttattgtcaagaggaaattgaaccagacacttgcattgaccctggattatcacttgctaagatgcagagatcaaggtcacgtcaaaaagctttggagcttcgtagtagtgcaaaagcgtcaaaaagccgttcaaacagtagaaatgagctcaaaccttctccgggtggtgatataggctttgggattgcttcattaaggtctgatagtgttagtgagataaagttatttaagcatgatgaaaatgatgaagagtgtcgagaagaagtggagaacagtaattctcaaggtaaaagaggagatcaatgtattaagattagtgtacctacagagtcttttaccttgcatcatgaagtggattcagtgtcaatatcttcaagtggtgatgcttatgcttctattgtaccagaatgtctactcgagtctggtcatgtgaatgacattgatatattacagtccattgagacaattgatgaagcgtctggcaaagtagatgagcaagtggatgatcccaaaagcagaagttgctatgaaacagcttatctcgatggaagtacaagatctaaaagctcaattcaagataactccaagaggaaacatcaaaaatcaagcaactccttttctggtaattttctgttaacaaattcaaatccctctcactgggctgatcatgaagtagaattacctcaagcaataactacgactagtgaagtttctatggtgacagatgcgggaacgagcatctttcagtctgaaatcattgcaagatctagaagtaatgctcgagaaaatagatccaagaccgagcattcaggctctgttgagtcttcttcaattaacttggagccaagagattcaattccagtactgcaaggtagccatgtaaaagattcactgaatccctctagtgttgatgctgaaggtttagtagttgaaaatattactagcagcgatcaatcaaaagaaacgggtgaatgtgttgacactaacagatgttcaagtgctgaaagggtaagccaaactggtatctccccagatgagaccacatttgcgggtgcaatccaagactctatatcccagatcgagcttttgagctttgttgagtcctcttcaattgaactgcagtcgagacactcagtcaagcaatcagacgatgaaagtgtattgttgaagcccgttactgttaatggcgaagctttattagtggaggaagataacaatggtgagtcaactgaaattagcggtatttcaaaatctagaagtttaagccaaactgacatcacggtagttttgccagtggtggtggaatctattcttaatgaaagtggtactccggaaaaattgattgaccattctaaaagatgtgatatcagttgtgggtccaaggaagtacagccactgggttcattgaccgaagtggggagtaaccaaagccatggaataattagtagggcaagaagctcactcatagaagaggaatcagcaaatgactataaggctctttctgatgggtctaatcataaatcggctgacaaacaacttgaagttagagaaggaaattcattgctgagaacccctgatcgccctgtttttgtggacaacttcgatgaggttccagagaatagtcgagaaaaatcaagcatggagaaggtccccaccccagcacccaccgcaagggtgtttgatgtcccatctctcactgattctggagtaaatttatcggcaaacaatgaaatgaatgacattgaagatcacaatgggttaaacatagaaatggtagcagaaatggaatcgtatgcaagccaccctggcttaaaagtgggagagaatgaacctacagagtcaaatacattcactggccatatagatgcattgacaaagagacctcaacatgaaacatcctctgaaaaagctgttcccccaattaaaagagatgtaacatgtacagaagcagatgaatgtcatgatctagagagcccgattcaagaatttttctgctctagttcccccatggggggttccatgcggcagaataagcggagaagaatcctggaaaaaccaactagaagagagctttcgtcaagtccaggggtgaatattctttccctaagtcttgggacagctcaatatatgagagtctttaactgctctttccttctaaatgtaattaagatgctttttgaatcatgggattttatatgttgcagggagacattctcgagtcagattatgttagggaagcagtacatcatagggaggaagccgcatgtcacaacgtcgataactatgacgttgagttacagaagttgattggatctgcatcttcacatcactatagtgttgagttacaaaaaatgattggatctgcatcgtcagctgagttacgatttgaagaggtatgttcattatttctctgtattcttatgtataatgtcttctaaatagtaatctctttctcctgaagttttaatcgctcataaaaaaacaaagatatcttcattccatgctctaaaagggaaatagacaattataccatcaattataagctgtactattgttattactgtaatgagaaaatctcattctaggtctaagtgtcgtagtattaagcacctctcaagctacacatgtatataaaaacctccataaaagttatgggtcaaaagctaaatgtaattaagatgctttttgaatcatgggattttataatgttgcagggagacattctcgagtcagattatgttagagaagcagtacatcatagggaggaagccgcatgtcacaacgtcgataactatgacgttgagttacagaagttgattggatctgcatcttcacatcactatagtgttgagttacaaaaaatgattggatctgcatcgtcagctgagttacgatttgaagaggtctgttcattatttctctgtattcttatgtttaatgtcttctaaatagtaacctctttctcctgaagttttaatcgctcattaaaaaaaaaaagatatcttcgttccatgctctaaaagggaaatagacaattaaaccttcaattaaaagctgtactattgttattactaatgagaaaatctcattctaggtctaagtgtcgtagtattaagcatctctcaagctacacatgtatataaaaagctccacaaaaattatcggtcaaaatctgaaatcctaattaagtctcagattagtagtgctcatccttgtgtgtctttatttctatgactctactgattgtctgccaagagatgaaactgcagtacagttcaagctcttagttccataatgatttatcttgttctatatgatgtgcaattaaccagaacatggatgtttacagagttatttactcaaggaagctggattgatgagtcctgcctcgctttcctacagaacagaacagctaagtgtacagaggagtcaaattgctccagatcacagagttggatcagaaaatattaacttttttccatatgctggtgaaacctcacatggattagctagttgtattgttcgcgactcagatagttctccttgcttaacacccttgggtttgataagctcagacgatggaagcccccctgtcttggagggttttattatccagactgatgatgaaaatcaaagcggctccaaaaaccagttaaatcatgacagcttccaacttccaagaactacagcagaaagtgcagccatgatagagcagatttgcaagtctgcttgcatgaacactccgtcattacatctggctaaaacatttaagttcgatgaaaaactagacttggatcagtctgtttcaaccgagctgtttgatggcatgtttttcagtcagaatctcgagggtagctctgtctttgataacttggggattaaccatgattatacaggaagatcgtacactgactctttgcctggtactggctcatctgctgaggctaggaatccttgcatgtcaccaactgagaagctgtggtatagaagtttgcaaaagtcttccagttcagagaaacgaagcactcagacaccagacctaccttgcattagcgaagagaatgagaacatagaagaggaagctgagaacttatgtacgaacactccaaagtctatgaggtcagagaagcgaggaagttcaattccggaacttccttgcatagctgaagagaacgaaaacatagatgagatatctgatgctgtcaatgaagcatctggttctgaaagggagaatgtgtctgctgaaaggaaacctcttggtgatgttaatgaagatcctatgaagcttcttccatctgtttctgaagccaagattcctgccgatagacagagtctagactctgtcagtactgcattcagcttttcagctaagtgcaacagtgtcaaaagtaaagtgggaaagctgagtaaccgaagattcacgggtaaaggtaaagagaaccaaggtggagcaggtgctaaaagaaatgttaaaccgcctagtagcaggttcagtaagcctaagttgtcttgcaactcgagtttgacaactgtaggtccacggttacaagaaaaagaacctaggcacaacaacattgtctcaaacatcacttcgttcgttccactagtgcagcagcaaaaaccagcacctgcactaattacaggtaattgttatttctttcgagtatgaggcttttgaaatttccaattaattggaggtatcattttaccatcttgcgctagttattcacctgatttgaccctatttatgtttcctccagggaaaagggatgtcaaagtaaaggccctggaggctgctgaggcttcaaaacgtattgctgaacagaaagagaatgatcgtaagctgaagaaggaagctatgaagcttgaacgggcaaaacaggaacaggaaaatctgaaaaagcaagagatagagaagaaaaagaaagaagaagatcgaaagaaaaaggaggcagaaatggcttggaagcaggagatggaaaagaaaaagaaagaagaagaaaggaagagaaaggagtttgaaatggctgataggaaaaggcagagggaagaagaagacaaaaggttgaaggaagctaaaaaaagacaacgcattgcagattttcaaagacaacaaagagaggctgatgaaaagcttcaagctgaaaaagaattgaaaagacaagctatggtaagagcccttctcttgttctgttcttcaaaactttgtttgactattgtggtgtaggagattttgctaagttaaaaataacgacatttttaggatgcgagaataaaagcacaaaaggaactcaaagaagaccaaaataatgctgagaaaaccaggcaagcgaattctaggatcccagcggtgagatcaaagagtaattctagtgatgataccaatgcttcaagaagctctagagaaaatgatttcaaggtataagtctctcatcttttgtagacaatttagagatgaaaccaatcataattgatgacaatagttgtgcttgcaggtgataagcaatccagggaacatgtctgaagaagccaacatgggaattgaagaaatggaagagtcgtacaacatctctccatacaaatgctcagatgacgaagatgaagaggaagacgacaatgacgacatgtccaacaaaaaattcgctcctacttgggccaggttttgtttctgaattgctctctcattcgttaatgtttatctctcattagtcattatcatttgtttaccccaacgcttcttatctacacagcaagagcaatgtacggctcgctgtcatttcccaacaaaacattgatcccgatgttacttttcctgcaaaaagcgcctgtgatataagtaacggtaagatatcttgattacattttatagaaaaaaagtgtcatagttttcgccatacttatggataagtttttgttatgaatctctcagttcttttgccgcgaaagttccagtcgagatagcataaacaacgagaagccaaaggtcagattctcagtgacattaaaaccacaaacaaagtaagtatctatgtgtttcaagtttcttcttaacttttgctgaaaatgaggaacataaaccatagtatctttaagcttaagattcctttttgctttcttatgtatcagtgaatgggtaatgtaataattaattagtcaatccccattgacgctcatgttcatacataacggctacttccattttgtaaaatattcataggttctgttgattttcctagtggaaagagccaggtgctgaaagcaagagatttgttctttttcaatataaccaaattctcactacttttcaatgtcgacttcgtcaaaataacttttggataagaaagaaaaaaaataactttttggatcacgatcgcttaactatatttattatttaataactgtcgaattcagaacttaaataaagtagtcacaaatcacaattgtgggatttattatttagcactcgctcacttttgcacaacggattgaaaaatgctgttgaacttgttaaatatgtttactgagatggtataatcacagaaattcactagtatcaatttcagtatctgtttcaaaagtagtgaatgctttttctagtctacaaaacagttaacagtaaacagtcaaccatagtgggtgagtcaaattgagttatatgataaaatagacagaaacttaaatgaagtaaaagatcaataatatttctattcacgtggtggcgctatatagattccattaaaacggtcagttttgatttttgcgtcccatgtaccagaccccacccgacccgctccaccacttttgttcccacccttaaaaacgacagcgtttcacaccaaccttaataaccgttgccacagtaaaaatactataataccctcaccttcttcataatcatcaattcgaatccattttcccaccacagtaataccgaaactttctcttctctctctctctaatgtctctatcaagaaagcttcttgttatcttcttcacatggataacagctctatccatgtcgaaaccaatcttcgtatcatccgataacatgaatttcacattcaaatccttcacaatccgtaacctcacattcctcggagattcacatctccgaaacggtgtcgttgggctcacaagagagctaggtgttcccgatacaagctccggtacagtaatctacaacaatccgatccgtttctacgatccggattcaaacaccacggcgtctttctccactcacttctccttcaccgttcaaaacttaaacccagatccaacctccgccggtgacggactcgctttcttcctctctcacgacaacgatactttaggaagtcccggtggttacttaggtctcgtcaattcctctcagccgatgaagaatcgattcgtcgctatcgaattcgatacgaaattggatc

SEQ ID NO: 907 - DNA, 42356 bp, Arabidopsis thaliana
ctcatttcaacgatccaaatggtaatcacattggtttagatgttgatagtttgaactcaatctcaacttcagatcctttgctttcgtctcagattgatctcaaatctggtaaatcgataacttcttggatcgattacaagaacgatttacgtttattgaacgtgttcttgagttatacagatccagtcactacaacgaagaagccagagaagcctcttttatcggttaacatcgatctttctccgttcttgaacggtgaaatgtatgtaggattctcaggttcaacagaaggaagcacagagattcatctgatcgagaattggagtttcaagacttctggatttcttccggtgagatcgaaatctaatcatcttcacaatgtttcagatagttctgtggtgaatgatgatcctgttgtgataccgagtaagaagcggaggcatcgacacaatcttgctattggacttggtatttcttgtccggtgttaatctgtttagctctctttgtgtttgggtactttactttgaagaaatggaaaagtgtgaaagcagagaaggagcttaagactgagctaatcactggtttaagagagtttagctataaagagctttacacagctactaaagggtttcattcaagtagagtcattggaagaggagcgtttgggaatgtttacagagctatgtttgtttcctctgggacgatctctgctgtgaaaagatcgaggcataattcaaccgaaggtaaaacagagtttttggcagagttatcgattattgcttgcttgcggcacaagaatcttgttcagttgcagggttggtgtaacgagaaaggtgaattgcttcttgtctatgagttcatgcctaatggaagtcttgataagattctgtatcaagaatcacaaacaggagctgtggcgcttgactggtctcataggctgaatatagcgattggtttagcatcagctttgtcttatcttcaccatgagtgtgagcagcaagtggttcacagagatattaagacgagcaacataatgcttgacataaacttcaacgcaaggctgggagattttggtctagctagactcacggagcatgataagagccctgtctcaactttaaccgctggtacaatgggttacctcgcaccagagtatctccaatacggcacagcgactgagaaaacagatgcttttagctacggagtggtgatcctagaagttgcttgtgggagaaggccaatagataaagaaccagagagtcaaaagacagtgaatctagtggattgggtttggagattgcacagtgaaggaagagttcttgaagctgtggatgagagattgaaaggtgagtttgatgaagaaatgatgaagaaacttttgcttgtgggtcttaaatgtgcccatccagatagtaatgagagaccatctatgagacgtgttcttcagatacttaacaatgagattgagccaagtccggttccgaagatgaaacctacattgtctttctcttgtgggttaagtcttgatgacattgtttcggaagatgaagaaggagacagcatcgtgtacgttgtatcttagtataacacttttaattctttcgttttgattgatattttttcatttgattttgtataaacactatgtgtggcctttggttcaatgagtttatattgaaccattaggtttctgttttcatataaatctatctcagaatcttgaacaaaagctcattttctaaatagggaatgatttatagagaaatcaaaagccaaaacccaatttcaagattgatcaaagttacgtaccttacttgatagtgaagaaaccttgtgacgcgatctatatacataacatacgctcatgacacgatcacacaacatggcgcaatgcgcaatgatggtggcagaaggaaagagagcacactcccgacaagggcaaaactatctttttgctaatcccaggttgtgctctctttcttctgtcaacatttttcatcttcttctcgggaggaatagaagaagaagaagaaaaagagatgtgacgtgcggcgtaagtaagcagtgacggtggctctgtgactgtcatttatagcgaagaggatgagtttactggttacacccggtgaataagaggtggagaccggctatagtgtgtgatagaaaaacgaagctgaaaatggtcctgagattacttaagagtcatgaatctggaagtttctacaatattggagattctccctttcactttcttacctcttcgctatcacatttaattaatttcttccttttcatttatattttgtttcatttcttcaatattccacttctaataatatttttaagtgaataagaaactaaagatgtgtcacttgaatctaaaagaaaaataaaaatattcatatgatccgacgttttttgttttggtttttggttgttgttttgaagcttctaaattctaatgggatatgcaattttatttttcaagtttcttgcaatggtttgagccaaaaacctctagtggtgaaatgtgttatttaataaatagagctgaaagaaaatggaataaaatctcgcacgcgtgaaagtcggaagttgctttcacgtaaatgaacaaggcaaaactttaagtcgtcatcgacagctcaaccaccctgcgatcctgctgttaaatctcagccgtccgtttaaatgagaactcgctagttacagggcccactttttatttcgtcaataggcacgtgttgatttagattgacacgagtcgagtatatagataggcttacaccaagaggcccattatatatatacaaaacaggcctttttaatttttggcccaacgacgtttccagcttgtggcgagagagagcaacacagcgaaggagaaacaaacattttgaattgactgaagaagcagatatgtcaggtttatcgagcttagtttctcatagaaatggagcaatctctctgttacaactcagtttttcgaaattcggatgtttctctcgagtgtggttttcttccggcgctgtcaaaacttcgaaacgggatgattctgcttctcaccaagcatttggtgtctctggtgagtttgttttcttcatattcttattgcgtttccagatttattttaaaatcaattcaagcttttcatgtatagtatatagcaggatcctgattagaagtgtaaaaattcaatttttagaattgtagagtgaaaaattttgtggctattgctgaattttgaatcctatcatgtttatttcctaaatattctagatgtgtttgactaaagatttgaacttgttggggagttatgaaacaggatttgatatggagaagagcatatacaacattcttacaattgaccgttggggatctctaaatcatatggattataggcaggctcgtcttagactggttcatgggaagctggctttgaagtttcttaaatgggtagtgaagcagcctggtttggagactgaccatattgttcagttggtctgtattactacacatatactagttagagctagaatgtatgacccagcaagacacatcttaaaagagttatctttgatgagtggtaaatcaagctttgtttttggtgctttgatgaccacgtaccgtctttgcaattcaaacccttctgtttacgacatcttgattagagtgtacttgagggaaggaatgattcaagattctctggaaatatttcgcttgatgggtctttatggattcaacccttctgtatatacttgtaatgcaatactaggttccgttgtaaagagtggtgaagatgtgtcagtctggtctttcttgaaggaaatgcttaagaggaagatttgtcccgatgtggctaccttcaatatactaattaatgtgctctgtgctgaaggaagctttgaaaagtcgtcttatcttatgcaaaagatggagaagagtggttatgcgccaactatagttacatacaatactgtgttacattggtattgtaaaaagggaagatttaaagctgctattgagcttctagatcacatgaagtcgaaaggggtcgacgctgatgtctgtacttataatatgcttatccatgatttgtgcagaagcaatagaattgccaaaggttatttgttgctgagggatatgaggaagaggatgattcaccccaacgaagtcacgtacaatacacttattaacgggttttctaatgaaggaaaggtgctcattgctagtcaacttttgaacgagatgttaagctttggactttccccgaatcatgttactttcaatgctttgattgatggacacattagtgagggaaactttaaagaggctttgaagatgttttatatgatggaagcaaaaggtcttacaccttctgaagttagttatggtgtacttttagatgggttgtgcaagaatgcagagtttgacctagcaagaggcttttacatgagaatgaagagaaatggggtatgtgttgggcgaataacatacactggaatgattgatgggttatgcaaaaatgggtttctggatgaggcagttgttctgcttaatgaaatgagcaaagatggtattgatcctgatattgtcacatactctgctcttataaatggattttgcaaggtggggaggtttaaaactgcgaaggagatagtatgtagaatttaccgagttggtcttagtccaaatggcatcatctactcaaccctgatatacaattgttgtaggatgggatgcttaaaggaagcaataagaatttatgaagctatgatccttgaggggcatactcgagaccatttcacgttcaatgtacttgttacttcactgtgtaaagctggtaaagtggctgaggcagaagaatttatgcgttgcatgacaagtgatggtattcttcctaacactgttagctttgattgtcttatcaatgggtatggaaactcaggtgaagggctaaaagcgttctctgtatttgatgagatgaccaaagttggtcatcacccaacattcttcacatatggtagtctcctcaagggattatgcaaaggtgggcatttaagagaggcagagaagtttttgaaaagcctccatgctgttcctgcagctgttgatactgtaatgtacaacacactactcactgcaatgtgtaaatcagggaacttggccaaggctgtctcactttttggtgagatggtgcaacgaagcattctgcctgacagttatacatatactagtcttatttctggattgtgtaggaagggcaagactgttattgccatactctttgctaaggaagctgaagctcgaggtaatgtacttccgaacaaagtgatgtatacctgttttgtggatggtatgttcaaggctggccagtggaaagctggtatttattttcgggagcaaatggataaccttggccatacccctgatattgtcacaacaaatgcaatgatagacggttactcaaggatggggaaaatagagaagacaaatgacctacttcccgaaatggggaaccaaaatgggggtcctaatctgactacctacaatattctcttgcatggatattcaaagaggaaagatgtatccacaagctttctgctgtatagatccatcatactgaacggcattttacctgacaagctcacatgccattctcttgttctcggaatttgtgaatccaacatgttggagattggtcttaaaatcttgaaagcattcatatgccgaggtgttgaagttgacaggtatacgttcaacatgctaatctccaagtgttgtgcaaatggagaaatcaactgggcatttgatttggttaaagtcatgacctctctcggaatctcgcttgacaaagatacttgtgacgccatggtaagtgtcctcaacaggaaccacagattccaggagtctcgcatggttttgcacgaaatgtcgaagcaagggatatctcccgagagtaggaagtacattggtctgattaacggactttgtagagtgggagatataaagactgcgtttgtggtgaaggaagagatgatagcacataagatatgtccgcctaatgtagctgagagtgcaatggtaagagcgcttgcaaaatgcggtaaggctgacgaagccacgctgcttcttcggtttatgctgaaaatgaagttggttccgactattgctagtttcactactctaatgcacttgtgttgcaagaacggtaatgttatagaggccctggaattgagagtcgtcatgagcaattgtgggctgaagcttgatcttgtgtcatacaatgttttgattactggactttgcgccaaaggtgatatggcacttgcatttgaactctatgaagagatgaaaggagatggatttttagccaatgcgactacatacaaagctctcatcagggggttacttgcccgggaaacagcattctccggggctgatattatcttgaaagatttacttgcaagaggattcataacatctatgagcttgtcacaagattcacacagaaacttgaaaatggccatggagaagctgaaggccttgcaaagtaacaagaaggattaacatcagaacgagctttaagagtaatcatatgatcaacttccgtacgcaaattagtattaacgcttattacaggcatctgtttctctgtagcacggttcgttctgaatcctaatgtttgttactctctctgagatccttacaaatccttatttatagtgttttctgttttctagatgatattgcagtttgtcaccgtgaagagctggatttgcaaagtaatgttctctcgaagaaccagctaaagctctttgaactttgtctgattcacagtatgcatcttactcattctctctctgattgacaataaattatgcatcatagtgatgattattttactttcttgaggtgagtgccagtcagttccagaagcttaagcttgtactgttatacagaacaagacaagcaagacagtgaaggtgcaaccttactggctcctttctctgacaaatacaactcaaaaactacaccaaaggagagtttgattgaatctcttaaacttccaggtgggttgataaacgctgtctttaactccacttgcattaaagatcttgtttgtttgttcgtttcttacatattggactctctggccaagtctttctttacagagacaaagcaggaggaggaacaagctcttaatagctggagctgtgttgtcatttcatgtgctgaattcacctgtaatcaatctggactcaccaaagataatggttcagggaaaaatgatgcagagccatggcagcaaaaaaaaaaagcttcttctgtgtctttgaagattctttttgatgaatatgtcggaacaacgagaaactagttgttgtgttggaatggtgtctgatggatcttgatgcagacagaatctaacagttagtcagatttgcatcactggatttgttccattttgcaatacccactcgtgagcctcctgtaacacaaatattattatatgtttaaatgtgttcattgtctgttagtctactaacaatttaattaagatcaaatatataacatgtttagatcattattatattaaactttggttacacctattatgagtaaacaaaatgattatgaacaaattgtcgcagctactattcaacaaattaattattgaatttaccaaatctctattgtttattgctctccatactaaataattaaagatattgaagagtataaaatgaatggagcaagtggattaagatataattagtttggtaaaattggtagaaagagtgatgacagatgacattttagattaagaatttttatcaaacaagaggaaaaaagactattatttacttaaaagtaatcatatttcatcaaacaaatagaccacttgattaattgataaatcgattcagattatcttttacaagactgaagattgatttagccaattgatatgtgtatggttcaaattgataatctatttaataataattaaatgaaaaaccttttttagctgaaaaaaaagaaaagaataaatgcaaaaagacaaaacagtgccagcaagtcactcgcttaacatcggtctgaaccaacatatatgctctctcctcaattaacagtcgttagccagctcatctttccgttaaaaaaaaaacccaaagacagtgattcacgtcacttgggtctaataactccgtttatataaaccgttacagacatcgcacaccgagagagagataataaagagagaagcaaaaaagaatttttatagaaagaaaggaaaaatcagaaaaggagagaaaaattaaaaaagtctctcttttctctttttcttcttcgtctcccatattctccgatcaaaaatatatttctctctcactttccttggttttctcggcggcttcttcttctcctatttctccctcaaatcgttttctccagttttcttgggataaatcttcctcctttctgcagacgccatgtcggtgcgtttaaatctcctctctttattatatacatatgcttgagaacagttttgaattcgatttgtttggttttgagaattttagtttcgttttggtgagttagatgattatatgtttccttttgattggagggtttttgttgtttcttttatatccgctgaaaatcttagattaaatagaaaaacagatgtgaaattgtgattctgatgagctattgtcttgttgttgaatctgataatcctgattctggatctcgggttttattcaagttttgatctttttctgaatttgattgattaagcttagatttttgattcagggtttctgattttggatttgagatgaaataaaggtttgataaagagaagttgttttgttgtctttgtgttagcttatctttttttccccagattgttgttctttgattttattgatagtgaaagaggcatgaatattgtgtggcattgtttatggacaagcaaaagttctttttgccttgtggatttgtttgcttatttagagacacaattgaaatccactagtttcaaacttttggttttattattttctcacctaatcaaatggattataaagttgtttggaactttaaaatttctcttatggtttggttttggtaatccttttgacttgtgctctatattgtttgctacaaaatggaattataattagtttgggcaaattgtacaaaccattttttcctcgttattgatgatagaaaaggttccattccttaagtcctcattcttatttacttggttgattctttttttcggtttatccttgcctcttctcttttgtatgtgctcccacttaagacttgcttagcttatgaattcatctacttggcaagattgaacttatttcttgatttcaccatttggtttttatatgaacaacaggacaaaggtcgtcccttgccaaaatttggtgaatgggatgtgaatgatccagcatcagcagaaggttttacagtgatattcaacaaagctagggatgagaaaaagaccggtggcaaaccgggatcacccggtaaatccagtgagggtcatgttaaatctggaggaggagatcctagtaaacctcagcctgtaagtttcctcttcttcatctttatctccttgatccattgtcacactaaatggggttttatctttggtttcagaaaaaatggctctgctgcatgcaagctccagctgtggactcttgacagacacaaagatggatttgcttgctgctaaaaaaaaagtcacagtgcttacacatctaaaagcaatggttctttttatgttttattgtcgtctttcttgaaattacccacacacacaaaaaaaaaaggttcctaagatgatttggagctcacccacctttagtatcacgattatgattccttcttctttgaagttgtttcttcttcttaaaatgctgtaaaatcgtgtctccattttattggaaaaaaaaaaggaagaaaaacgaaaaaaaacacagttactgtgtctatatgtaatgattctcttggggtctttttgttttttgattttatggtgtctttttccttgattttttaaattatattatcttgggctcctttttaatattttcctccttagtaaatcaaacaagtttcattaatgaaaacgaacaagaacttgatatatcataattgtttttacacaagcttattatacaaaacaaaaacatgacacactgaagttggatcttgatgggctttcactaggcccatactggaatatagctaagcccttaatagattactggagacccttctgtgatcctctaaatctgaatacaaaaatgattagtctcgtttcaaatcgtttcttttggtcaaagtgagaaagaaaaaaacggaaagggtgcataaaagtttgcgatgatcaaaacgatcaactttaattcccacgagagggaaataaatgggaacagaaaactaaaaggtttaaaatttaatgggtatgattcaaaattcatatccaactttaattagtgttaatcataatttaatgatatgacccatatctgtatctatatcgtcacttatatactgtatgtgcttacgtttgttgtatatatagataaatattgcatgtaagtaatcagttaagaactatccaaccgtcaccttagaaagtgaagtgtgaagatgtcggcagctgacaaaaaaccgttgattccgccgtcacatatcaccatcaaaatcaaaagtcaggtacttgtaataatcttaatgttattataagttaaatttttttctaaaaagaccactttcttgttatgctattgtgaaaacaataaattttccatacacaagtatttggagattatgcaaaacagcaaagaattcattgattctaagtgctaggtttctaggtttttttctgttggttaaatcgttgacagaaaaatacatattttctataagtgaatactttctacaacctcaaagatgataatatttttaattttaaccaatctaaaattaagctgagttaacatgcgtatagattaacatgttaaatttttgtaaatataataaaataggatgacatatgtgtgtacttccggattaagagggacgttgagctccgtacgatgatgcaagcatattccgacaaagttggacaacaaatgtcagcttttaggtttcactgcgatggaattaggatcaaacccaatcaaactcccaatgaggtatttatttatttttgtcatagaaatgttacatatgaatcatattgagaaacaaaaggaattgcagcttgatcttgaagacggagatgaaatcgatgcatttgttgaccaaatagcagggttcagccatcgccattaagagtatcttaacgatataaaaagtcattagtgcgtttacaaaaagatcaatattgaaatcttgtttaattattttcacctactttttaataagattttagtatccttttatcgatgtaacaatgcaaaaggtgatttatggatgaactttctctttgatatagagttaatctatacgttagaggtaatgtttgttcgcatggaagttgcaacaaaaaagagagatagaagttttctgttctcgtattaaatgtgagatatatacacaagaacaataacaaaatcattgtcgtttgtcaatacgatcatcattagaagaacttagaagcctttgcccattttgactagtcaagctatatagaattatagataacaaaatgataatcggagctatcttattagcgttacatgtcgtctagttcacgtgcgaaatagttgtattttcccatcaatctccacacaaattttccgaatttgcacaactgtctcgtaattaattatcttgattgggccatatcatatgaattatgctagattagatatataatacgttaagaattacttattcaaatatcttattttctcacttagaacttaacatagaaatatcatcttgtatggattttattagtgacgaattacgtagattctaatgggtctttttggttttaagaattattagtgactaaaaattgaaataaagtcggcaataattaaataggtgatgcaaacaaaaagttattaaaataaaaccataaagatatttataaatttaataaagatgaaaaattaagaatttgatagtgaatcatactccctctgttccacaaaaagagtcattccatatttttcacacatgttaaaagttctatactccttattaatacactaaataaaattatactatctcctattaatacattaaagcaatagagttaaaaaaaggatttttattcaaattttaaattggaaatatcaaaagacactctttaatgaaacaaaaattaaatcttaaacgacactctttgcaaacggaatgaatatttcattacgattagaggtgtgttacacaaaacacaagcatgactcactgaagttggaaatcttgatgggcttttactaggaacataccggattatagctaaacccccttaatcgcttctttcgatcaaagtgagaaaaatcagaaaggtcaatgaaagtttgtgatgatcaaaattcccacaggaggaaaataaatgggaactgaaaacgaaaaggtttaacatttaatcgtatgattcaaaattcatctccaacattaatgtcgtttatcgatatttaatgatatgattcatctgtatactatatatatatatatatatatatatatatatatatcatgtaactaatcagtttataagaacaatccaaccgtcataatagaaagcgaagcgatgtcgtcgtctgacaagaaaccgttgattccgtcgtcacatatcaccgtcaaagttaaaaatcaggtacttgaataaatttcgccattacttatgctaaaaacaagataatggtgtagttttgtaactcaattttgaaaagaatcacttttttgttatgctattgtgaaaacaagaaaaatttcaaacataattatattttggagatttttgcaggacagcaaaacaatcattgatttgtaatgttcattagtgttaggattttagtttttttttgttttaattttatatattttgcaatagatttcccaacaaaagtgtatatcttttatagcaaaaattataatattcaaccgtcctaaaactaagatacgtataacatgttaaaagttttgtaacaattactatttaacaggacgacatatgtgtgtacttccggattaagagggacgtcgagcttcgtaagatgatgcatgcatactctgacaaagttggagtagaaatgtctactctaaggtttctcttcgatggaaataggatcaaactcaatcaaactcccaacgaggtattttttaaaaagttactccaataatgtatatatgaatcaagttgataaattaacgaaaacgattgcagcttgggcttgaagacgaagacgaaatagaagcatttggtgaacaactaggagggttcagcttctttcatcgccattaagagaatattaaagtcgttagaacgactcaccaaaaaatcaataatttatagtcttgtttaattcttttcacctactttttcgtactacaagagttggttattcatcgatgttaacgagtaacaacgataaggtgtttatgtatgaacgagttatctataagttatttgaatgaagtgtaagagatatgagaatagatgggcattgatatatatagatgggcattgtccttgatcgttatatttgtttaagtcacgaaagatataagaatcaaagaggtaatgtttcactcgcatggaaattgcaacaaagaaaagagttagatatatattctatttccgtattaaatgtgatatatacacaagtacaattacaaatcattgtcaaatatgatcatcattagaagccgtggcccattttgactagtcaagctatacagataacaaaatgaatataatcagaactatctttttagcattacatgtcgtctagttcacgtgcgaaatagttttttcatttgcccatcaatcaccacaaaaaatttccgaatttgcagaaaatttctcgtaattaccttgactgggccatatcatatgaattacgctagatagaaatatatattacgttaacaattactcaatcgaaatatatgttgtacaaatttttaattagcgacgaattatgcgctaacacaaaaaggttaaaaggaaaattaaaaagtcaccgtcctaataaaaaataaatcaaacaattaggtttgtcgatgaccaataagaaactgccatttgtcaaccaaatacacttccctttcttgtccctctctcctctctgtctctcttctttctctctcctcgccactgactttgctctctctgatttacagaagaaatttcaaaactttcaaaagctcaaatcttttttccctttttcgattatattcatcgtcgtcgagaccggagatatctttatctgatcaaaagtttcttttttccgatcgtcttttctctcccagagaaaaattaaaaatcgctcctttagattatttcctttattttcttggcgcggtttcgatttcacgtttctgggttttcttcatcgacccagaaaaacaaaaaaaattcaaaccgcaacgatcaggtacgaatcgaattttttttgtcaccatcgcttgttttgaagatttcttcgtcggtggaagagacgcttcttttattctaagattagcctctttggtttgtagaatctgtaacaaattttggtgattatgtttaattaaaagttaccatctttgatcttcgtttaattaatctttcccttaataacatgttcttagggttttgattttttccttatgtgtgtactgtttgatatttacttaatttgcttaatcttctattaatggaacagaaataaactgattttgagctctctgtgtttgtgttgtctctctctgtatcaggtagtgaatccttgattttatagtctatataaagaaagaaaatgcaaaatggttgctaagaagggacgtagagattcttcagactcttctccaattgtggaggttggagagattgacacaagtgctccttttcaatctgttaaagatgcggttaaccttttcggtgaagctgctttctccgctgagaaaccggtttttcgaaaaccgaatcctcagtctgctgaggtaatattcattaagagttttgtgtttttaagaggttgtataatctgaattttgtgtttgttggtttgcagaaagttttggtgaagcaaacagagcttcacttggctcagaaagagttgaataagttgaaggaacagcttaagaatgctgaaactattagagagcaagcgttgagtgagcttgaatggtctaaaagaactgttgatgaacttactcgtaagcttgaagcggttaatgagtctagagattctgcaaataaagctactgaagctgctaagagtctaattgaagaagcgaaaccggggaatgtttctgtagctagtagtagtgatgctcagactcgggatatggaagagtatggggaagtatgtaaggaacttgataccgccaagcaagagctgaggaaaatccgtcaggtttcgaatgagattttggaaacaaagactgttgctttaagtaaagtagaggaagctaagaaagtgagtaaagttcattctgagaagattgagttgcttagaaaagaaattgcagctgttaatgaatcagttgaacagacgaagcttgcgtgttctcaagcccgaaaggaacaatctgagatatttgcggagaaggagattcagcagaaatcgtataaagctggcatggaagaatctgccaagaaatcacttgctttgaagaatgaatttgaccctgaatttgcaaagaagcttgaagtgcagttgactgagacatataatgagatcgatgaactgcagaagcaaatggagactgcgaaagcatcggatatagattccgtaaatggtgtgagtttggagttgaatgaagctaaaggtttattcgagaaacttgtggaagaagagaagtctttgcaagagttagtggaatctcttaaagcagaattaaagaatgtgaagatggagcatgatgaagttgaagcgaaggaagctgaaattgaatctgtggctggagatcttcatctgaagcttagcagaagtaagagtgagctagaacaatgtgttacagaggaatctaaagcaaaggctgctttggaagatatgatgttaaccatcaatcagatatcttctgagactgaagctgctcgacgagaagctgagggaatgagaaacaaagctaaggagttaatgaaggaagcagaatctgcgcatctggctcttgaagactcagagctacatctaagggtcgcgttagatgaagccgaagaagcgaaagctgccgagacaaaggcgcttgaacagataaagtcaatgtctgaaaaaaccaacgctgcacgtaattcgacttcatctgagtctggatctcagagcatcacactgtctcaagaggagttcaaatcactgagcaagagagctgaggtattcgataagctagcagaaatgaaagtggctgctgcattggctcaggtggaagcagtgagagctagcgaaaacgagacactgaagaagttagagacaacacaagaagagattaagaagctaaagactgcaacagaagaggcactgaagaaagcagctatggctgatgctgccaagaaagcggttgaaggagaactcaggagatggcgagaaagagatcagaagaaagcagaggaagcggcgacaaggattctcgcagaagctgagatgaagatggccagtgaatcatcaccgcaacaacattacaaagctccgaaacagaaacctgtcaataacaaactggagaagacaaaaacatctgtggtatcaaagaaagtgcttatgccgaatctaagtggaatcttcaacagaaagaagaatcaagtggaatggggttctccttcatatctccctggagagaaacccttttgatgatttcttctttttcgagaattgaactttttgtttgttgtgaacaatccagaaagttgtgtgctttttttggtaaaagaaggtttgtggtttgagatcagaagcagttgcagctttggtctaacgtgagaaaactggttgttgctgtaaattggatcaaagctatttaggtggttgttttactttggctctttgttatgattgtgaatgctatttgttattcttgcataagcttcaactttacgataaaatatagaaattaaatggattacacactgagctaagtttatgaagtcctcctaggaccgaaatattctcgatttggtttgctgagtgggaatatgagtggtgtatttgattagatatgttacgttatttggaatccaaacaaatcattgtgttctttgatcacttatataagttatattgagcaaatcaatcattttaaaatagaaataatgagaagtttcttagttaaaatacaaattacaaaagaacagatttttaagtatatagaaatccatatcaaaatcaatttcatggaatttttttttttggttcaacaagttaatggaattaataatgtatataacactaagtccgtatttggattgaaattgatgtatttttatttttatatgattcgaaagtgttttagaatccatgaacaaatgattttgagcgtgttgatttgtattggttagaaacgtgttgatttgtttgtaggtaaggtgccagaatacacaatgtgttgatttgatttgaagtagaacgatttgggtttggcaatgaggcagagttacaagaggaggcaggggaatgcgtttagggtttgtatccgatgcaaccgggtttagatcgtcttggagacgcaatataccatcctccttcaaagtagctacccaaccatgggatgacccgatcgttaccattggatcactatttaccaactctagaggtaccttcttttccaagcaagtgcgtcgagacatcatcataacatcgagtctcccgagatgatcagctccacaaggttgaacgccgacgattgaacaaggaggggtttgcatcagagaggatcttaccagtacaggtttcctccgaaagcatagtagcttcaaaggttggtttagaagcagagacatgagtaagatgttgttaccgaaatgcaaaggctgcaagagattttgtagaattaggtattgcactaacttgagtttattgattcacaaagtgtgatatttatacaagagagtcatcgtataaaataaactcgaatccctaaattataggacataactctgtcacaaaatatatcacaagagattctactctatccccaatactccccctcaggttggagtgtgaagattctgaatacccaacttggacataagataaatgaattgattacgaccaagagccttagtgaaaatatcagctagttgctccgaggtcctaacatgatgtgttgttataatgccatcacgaaccgcatcgcgaactgagtgacaatccctttcaatatgcttcgtacgctcgtgaaagacggggtttgctgcaatagaaatagcagccttactatcacaaaacaaacgagtaggcgcagcgagtgtgatacctaattcttttaacaacttgttaagccatttgatctctttgagagcaaccgacattgctctatactctgcttccgcagacgagtgagaaaccgtgtcttgtttcttggttttccaagaaataggcgagccaccaagcagaaccacatacgcactaagtgaacgtcgagtcaagggacaagattgaaaatccgaatcacaataaacctcgagagtcaaatccttattagaactcagcaaaatgccctgacccggtgaacccttcaagtaacgaactatgcgcatcgcagcctccaaatgagcttccctaggagcttgcataaattgggacaatacatgaacggagtagctcaactctgggcgagtatgaagaagatatagtagccgaccaacgagacgacgaaatggcttgggatcctgaagtaacggaccatcgtcggaggcaaggtgatgattttgttccaacggagtatatgccggtctcgctcctagagtgccactatcagaaattatatcaagggcatattttcgttgagacaagaaaataccatcaggcccacgacttacttcaatgccaagaaaatatttgagcttgcctaagtctttcatggaaaagcaacgtcccaaatactccttaaatttctgaaccatatactcatcattaccgcagattattaaatcatcgacatatactaagacgcgaagttcaatccctttacaggaataagaaaagaaagagtaatcctcataaccttggatgaacccgaatcttttaagagcatcagacaatttcttaaaccaacacctaggagcttgttttaaaccgtatagtgacttacgaaggcgacaaactttgtcaggatgagagtgtcgaaacccgggaggaagtttcatatacacctcctcttcaagatcgccatggaggaaggcattatgaacatccatttggtatacttcccattgattagcagctactagacgaagaagagtacggaccgttgtcatttttaccactggtgcaaaggtttccgtgtagtcttccccttcaatttgattgttgccttgaactacaaggcgagctttgtaacgttcaaccgttccgtcagcattaaactttgttttgtaaacccactgacttccaatagctacttttccagttggcagatcgacaatgtcccatgtcttgttaacttcgagtgcgtcaacttctttatacattgcatcattccagactttaactttaacagcttctttaaaatgtttaggctcatcatttgcagtgattgcagcaagaaacaccttatgtcctgcggaaaaacactcatcaaaaatataatccgttaaaggatattgtgagttaccttggatcgatgacgaggactgagatgtagaaggagagagaacgtgaggagtgtttggagtgcaagaagcattgtatagaatgtaatctttcagacgagcaagttgttgaacttgtcgttttccttgtcgcggaggagtgttttcaataatcggagtggtgtcttgctggggtggagagacatttgtagacggtgatgttgaactagaagagttagttggcgtctgagttggagtgacacttgtagacggagaaagtgggtcatcaactggagtcggaagactttgtggagtatcatgctccgtatctgactcagaaacatcagtgacacaaaccggtggatcagacaaagaattttcatcgctccccctgtcttctagagtcgtaaatggcaaccaatcttcatcataagtgatcggacaagtgaccggtggtgtgtagatcgtatcaccctcatttgttgcataaggaaacacattttctctaaacaccacgtcacgagagactatgaattcattagtactcaagtcgtatactttccaccctttttgtccaaatggatagccaacaaaaatgcataaacggcttctctcaccaaacttatctttatcccgtgtaacacgatgagcatagcaagcagagccgaagactcttaattgatcataatccggcttacatccatgaagcaactcatagggagagagaccattgtgaatagaagacggtgtacgattgattaaataagctgctgtcatgactgcttctccccaaaacttgattggtagtgatgcttgaaacaagagtgctcttgaaacattcagaatgtgcctatgcttgcgctcgactctaccattttgttgtggagttcctacacacgaagtctggtgaacaatgccttgttctttaaagtaggatgaaagacacatgaattctgtaccattatcactgcgaatgattttaacagattttccaaactgtttttccgtgtatgcaagaaaattagtaagaacactacgaacttctgactttgccaatagtagatatgtccaaactgaccttgaaaaatcatccactattgttaaaaaataaactgctccacatgaagatggcactcgatatggtccccaaacatcacaatgaattaaagaaaaacaatctgttgatttattgctactatctggaaatacttctcttgtttgttttgctctaaaacatacgtcacaagaacgagagctaacagaacaagaggatcccgaaaacaaaggtaaagatgaaagaacagaaaaacttggatgtcctaaacgttggtgccacaaagcatgatctgttgtgacatccactttatgcaccgttgttgtagccgcatccgttagataatacactccatcacgttcctccccggttccaatcaaagtcctcgaaaatcggtcctgtaaaacacaaattgtatcagtgaacaatgccaaacatttgatctgtttcactagcttggaaacagatattaatgagcaatttaacgctgggacataaagaacattagacaaagacacagtctctgaaagcttgaatgttcccatgcttatagcaaacgtttttcgatcgtccgcaaatcccacagaacacgaagggatagtaacaatgttagtcaagagagaaagctgcccagtcatatggtgagatgctcccgtatcaagaataacatcgccaagtttcatcttaccagacaatttatcggaggtgccattgtttttattctgaatcatctgcgtaataacccgcaactgatccggtgtgaattctggaaaggatgagagattggaggttgtagcgtgagccgcagtgacttgtcctctaccccgacctgagttattagaacccgagctacgtcctcctcgaccacgagaacttgatcctcgtccacctccattggttcgctctgtccaccaatcaggaaacccgactatctgccagcaatctttcttctcatgaccacttcgcccacaatgtgagcagagaacagagcggtcacgagacttgataatcgaagaatcagtccttccatcggctgtaacttctgattgacgagtaagaaacccaatcgccgactgttgttgctctctaatctgaactgatgcgagtctttgttcttctctcacaacacgagagtagatttctccaagagatggaaacggatccatcgcgataagtgtagcagagagccctccaaagcgtgaatcatcgagtcctaacacaaactgatgaatcttctcttcttctctttctttggaaggttcaagagtagcaccacaggtacacaagccacacttacaaacagtaattggtttgtaaatttgaaattcttcccaaagcttacacaagcgaccatagtagtcaataacaggctgtccatcttgcctacacgcagcaagctgagccttaatttggtgaacacgaactttgtttcccacagagaaacgttgttttaattcactccatagttgatgagcatcggatatgaaggtgaccgtggatttgacttttggttctatggaggctctaatccaacccacgatcattgagtttaccgcctgccaattctcataatccggattatctaatggtggttttgagattgaaccattgataaaaccagttttacgtttggcttgaagtgcattcaacatttctgttgaccactcgttgtaattgtcaccggttaacataacagaggaaatcatggcccctgggttgtcggagctggccagagtgtacggagacactttggttacatctggttgttgattggtacgtggatgtgttgcagaggagacttcttctgcaatagacatgatttcttgacacgcaagaaccaaggttttaaagagaaaagcggaaacgaattcgaaactatcgaataagaaacgaaaatttttataggtttagatctttagagctctgataccatgtagaattaggtattgcactaacttgagtttattgattcacaaagtgtgatatttatacaagagagtcatcgtataaaataaactcgaatccctaaattataggacataactctgtcacaaaatatatcacaagagattctactctatccccaatagatttagatttgattaagaaagtattaaacaaaccctagttgatgaataaataagtttatgcggtcagtagaaccgaaattttctcgatttgctttggttcgttctgttcaaagttgtgatttgattcaacactatctctataaataaagatccaacgcaatcttaattggatttcattttaattacaatcaaacccttcagtaattgttctttttcccccatgatttcatttccaaaaaaatgttgtcatcaccattcatcatgcatgtatacttaagattctagaatcagtccaaagcttatatcttcttatgaatttgtttattatatacttgatatttttctataataagttgagaagattggatattcccaaagcttcgtccagtttaaaaacaaacttgatagcttcgataagagtatgtagagaagtgagatgatcgggaactaggcccacaactcctccagtacccactttattcacccaaaaatctttatcactatactaatgatcatccagaacaacatctctgccattcctatgaaatgcattattaaactctgtttctctagaaatattatgtcggctctttgcgtataacatcaacagcagcaataagcacattgtttcccagtatgatcattgaacacgtctagaggcacatagacagacattaaatagtgagcaatgacataaatatatattgaatatcaactcaaagggatggaggatatgcttattaatctcacatagactataaagaagataaaatagattttgatgtttcaagatttaaaaagaaaagacagactctagactcaaactcagttccaaactagttgtctatattttgaggtggaatatagacaccggtccccattctagtaagatcaccaacgatggaggatctggctagattgaaatatccgtcttcgtcagcatccatgtattcaacattgttagggaaaaacatgcgtggtaaggagctaagagagacacaaaaaggttcagattttgagaggaaaatgcatagatctccaatgtctttagtgtaaacagcatttccttcgtcgtctagcctaaacaccattaaagcttttgtgctcaatttcgacatacctctccagacggccttcctgtaccacttaaccaagaaagtttcaccggtggttcttgactccaccaagtgttcgcttttgtagcacgaatccataacctctcgtttggtctttgtcagctttggaaggttttggaaccgcaacctctgaaacttgggatttttgtgcttgtctttgtggagatcccatgaagcaatgatatggcctcctgatccgggaatgcgaaacaagtcatgtttctccgaaaacatgacacgagaggagtagaaacaagggtttgcgattctgacattgatccactcagagttacgttgagccggtctgcaaaagctgatttgaggtcccaagaacttgacagccacaacacagttttcatcctcgggagaagatgaggacattgacacattggtgacgatttgagtttggcaatgaggcagagttacaagaggaggcaagggaatgcgtttagggtttgtatccgatgcagccgggtttagatcatcttggagacgaagtattccgtcgtcctgactcaaagtagctacccaaccatgggacgacccgatcgttaccattggattatccaccaactccagaggcaccttcttttccaagtaagtgaagtgaactgcgttagcattgtaaatgacgagttttccgagatcctctccacatggaacagcgtcgatgatggtacaaggcggagtttgccgcaatgaagatgataaaccattagagagaagaggagaggatcttaccagaacagatttcctccggaagcatagtagcttcgagggctggttgagaagcagagacatgtgactaaaatgctttttcagagaaagcgaggctgcaagagagtaagaaagaaaaaaaacctaattggtgagattgatgttcacagtaaatacctaaatacattaatatagaggaaaggatttgctcacaaagatccgatataatcttaattcgatttcgttttaatcacggtcaaaccctccactaataatacatatttaatttttaaaacaacacataaatcttagtatatgaaatttggtttttcaaattggtgattcacatttttttctctcactgtttgataaaatagtatgcgccaatttaaatacgaactattttctatggtgataatgtttgatttgcttaaaaagtattttggttattgagtaaatctcattagatattagattgaaaacaatctcatgaatttgtttgttataactagacgagcctgactatggatttgtgaaattataggtttctttgtattctcaagctgtttgatacatgtgtgtcctttagctgatgtttagcgcaggacaaactctcgactttgttgacttttctgattaattgccaaaaaactgatttgctaaaaaacatattaatctgatatttgaatgattttttgattgcatgtagtcattagctcagaaaagcatattcatggaatcatatatatgaaagttggccaactctttccatatgattcacacatcatcattttagcatttgccatgtgtccactaaataattaatgtaagctcttcaacttctaatttatagattaatgatgtatttattatttaattttacatatttaattgtactaatactaaatttattttgttattatatgtttttcaataaaattattttatcggttttctcatactcgaagatatttttctgtaatcttaactcaaataatgagtgtatagtagtcatgaattatttaatagtttgaatagtttgcagatttttatctatactagattttaacccgcggtataccgcggggacaatttatttttttaaaagttagtatatataaaagtttgcaaattgtatctatctataaaatatttttattttatagtttacaattgttattaagtaacgtcctgccaaacccgtcccgccaatccgtcccgtaaaaaacctatttattttgttaatgttgatcttatttatgatatgtttatgaatcattgtttaaacattttgtaattttgtagtaattaactgttatcaaatatctctacggtttaatgcttataatcgaattattatagtcatgaaaaaagcaatttaaaaataataattttgtagtgtttaaatgatattaaatattttggaagttttatttcagtaactaattgtgtagttaatgtggagagattgtgggaaagtagttaaatgcaaacatttaattctaagatttactttttaattatcaaaaacaattattaaataccaatgacaatcactgtaaataagtctcaacttgaggatttatttaacaaagtgactgcaaaaatgtatatgtagataataaatcaccgagggtaaagagtatgtaagaaatttaatcatcaaatttttaattaggtttcgagaatcccaacattaccctttatttaattggtttaagacaaacattgtttaggaagtgtgtgtatgatgcattgttgaaaatgttgttcggaaaaaatattttaatactaaaaataattatttattacatgaatgaatgattagataattataaattatatttaaattaaacgataaaaaatctaaaaaaatagcgcagcgtagcgggtgattatctagtttatattgaaagacataataatatcgtttacttataaagaaaaagaaagacaattccaaactatgtaacgtgctagttgttcatatttgtaggtggaatatggaaaggggccctgaatgtagaattctcaccaatgatgcgtgaatcatccaaaaagacaaatccggcttggtcgacatcgtagattatgacctggttagagcggagagcgggagggtttccttgttcgtcaagcttgaacaccatttagcttatattttcattttcgcaacaccgttgatgatctgggcggtcttgtaccacttaactaaggaaatttcaccaccagtggatcgtgattccaccaagttgatataaattgttacaactataaatctataatctatggaaactgaatgagttgcacactgtcacactgagtcaagataattatgctctctttcttcccccattctaaagccagtcatagagaaatgacatcaacagcagcaataagcacattgtttcccagtatgatcattgaacacgtctagaggcacatagacagacattaattagtgagcaatgacataaatatatattgaatatcaactcaaagggatggaggatatgcttattaatctcacagagactataaagaagataaaatagattttgatgtttcaagatttaaaaagaaaagacagactctagactcaaactcagttccaaactagttgtctatattttgaggtggaatatagacaccggtccccattctagtaagatcaccaacgatggaggatctggctagattgaaatatccgtcttcgtcagcatccatgtattcaacattgttagggaaaaacatgcgtggtaaggagctaagagagacacaaaaaggttcagattttgagaggaaaatgcatagatctccaatgtctttagtgtaaacagcatttccttcgtcgtctagcctaaacaccattaaagcttttgtgctcaatttcgacatacctctccagacggccttcctgtaccacttaaccaagaaagtttcaccggtggttcttgactccaccaagtgttcgcttttgtagcacgaatccataacctctcgtttggtctttgtcagctttggaaggttttggaaccgcaacctctgaaacttgggatttttgtgcttgtctttgtggagatcccatgaagcaatgatatggcctcctgatccgggaatgcgaaacaagtcatgtttctccgaaaacatgacacgagaggagtagaaacaagggtttgcgattctgacattgatccactcagagttacgttgagccggtctgcaaaagctgatttgaggtcccaagaacttgacagccacaacacagttttcatcctcgggagaagatgaggacattgacacattggtgacgatttgagtttggcaatgaggcagagttacaagaggaggcaagggaatgcgtttagggtttgtatccgatgcagccgggtttagatcatcttggagacgaagtattccgtcgtcctgactcaaagtagctacccaaccatgggacgacccgatcgttaccattggattatccaccaactccagaggcaccttcttttccaagtaagtgaagtgaactgcgttagcattgtaaatgacgagttttccgagatcctctccacatggaacagcgtcgatgatggtacaaggcggagtttgccgcaatgaagatgataaaccattagagagaagaggagaggatcttaccagaacagatttcctccggaagcatagtagcttcgagggctggttgagaagcagagacatgtgactaaaatgctttttcagagaaagcgaggctgcaagagagtaagaaagaaaaaaaacctaattggtgagattgatgttcacagtaaatacctaaatacattaatatagaggaaaggatttgctcacaaagatccgatataatcttaattcgatttcgttttaatcacggtcaaaccctccactaataatacatatttaatttttaaaacaacacataaatcttagtatatgaaatttggtttttcaaattggtgattcacatttttttctctcactgtttgataaaatagtatgcgccaatttaaatacgaactattttctatggtgataatgtttgatttgcttaaaaagtattttggttattgagtaaatctcattagatattagattgaaaacaatctcatgaatttgtttgttataactagacgagcctgactatggatttgtgaaattataggtttctttgtattctcaagctgtttaatacatgtgtgtcctttagctgatgtttagcgcaggacaaactctcgactttgttgacttttctgattaattgccaaaaaactgacttgctaaaaaacatattaatctgatatttgaatgattttttgattgcatgttgctcagaaaagcatattcatggaatttatattgaaagacataataatatcgtttacttataaagaaaaagaaagacaattccaaactatgtaacgtgctagttgttcatatttgtaggtggaatatggaaaggggccctgaatgtagaattctcaccaatgatgcgtgaatcatccaaaaagacaaatccggcttggtcgacatcgtagattatgacctggttagagcggagagcgggagggtttccttgttcgtcaagcttgaacaccatttagcttatattttcattttcgcaacaccgttgatgatctgggcggtcttgtacaacgagaccaaatccgcctcgaagagtacatcatctgttattcttttattttccatgtaattcgacttcgtttctaaaagaaaaatcttctcacttttttgagaatttctttctcatactagttgaagttcgccctcaacagttggcgtgccaggtagagagatagcttgaggatttcttccaactagccagacgagcccgcttacagatcaaaataactacgaagggaaccagtgcttgaggagacaatgactctagctcaagagaaggaaccgatacgccacagaccgacataatcctcctcacaagaaggatacactaattagtatcgtagttgcgccgcctttgctacctccaactcccaaaggtaccgcgtttgggataatcatcaagacttccccgccaatgcaggagaacaacgaacaaacatcgccgagcagacgtcgtccgaccaaccttgaaccacacagcagcgtgcaaggtaacccggccgtgtaccgttcgccaacgcattttagagcatccacgaccattttaagcaggcaagatgcaatgagcgacgataagttcgcatccctgacagtcgcgcacgctttttctccagaccaaccgcacaacgaacattcaacaaaccaacctcgctaacgtcttaggcgatacaagggacgcagagatagccgagttgaggtgtgcagtcttggagatgtgctcgaagatccaccgtgctacaagcacggttcccaaactcgaccacgtcctcaaagagacgctacaaactcctttacccgaaggataacatacgtatcggttcgagggtatcaaaagatcaaattggaaagctacaacgataaaggagacccgaaagaatttctgacgtcgttcaatgtcgacataaatcgagtcgaacttaacatcgaaaacttcaaagcagggcaatgccaaatattcatcgaacatctctccggagcggcctcagctaattgaaccgcggtcggctgcctcttcttctccttctgagaagttggactcagaggcctcgaactcccacccatatgaaaatgccgacctcccttgtccagaagactattcctcagcacctccttcatcatccactcctcagatcatgtcggcttcgggccagagtctcagattggaataatccggatcgaactccaattgtattttcccatcactgtgcgatctggtacaaggacgcatattatgacgctacaccataaaaagggagatatgaaagaaacattaacctaatcgacaacgtacctttctttgggagattttgcgtaaattttctaaagaaacgtctaatagctttcacgaatctctaccaaatatatgtgctttgatcacgaatcttctcgagatcatccttgagctggtcgggaaatggtaccagaaactttggatagcaattttaaacaaaaaaacacactagttaaaacaaaaaaaaaaacagaagcatctcaacaataaggcaaaagtaacgagctcaagctaacgggtgaaagtgtcaactctgaacagattgggatctagggattctcaacactcctctgaaaccctaacaaagaaataaccgccaaatcaatcgtaggttttgctcttaccctcatccacttgtctcggggtcgtacctttagagaaacgcatgacaaatctgttgtcgcgtcttccacacgcgtggactccagacgcgcacgcctaagaggtttggtccttgtcagtctccacgcaccacgtaaccgtcgaacttcaagcaaaatcctaattcacgcgagcgggaaactgttaggggaagaattgggtgttaaagttcgctcttaacaaaaattacttataaaaaacgatagataaatatttattttatttattctataactaatagtctaaactataaacacagtttcttctttgttaaacttttaaaacacactttttattaatcaatccaaatatttaatttcttatcaaatgaatttggcgatgtttcgatgaaataatcaatatcaagatgtaattatctggttatatttgtatgatctctcattttgtagtgaatcaattatgtgactatgtgacaggatattatggtctgatgatatgtttacctttaaaattttctttgggattcatttagaccggtaagtaaatttttctcttcgtttatcaaaaggaaaaatgattatctatattttgtctctctccctttaatttgttttagcaacgtattcaattattttctgagctctctagcttttaaataaataaataaaaccgataaatgataaaactgctaaaagtaaatataggagaggaatctatagtcactcgactttgccagctctgcaaaaccgtcaacaatcacaatgaaaccattcaaatattttccccttttaaattccgtacactttagggtttctttttgggctttgtattatgtttacagccaaaaattgaaaactaaaatacacgtggatatttcctatattagaaaacacctgtaaataagtggtcacgactcgacgactgtgtacgttttgataattgattaacgcctgattttcgtgctatttccaaatacgcacttttgctgataatttacacttacatttatgacctcactcttgaaagtagtattattctttaactttcaaacattaagctaacattttcctttgtaaaccaaaatcatttgtcaaacatacacatatcttaatgttgttttaatggattgatttttaaaaaaaatctaagaaactgaacactaatttgtatatcgttataaagatatatttaactaaatcctaatctatagtttatcaaaaaaaaaaaaaatcctaatctatactattaattgggaatcactctaacataaataaccctataaagggtaaagaattacatagaatgtcataaaaaatttttccaaaataagagtaaatagaggatttagttaaagggtaattcggacaatatgctgcaaacatacagtggatcctggatctttgatcggatctatattcaggcatagatggataccacgcggatcctgcgataattgaatttggaattagtagtatagatattgggctttttaagcctacgacattaagcccaattctcttaaaagatcttatagccttcaccgacaattttttgttaccctagctgcagtaaattttttttttttttttttttttttttttttttttgctaaacttgtaaatatcatataaaatgagttaaggtaatacaaaaagtttaccaaagtagagcaaccaaggcaaaaagaaataaaaacaaggttacaataagcttgagaagatttggggaaagctaacggatccaaagcaacaaaagctcccgccaacgcctcttatgcctcctagacaaaatgacattgcggagctcgcgatcaactaaacgaaagaccaccgagcaagagacccgaagagagctgtgaagaacaagattcctctgcctccacaggttgtacaccacgagctgcgcgaccactttcctaaggagcgaaggagccgctgcagtagattgccgagtccacgagagaagctcggcccaagtgcagagaagccgttgacgagggcacaaccggagaaacaccatccgccagacctgagaagaaaagtcacaaagaagcagaagatggtcccttgtttcggtgtcaaaggagcaaagacagcactccgcagaactgactaggccccaagaaaccagcctttgcctggtagggagacgattcagctgggcagtccaaaagttaaaagcatgcttggggacagctcctttgaaccaaacggacttggcccaacgcttgacaggacgcctaggccttagaacctcccaagttttggccgcagagaaaccttgacaatcaacatcatcaacacaccaagagtaggagtcactaaccatgagaggcgatggaggagggagagaagctaagtgagataagatggaatcagcagtgagcgatctcgagagaggcagcctccaccccgaaccatcaatagcatccgccacctttgcagaaaatgggattcttagaggtcttgaccccacgtcacccaaatactttattagcgggcctagggaagtccagcaatcaaaccagaaagaaactgtgcctccattcccaactttagctttgataaacttctcagcaagaggcctcagattcaagagcatcttccaagtccaagggtcagtttgcaaagcattcacctgccagaaggaagcatgaccaagcctgtgatggcgctgccactgagcccacaaggaggtatcacgatcaaagagaacccaaattaacctcagcaagagagttttgttccattccccaaaactcctaaaaccaagaccaccttcactcttagggagacaacaatcaacccaagagactttagaacttttcctcccatcgatactgccagcccacaggaacttagagcataaactctcaatcttctttatgcaacctttagggagaaggaaggtggacatccagaagttgattaaaccaaaaataaccgaggagataagctgagtacgccctgcgaaagacaaagccttggagacccatgatctaagtctagccgaaagcttctcaagcagaggcccataatctgcaatacgcagcttgcgacacattaggggtaagcccaggtacctgattggaaaagttcctgcggggaaaccgtaagcagcagaagtgattcgctcagataaatcaagacccgcctgaaaaagctgactcttgtctttgtttacttttaagccagaccaatcagcgaagtcatccaaagtctcacaaataccatgcatagaagagctgcccccgtcaaagaagatcataacatcatctgcaaacattaggtgagaaatagagaggtctccagcctttgggtgataatggatgtagccagaatcgtagcgagaatacagaagcttagaaaagacttccatggccaacacaaagagatagggcgacagtgggtcaccttgtctcaaccccttggtgcttctaaaaaagccaccagtggcgccattaaccgagattgtgaaggagggcgtagtaatacattgatgaatccaattgatataccgctctgggattgcaagcgccctcaaggctgcagtgacaaactcccatttgacagaatcaaaagccttcttcaaatccactttaagcattcctctaggcgaaatattcaacctgttataaccatggaccatttcagtggccagaagcacattttcagctagggacctaccaggaaggaaagccgattgagagtggccaatgacagctgaaagtaacccctggagcctgctagtcaaaagcttggatataaccttatacaacgtgttgagacaggaaatgggacgaaattcagagatagtacaggcgttggaagttttaggtatcaaaaccagagtggtggcattccactgcttaaggagctgcccagaatcaaagaactcatggatggcagcaagcacttccggaccaataatgctccaagtatctctaaaaaactcaactgagtagccatccggcccactagtcttattcctcggaagagacttgaacgcagctttaatctcatcatcagtaaatgacttttcaagctcgctacattggtcttgagagcatctgtaagtgaggagcaaattcatgtcctcttgctccattgaaaagggactttcaatcgatcccaacaacctctcataataggttacacagtgatccaggatgccctgctgagaatcaatgagcagcccgttgctatccacaagggaatttatggtgttgaaagactttctcgagtccaccattctgtgaaaatagtgagtattactatcaccttcggcaaaccaagagactctagatctctgatggaagaagctctcttcagcacaggacagcagaacccacttccgttgagcctcgagctccaaagcagcattagaaacagaaggattagcaagagtaagattctgacaagtgatcagcagctcatgggcctccttggttcgaagctcaatacccgaataattaagtctactgaaatctttaattggcttcttcatcgctttaagcttcttggagacccgatacattgaagaccccaccacattagtagagaaccagttatccatgacaacgttcaagaaatcctcattcttaagcagaaagttaaagaacttgaagggacgcttagcactgatgccatttgcctccaacacaacaccacaagaaacatggtctgagaagtcaaggttaccaaatagtccatgcgaggaaggatagaggttacaccaggaatcattagccaaaatgcgatccagctttttagctattggcctaatcgaactcttgttccaccaagtgaaagaattacccttgaagaccaggtctgacagctccatttcgctcaaacaactaccaaagtctctcattctcctgtcaatattcagcgagggagggttggagtgctcttgaggtaacaacacttggttgaagtccccaagcataagccaaggcttattaacaatacccagatttctgcccaaatccacaatctctttccacagctccttcctagtgaccttcctattaaattaatgctgattagttttgaagtccaagatttctataacaagcaaatctttgaatatcatatattccgttgcattaactgattttagtaaatgaatcaccataacaagcaaagttttcaattgaaattcggtataacaaaaatcacagatattaccttaccaaactaagcccaaatattctaatgattgtgcataatttatcataatagattcgcaaacagttattactttcaacgaaaattttcaaaatcactaaaagtatccgcaataaataattatttgacccaagaataacaaactaaatcttaatagtatcggactaaatcaagaatataccttatcaattctaattcgtaaatactaatcttggcgataacctttttagaaaatagtcagtttattctgagacgatggcggcacgaatatcattcaccgatcttgctgacgtgaagcctttcaagacagaatgaaagatccaagtcaaaattgagcattcctggactcaatacacccaatacacaggttgtttcagggcataacaacgttcctaataatgttggcatatcttttctcaggccatgtttttcacacggacaactctatgttgttatctcaagggtaacttaaaaaaaaagactgaagatcctcatagtggacaaagaaggaataccgcaaaaggaaacaattaatgtagtgttcaagaaagtttttcagaacctataagactaagcgttgcaacagatatttcttcgaagaggtaaaaaccattaataaatattacgtttatatgttttcattttcttaaccagtaaccaagttcaagtataatcaaacaacaacagaagttaaatgatgcctattctctaattgagttaagttatataaacagacaatggcaaaaacttgtagtagtttatatcatcaactattctaactgacaataatgttttcaaaaagattttattatcaaaacactaaccttttatatggtttgggacttctccacagtgtctgcttcaatagaagtctcctccatgataatgttagtacgaaataatacttggcctgtacacattatacattaacatactcaaatttagtaaaatcattttccgtattcacactcaagaatagtatattgccaaagttggtacaaagttaaaatactattacaggatataagcggttcttatcaacaaatcaaaaaatttaagagtataatttcaaaaaccttgaactttgcttcatggttttgaatagctcaatagatgacattgaaactatatgtttcagctcgaaaagaattaaactttgacactttagctgcaacattaaaaacacttggaatggtcaagaccatcaaacttgcactgatcaagatcacatatttaaattgacttaatacactttatcttatacggaatcatcttttgttggcaacatcagcgatcaatactttagatcattctcgaaaaaactataattaaacacacataaaatctacttcttatatctattgacaatcaattttttaaaaaaaaaaatcactatagattccaatttgatcagatttagtcaatattcactataactttgatgaaacatattgattcactagctaacaaggtcaataattaccaatatatcgctgggtacttcacaatcgtagaataaaatcaataatgaatcaataaaattccagatttacaaatgataatcgacagcgagataaacagtacaaatcattagcttacctcttcttagatctaacaagtagccaatcagagtgtacaatcgaagaattatgttgattctagacgattaagcttctgaatcgtcgattgacaatgatttattttgtctgatctttttttttttttgtttcagacaccgacttacgtaattcggtgtgaatatccagatattagaaacataaaacattaaattacaatgtctttaggcccatttatatcacgtgttgtggcccatttcaattatctacgttttaaattatggtccatgaactggtgggctgtcctttttcggttcataatattatttttctttattatgctactattacggcatatatatgtttattatatattacaagacaattatatgcaaatcatctgttttgaatttctatactattctctaattcactacatgtaatgtttaataaaatatatacaaactaaacaatcacatttaaagagaaaaaaatatacaatattactttaaaaatatgaaacccggacgtatcatgatctagttagaattaaaactgtaaccatatcaaattacatccaatgttttagtttagataccaatattcataattataagatccaacattcacaaattaattcacaaatgcagaaaacggatcaaagctatttatgaaaaaccacaaataaataatcattttatttcttctataactaatagtctagactctacacatagcttcttcttaatttattaaacttttaaaacacacttgggcgatggttttgacgaaattatcaatgtcaagaagaatgcaaacatcgtcggaccaaaaacactccatttttccgctgactctaatcatcaaaaaatttttatacataacgaaataaatacatacgcaaacctgttgtatgtgaaaatggtagagagcttgtggacctgccttggtgtttccaggagaaaacaaatattaaatttgccacttgtgaacattaaatcagttgtcacgtcttattctttacacaatagaataagtagatccacacatgcgcatgcatacgaattaacgtagggatttaagcctagattagaattatttttagaatttagggttgtcgctaagaatatgcactaattaagtagaaagcgtgtatctagctagtagggttcaatctacatgactttctgatcaataaccacaaaatttagtaatggaagaatttttacgttttgatctgaatccaaattcggttttcaagtttgttagaatcgtcacagtacaatgtgaattagtgaataaaaaaaactagaacaacaagttctttgatagttgggactggttaccataacaataaccaaaagtatattaacagaagaaaaaaataagaatgatgtaattctaattggtgtaagaaaatacgaatttttaatgttactgaaattatacatattatacagctagcactaactaacaaaccaaggaaaatacttctttattaaaaaaatactgaaaacacgataaaaccagagcaaacctatctataaaaaccaaaaaatttcctcacatttacatatttcctcaataaagctctaacctttctgatcaaaaaccctttttatcagcttcttcctcttttgcgatcatgaaaacctccaactttctctctattccgcatctctcttctccttctttattgaaggtaaacgcttcaaagtttgctaaacctagtctgtcttcttcctcgtctaccaaaatccaagctttaccatttctctcttcttcctctcttcctccgatccgatctgtctcttcatctttactactcccaatcaaatgtagcaaaaacgacgatatagagaccagagaaaaggcagagattggaaagctaagaaaaaaaatacacaatttgatcttggaaggcaacatggtgaaagcaacatcaacctttgacgactggaaatcaaaaagagatccactttttgaagatggtaagacatcaagacaaatcgttcggatgagtcgtggcgagtttgtgatttatgtatgggaaaagttctttggccccccatcggagcgtaagaagaaagattaattgaagatcttgctgtgttcatgtgaagaaagagagtcttgagattttagtgtgtcgttttagtttaattgaagatcttgctgtgttcatgtgaagaaagagagtcttgagattttagtgtgtcgttttagtttaatcgaagatcttgctgtgttcatgtgaagaaagagagtcttgagctttagggttttattttggcctttgttgttgtgattatcatttgaatgcgttaacacgttaacgattctgttaacaatttaacacgttaacaattctgttacacaaagaggagctatgggcttttagtcggccttcgtttcttctgtaaagtaggtgttattagtattattactatgcaattgaacaaaaaattaaaatcctactcagatatatagtcagattagctctctttgtaattagttttgtataccaataataagcaagcaattgttaaccaacaaaatagatccaagataagcatttatacattacattacaaatggaagttccttttaattattctatttattaaaaaaatcacgttatacaacaactccataggcaccttcttatccaaagaagtacatgtacagtcacgttcatcaggattcataatcactagttttccttctttcgcaagtcttccacagcgatcagcgctagctgacgatgtaacaaggaggagtttgcatgcagcaaggaacttgagacgccattgttagacagaagaggagaggatcttaccaacacaggtaaaagtatcttcgtaagctattcaaatctttgctcttgttaccttttcactttgcttattcacagtcgatcctaatttcaaagaatcgtaagaaatgttagaagtcaaaccctaagagatacaataaaattgctactttttcgaataattggacaaaaagtaatgtaaacttgaacaaatgaaggaaaccctatcaagaatgcaagcaatacctgagttttgatcttccatggctccttggtctttggtttagttttgattgtaagaaaatgtacgtatatgaccaaaccataaacatatatagagaagtctggttaatacttcaaacctcctgttatctgagttataccactaatgtaccactcataaattgcattttgtttttgtaaatagttgttttcctgtctctatcacttatttcaatttaattaaggctgttaatttcgtaaatagggaacaagaaataatgagtaagagccagaaacatgtaattcatatattgaaatatataatttaatgtatagccaataatatataggatgagaaatagcgcgcgggaaaagtatcaagaccgggtaattcatgtatccaaagttctatatcaaaagtgtacactaatgaaatgcagtatgagacagaaatccgggtaatgagaagagttttaaaattttataaagctaaagctaaaccacaacctaaactctcactatttggtaagaatcactttttaaagtccggtccaaaccgattactcacgatttttggagaaatgaacacactctaatttcataaaaaacaagtaaacaactttaaaaatggcctcattaattcttaatcccatcaactaacttagatagaaattgctaaaaccaactcgaagctgaaagccttggacaatatagtcaatacactttgttttaacattaaaggaaacgttttgttgataatcacaaccagtaatcgagcttacctgatatcgaatctcttgacatttcttccttttaattttacataaattttggtctttttcattttgtatataaattcagtttttccaaacttatgtttctattatgttcattaaaactactaaacattttaccaagtttttttttttttttttgttaacgtgttgtcttacataaaaatttcttaaaaaattgtttacatatgagccttataaaatgatatcaatcatatgtagattgatattctgtcaccaagttgatgaatgatagtaatgatattaaatacacgattatgtgtgttgacatgagataaaaagtgtatagaaaaatgtagaaatgagaaaaaatcaaaaggttagcatttatttatggaagtcgatttcacctttgattttgttttccaaattgttaattgttggaataccaaacgtgtcgaaactgtggtacaaaagatcatcattagtcccataacacacac

SEQ ID NO: 908 - DNA, 28207 bp, Arabidopsis thaliana
tttttatttattactgtacttaattaataaacagcagaatatagtataattttattactctctcttcttcttcttcctcttctcaaaaactttcagtttcgatctctcctaaaaagtttgaactttccgtcgaatcaaatgggaagcggaagatatctagacgaccctttaacatttactagaaacccaccttcctcgtcgtctccaatcaccgaatctagctttctcgcagaatcgatctctcgctctggtagcttcgagagtgggagcttacgaggaggcgatggtgattgctttagcgacgtcgatttcgcacttgataaactcgctgggactgtacagttctacgagaggcatgtcttcttgtgctacaaaaaaccatccgtttggcctgcgaggatcgaagcttctgagtttgatcggttaccgaggcttctctcctccgttatatcggcgaggaagagtagtatgaagaaagaggtgattttgttttgagggacaaaatttaaagttccagaatttactgtggtattaagtagccttaggtctgagaatctctgtagttttggtctccatgggtttgtgattctaacttaggggagacttagagtaaatccctaagaaaggtttcgccagtgaacattcctaatctgcaatatgagtttaaaaggcacttctttgtttttgtcttgtgaagagcttcttagatctcagtgagtcgtttctcctgaggatatttgggatttttcttgaggcatttttttattggcaagattcaatgctttacaacttaggaactgttagtttgtttgtaaaaggtttcagaatacacaattctagtgtactgactttgaaggaacccttacttacaatgtagcttcttattatcttgcacatcagttataaactatcttttgggtcttttagatgtctttctgatgtttttttatctatgcgttgaattgcagactttactcacaatatgtgagggacatgatggttcagagacatcaaatggggatgttctgatatttccagatatgatcagatacaggtactactcagttaatattgtggttgatgattcttaataaacggtaactcattttggcaatttcaaaaaaatgcagaaggttgactcattttgatgtggacacatttgttgaggaggtgcttgtgaagggtgttgagtggttgcctggaaatcctgaatctcttagtagttcatatgtctttgtatgttgtcatggatctcgagaccggcgatgtggggtttgtggaccttctctagttagtcgattcagagaagaaattgactcgtgtggtcttcgaggtgaagtttcagtcagcccttgttctcacattggtggtcacaaatacactggagatgttatcatctatggattaaatatcaaccagagagtcacaggacactggtaagtaaactaaggctagctttggagtaaaaagatttgagtgtgcaaccataaagagttctatgcgagttttaacttattaagtaattcttgtctcttaggtatggatgtgtgactctagaggatgttcctcttttgttggagcaacacattaacaaaggcgaaattgtagaccggctttggaggtatagaagatcaaagcttcttgatttagacagtctctaaaaagaatttcggcctttaaacaacacttattgattgttttccaggggtgaaatgggtctgccagaagaagatcagaagaaaactcaagaacaaaggttacaattaaacagcgaaaagatcagcaacagagaggtgactcaagaatcagttaataatagtatctgttgccagtctcgagctgtcccagagctgaacggtagtggttgccaacaaaatgggaactcctcttactgtctggaggagattcacacagagaaaaatacctcggagagagtaacctctgtaaaaaatgcatctcttcggataggaagcagcgagaatggatcttctggtggattcaaggtttgtgcggtgatgtcaatgtggttggagacttgggagagagaagatacatatgctgctttagctgttgcttgtgctgctgcatctgtggctattgcttataactgctataaacaattgaaatgaagctatgtgttttatatttagcttctatgcaatggtaattatctcagtctttagattagttgtttcctcttcgtctgtacagagttagaagagggttttaactcttaagtaagaactgcttgttgataacatatgattattatatatccatttgtaagtaattacgggtttagtcaatttggtttagagttcagatcaatgaaaagcaaggaacttttgaggttttgatatggtggattaatggattctcaatggttcgtgtctaacattaaactcaagaagatggtacagagactgtctcacaactttgaagaatgattacaaatctcataactttttccaagacgtgaaaattaaaaagaagaaaaaaaaagaaacacatttgtagaaaacactaaacagaatttgcaaagaaacaataatgagaatcatcaactgtggaaacagtttcttcagaagaaatcaaactcaagataattactctgatcagatcttacactcgaagatgcggctgctggcacagtaggagtaggattcaaagcttcaagatcaaccggtttaggaatctccggtggactggcacatcgaaccagagcccaattcactccttcaaagaaaggatgttgctttatctctgttgctccacgcttataagctaatctatgttgtggctccttcacaagcaaactccttatcaaatccctagctgcgaagctaacaaccggagattcagggaatctaagaggctgaccaaccacgttgaagagcgttgctcgatttcctgaccctttaaacggtgttttaccaaacaatagttcataaagaaagatcccaaaggtccaccaatcaactgcacttccatgtccttcacctttgatgatctctggagctaagtactcgtgtgtgccaacaaaagacatagaacgggcgcctgtgggctctgcaacgagttctggtaacggagttacttggtggttcccgttttcggttttcggtttcttgtctttcttggatttcgatgagaagaaccgaggaccgaagcaagatgttggagccattgagatgcaagatggttgctggatgcatgcaggttgttgcgagcaagaaaccgaattcttcgacaagccttcggatccaacattagctgatctgactatagagaggctcacagtacatctcagggagagatcaaaatccgaaagcatcacgtgcccatcatctctcacaagaacgttctcgggtttcagatcacggtaaatgatcccaagcatgtgtaaatattccattgcaagaagcacttccgcgacataaaacctgcaaaacagcaagtcactaaggttatataaacgcacaaaactagattcttagataaagaaagtttagaaaaagtttcttacttagctgcttgctcggtgaagcgtttcccgggttgtctctgccttagtgtatgcaaatcaccaccaggacaaaactccatcaccaaacaagagaacttctctgtctcaaaatgactatacaaagtcggaagaaacgggtgatcaagacactgcaatatctctctttcagtttgagccctaagaagctttttccggctagccaaagcagttttatccataaccttcatcgcaaaataacacctagttccattcaactcagcaagatgaacagttccaatatctccacatcctaacctcttcaagagcctaaaatgattcaaacccaaaccaccatgtttagttctaacagcttgaatagcttcccatctcacatcattagccttgtgaggtttgttgatactgctactaaagctgctacaagtgctctcatcgcttatatcactgcttgtacttggtctacaagtgctactctttccactctcaccttgctcgttgatcttactattaccggttttgccatcactacttggatcagcgaaagacaaactcgaagatacttgatctgctaaagtgttgattgacatactttgactggaattggtaagtgatccttctggagtttttgaagccatcattaacacagagcaatcttaaacaccaattccttcttccctgagatttaaagaacttgtctttactctctagtaatcaatactgtcacagattccatcaacgagtggcctgatctatagtcatcaaaacaaaacaatagcatcagtttaaagctggattgagaagactcagaaacaacaatcacggatcttactacagatgaaagtttaagtagatgcacaaaattttacccaaattgaaatatcaaatctaagtgacaaatcaattaaagctcttcatgcaaaaagtttggatttttattttgagtctttaagggtaaaaacagatctcgttaaagtaaagaagaagaagaggcaaaataaagaacttttggatctagcaagaatcagagaataaaacccagaaaaagaagaaataaaaagaacagagctttagagagagagagagagagagagagagacccaataaatcgttacctgaaagtgaagatttttgagcgataaagatcacgagatacccttttcgaagcaaagggaaggagaagtagaagaaaaaaggaaggagagggaaagagagagaacagtcactgttcatgtaaggctgtagagagagaaagagatgtaagaacacatctgcttgcttccatggaaatggggatagatagagagagggagagagaggagagagtgttgttaagagagagagagaattgggtctaccatgaaaagagggaagaggagagagagggtcaaataaaaagttgaatacttttttttattttttttattttgagggaatttcaattatttcaatgtatttttttttgttttctccaaaatggaagacatatgtttacatcaagaatgctctcgcgagctgttaataattttaggctttttagggcaaccaaatttttattgatacatgttattgtatatttcctacatgtttactttatattttgattttctaaataattgtctatagaaatttttatatatatttaccaaaaaaattcctttttgattctttaaattattaaacacatcaatttaaattattaaaattcaacattcttatctttcatctattctcatgaatctgtcatgtgccttttacttgatgataaaaaaaattgatgtttacctctatgcataaatttatggattttacatatttagcttaagttttcacacgagtttttcagtttagcaattctaagtaagaactattgtgaatgcacatttttgttagaaggacaatcccatatgcgtgccaccaaactataattttctgttttatttatgcggtttggaaaacatcgtcctaagcgtatgttttcgtcatcatgcagcatcttcggaagtttcttcttgtgttctaatgggtgaaacttgaggcattaaatgaacattagcgcataccatatcacaaagagttttgcatcttttcggattgccaatagatgataaatcttataagctgaatgaagacataacaatagatattttatatctcgatttcttttgttatcaattccatttacatccagtgttcatccaattttatggtcgaaataatactttctaaaagcttgttagcatccgtcaaacattctgttttcaaatttttagtgaaagtttttgtcatttaccaaaatcaataaaaaaaaatcttttaagtttttaaaaataactaaacattccaaaattgtataaacctttaaaaaatttccctaataacaaatacgtaaattggtcatgtgtattaattttattttatttttttactaaacacaccaaacaattatttaaaattagactcaccattgtttgaaacttgagagttccaaaagatgcccctaaaacttttcagcaaattcttatttattgcccaataataagtttccttagattctaagattatatttcatgtattttattttttttcccccacatttaaatcgaacagaaacaatgtttttttagaaatggttcaacaggtagttgacaaaccagaagattgttcaacataaaagaacacaagtgggtataatttgttcatttcctcatatctcaaataattcatattttaacctcatgctcttattagatccaattactgcgtcaatttttaatcgagaagctcagatccaataacgacaattgctacacgatcggcttgtgacgtgaaacgcgagtggggaatctttcttcattataatcccatttctttaggttaaaaatactgcaataataacaaaataaaaggtttagtttattaaaatgttttgtttaccatgatacttgagggattaaggtttctaagtttcttcattacaatttaaatcatagctggacactgtcactaaggatgctttaacatttaaatggtaagaatatccatttttatacaagtttctaggtttactcttagatttagatcgagtcctctcaaagtcttaattatattattttcttaacaaattcatagagattcaatggttaaaagatttatcgtgaaaattaaagattcgagtgttcctacaatgagattaatcattattggtggtagttgtgaatgctttaaatagcaaaaatacctagttcttttatgtccaaaaaaactagttttttttttttggtaagctccaaaaaaactagtttagagtttggtttagatctctttgttgtaacttataaatataatgatagagatttctatttattatcaatcaaaacaacttctacacgcaaattcgtttacctaatattttttaatattttaatgttctttccagttttgtttttgtttcactaaagtcagccaaaataattcaattatgatgggcatattataaaaaaaattacagtaattttgttctttatttccaataatatgtcatatactgtacacttgttttcagttaatttctgtttgattagtttattatccactctactttagtacaacccaaatgtcagaacatagtccacatgattttgtttgacgtaaagttataaataatagtccacctgatttattttattatcttctttttgtttataaaataaccatctttttcccttacaaaaatgttctttataacagcagacaaaaaaaatgttctttcgaatataataaaatcaggaagaaagtaaacaagaaaaatatatgaaattattcataccataataatacaaaaattgattgattggaacatataatcgaccagttagatatctttaatgattttcgattatttgaaatacatatttataaaaagaatgaataatgcaaataaaaaaagaaaaaggaagagttaaggataaataatcaaattaaaattgagaggtccccaaacaagatctgacaaagatagatgaagaatgggttgtcatgttctccaacacaagtcccactttggtgtgagagtttctcaatctctctctctaacttcttacaaccaatcaacagctcactgccaaatccctaattttttttaaaaaacagttctctgaaaaataagaaaaactaaactgaaacaattctgagcctttcaatttcatatattttgtttggtttcatacaattatggtttgatatagtttggtttgagtcaattccaacatatgaagtgatgaattaacaaattaattaaaaagttgataattaatcatttgaacttaaaattaacaaaatttagtatattcatttcggtttgttccaactacatttaggttaaaaaatgttgggtttttcgaaataaaaaatatttaggttagtagttatagttttttttttggccacccctagtttggttcttgagtaaaaataacagcaatttagtgatcggctcaagaacacaacttaactttgattctcttaaaagatttttttctgaaacaaaacttttggacatttaaggtggtctgcccacggagtccaacagagtgctcactctgggtgcttttaacgttgcacaaatctcgtcgtgaataaacaaaaacaagaaagccaatatatggcacaagcctactataaccatagatgataacgttttcgcaaatgttttttcttctctttgatgaaaaaacactgaatcatcattacttctcctccttcgccttctcccgcatggctattcttttctcttccctgcaaacgtgattatacaaatcattgtcaagcaactatatataaaagacaagtctaaagcattttgttctctcagttcatggatggggatagatatttatatacctagcttgagctatttcgttcttccattcccgtctcttcttcttttgcttccttggtttagatggctcttccacattttcagattttgatttcttatcctttttacctctcttgtcctcctttgattttgcaagtttttccttgttctttttttcttttctttccttaggttgcctaacgggaacagaaggcttctccgtctcttcaatggcctcagcttcatcatcatcatcactagacacttcagcttgctctacagtttctaccgcatcatcatcaccttcttctgaagattgcttcacgttgctcattttcttcagctgtataaagaaaaagaacacaagagcattacatcaaattgtgtggattatatcaactattagagtattgacaagtgcatggttgatcgattacaatggccaaaagtgagtacctttgccacaaaaaatccgtccatgttgtgtacatgaggatagaaacgtctagtcttgtccaaagatggctgaaaccggtgttctctaaatctggtaaatctgatgaagagaagaaggacaaagagttagagacattatttaatgttcctttaaatatccctcagatgaaaaacttgtgcattacccttttctgccaaaatcgagaccacacgtaacgagtttaacatccctctttttgagggcatagtcaatgacggcttcattctgcacaattttttcatacataaagaaaaattaggatgaatcaaatacaaagaagaaaattatgggggaaattatcagttaactaacctcagtaaccataattgaacatgttgaataaactatatatccaccggttttggaattggcatccaccatatcaatagcagcgagtagaagttgcttcatgaacaaaaaagggttaacttagcatgtgtttaagaatgaaaattggtctgttcagatataatagaagttatttaagaaggtactgccataccttttgcaagtgagcaaatttctttatctcatccatggttttcgttattttaactgattcatcttttgatataatctgtattgggtagcagaggagatttagtaacaaggatctaaaacttaactacagtttaacagagagtaagttcgaagttccttactccagtcccactgcaaggcgcatccaacaatactctatcaaccgtgttctgacctaaaaccttgggtagctgacagcagcaaagataacgaaataaagaataagtgcaagaaaataaaactgggcagcatgttgagcaaaattaaccagatcaaattttataattccagtcatttcagtagtgtgaattcaagtagatgttacggggtttttaacattttgtgaacaggtagcagaaattcaacagaaaaatcaatgttcaagaagctaacctctcttccatcatagttacaaactatggtatttgtgacccccatacgatgcagattggcagttagcgacttaagcctaggtactttcatctcattcgcatatattaagcctggtaatagcatcattataaacattacttaaaccaaaaaaaaaaaacatacgacagccaaatagaatatggggataagaagcaagagaaaccaatgaagacatacccgtatttttcattagagcggcgatataagttgttttaccaccaggagcagcactgcatcgatataaaatcttgttataaactcacacaacaaaacagtcaaacactagaattggaatcatcacacgccaacaaggtcaaacgctttttagctgcagcgattgtttagtagatgagtagatgatgataacttacgctacatccacaatccgctcattctctcgaggggcaagggccatcactggcaaaaacgaactagcaccttgaagctgcaaatacaccaagtagagagacttaagcaaacaattgcattccataaaggtgaagaaaagggaaagacatcagaagatcacttaccatgtagtacccagccagatattcaggagttgcaccaattgggacttgtgaatcataaataacaagtccaacctgcagtaggacatcagtaaataagacttaggacagatcaacaatagaagattcataaaaataggactgacagaatagaaaatagtaagaacaaactacttactttagaccacttgcttaatgggtctagattgactcctctgttcaaaagtacatcagcaagatcccgtcttcgagtctaaagcaaaacatacatcaccatgaaattgcagaacttgaaagtcataagctacaacccagtaagtcacaaccaagttcaccttaagtgtgttagttcggatggacgtaggcctttgcttttcaaaagcttcaataagttccataagttcaccaggaggaaacatctgcaagagaaatcccaattcaacatccataagtaaagaatatcagcaacatcctatccatactatatcaaaggaaagaaactagagagtctcacctcaaccaaagttccaataagaaaactgttataaccataataagaaccgagatcagctttgagctgttcaacacaagctttcctcgtggtgtcttttggcctgaaagccttaaaatttttaagagctctaacaactgaaatgttaaatgaatcaacaattagaacaccaatccaaaccaacctagataaataccatcacaccaacatttcaacagtaataaagcaacaaaatttggaaatgttactaactctcttcaattctagtcttaagtagaggaagatctggtggaccacgagcttcttcttcaagctcctggacaaatgaaagataacaacaacagttagatatatgctaaaaccaaaatcaaacagagtaagtattacacatgaaaaaaatgttacctcttcagttggtagcctaaacgcatcatgttcaggttcttcatcatgtacatcatcttgcttgataaaatcctccagttcagcagcagcatctttcttctgcattgctaagtctctatcaatagcatcagatttcgccacaatatcgtcgtcgtcagagtcagcatccgaatccgcatctaaagatccttcctcatcttcatcgccgctaccttctagaaaatcgtcacccaaagtctcttcatcgttctcttcctcatcatcagagaataactgattagacccgttctctccatcatcagattcatcaatctcttctgattccacagctggagaaatatcatcttcatcagaaccatcggaaacttcgtcatcttcatcagaatcatcggtaacttcgtaatcttctagaggctcttcctccacaacttccttcttctgcttcttcaatggaggtttgttctgagatttcgctcctttcttcaacattgaagtttggggtttcattggaggggttttggatttggtaagctgcttcgttggaggggttatcgatttcgtcgcagccttcttcttgttacgagtgagggcaggcatggctacaggtttgaattagggttttctcgcgcggccagggtttaagagaagaagtagaagatgatgattgttggagtacacaaaggtatatttgactggtgtctattattgggcttttgcctaaataattatcggcccaatttaaaacaaattgagcccaataactatatggtgccttgttattgattattcgatatgtttattcatacgcacacaactttcaaactagtgtgaacacgcaatatactttaaaattttgttccacaaccaaaaacaaatatgtctcgatcaataaacaagacaacgaaacggtgtcaacttcgacacgaatcgaaacaacacgatcatcgatcttgttggtacaagcgtgctcttgaacttgtgaaataaaaacaaccaaatttttgtttttccaaaacaaacaaaaacatttggaacaaaacattaacacggttaaaattctctctacaaaaaaaacttgtaaactttcacaaactcttgtttttctacttttagttctcttttatctttagcgttgtgacaaaatgtagttccgagatttgaggcattaattaagaagttgaaaagcatattggcgaagttgacaaagatggttgaccacgtttttccactaatagtagaataattggttgggtggaaattggattttcagtggtccaattctcaaacttgttcatcgtctttttctaacaagttgatgctagctattgtcatcttttcttttgggaccgagagagaaagaaaactaaaaaatcttgagaacttgctcataatctgttaatggttttgtcaatttcgctcccatcagtcaacggaagttataatcaatttgtcaaaatctctatgacacgaaagcaccttatcttgtactagcattgtgtgaaatgggtcgagaatatatattgtcattattcattagtcttctgtcttgtgcgtacaaactgagttgatatcggctctatctaatcactaagcaatcataatagatcagtaacgtatctaatgattctgaggataaactagttgctaaattagattattactattatcagttttatgtatatttaccaataaaaagattcactgttttatgtaaaaataatcttacgagaacgagttaacgtttaacccattcgttgaatacatgcgtgcatgtagaacactcaaactaaaaattggttatgtcatatgtgtcttgaccgatgagatatatacgactatatagggggattggactacaatcatttaagttgatttcttttctattatatatagtgacacattacatgtgacgatatgatgtatataataaagatatttatttgtccgcaaacgcatgatatcaaatgtaatatacatatcaataacgcgtttatattaatctctaatacgtacaacatattacaatctctacaaatatcgacatgcttaaaaccaataacgcgttcagtagaacaatttaatgcacgttcaccaaccattttaacatcttatgttatttacactcgcgtagttcataacatttggttattacttattagtatatggaccggccctgccgattcagacctaatgcgacgatgtttgagacatcttaacaatatgactatgctatgatgtttgatcaccacctctattatataatgtagcaagatgatcaattatttgaatacagttttaatttgtttgaggacatacctaaaatgctcatatttttctcattgaaattacctttgagtcggtgttattcataaaaaaagaagaccatttattagctacatcattttcacatgacggctagaaaagtctcattcaagaatctggttgtgaaaagctaataaatatattaggcctatcgagccaaaagttgttacacatgatttcaaacatcaaataagtcatcggagtcaatattaaaaagttctacgtacattaaattcataagttttggcagttagagacatgtcaagttgacaagtttcatcagaacatgatcttttagtcttagagataattatgtaattaatatggcaatagagctagctggcaatagatcttaattatctaattaaagatgaatcacagtcaaaatcgttagagctggcaatagaaacgtaaaaatgaacctagacgacagtgcaatatctaaccatgcatggacttttaatttacaaaaatagaatatagaatcaaaacgcaacgatttaggaatctatttatagaaataaagaatctgtaataactgcgatggatatccaaatttttttatttttgttcttctcgtcctataaatatgccatcttcttggagtatttctttacaacattctctaagcttgtaatcgcgatttaaggcttgtccaccacattaccacgagtagaattgaccaagtaagtttccaacaaaacttaaaaccttttctttgttttacgacaaattcttgttattgtggtccataggttgtttctcactttcttgcaagtgatttttcatgatttttaagatttacgattcattaaattactttactaaaactcagatcgaattgagttcttccatctggactatcttatataattagttaggactttctaatccatttttaattcaattttgttgtattttaaaagtcggtctacaaaatattgtttaaacttaatagcatgatacagtacttcaatatggtgatgaattggcaacgaaaaatttaagttgaatatggaatacgcagataattgaacaagaaagccactaaacctaaatgctggttttagtaagtagatagataacctttttattctacttgttagtttatttttaacgaaatctgaattgttgaaatatagctgaaccaatgacccaattcagtcttcaaatatcactagcaaacgtaattgacatgaccatggcatgtttcaagcatattagatttcgatacgtcttaacttcttaattatcgggaccagctacatacatttttagtatatgtcatcattatctttacttcttttttgtatcatcacaattatttccattttatttttttgttcttcttcatgtgcaaaagaagaggtactttgataagattccagtctataggattcaattaagatactaattaaatacagtatatacagaatcttgagttgtccgctttcaagattccaatacagtttacaaaattctgaattagttattcttgttgagtcaatacttttgaaagaatgttgaccaaaaaaaaaaaaaccaaagaaaacggatccttatttaacggtctccttaaccttaataatagtaaaacggtaaaaaccaaaattcatgtggtgtaaattgtctaaagtctgtatttttttttattgacatccattttttttgtgtcgaaagtctatatatgaagtcaaattcatgaacaaatgcttctaggctaaaaacgttatcgtaatctttaatcttcaggcttcttttctaaaattccgactggttaccgagggctagaaaatccggtcaccgtcgccggagacaacctcggtttctaaacgaaaccatcgtgaaggacggaaaaaaggagcttgaagacaaaacaatgacgagcgttttcgacgaacataaaccctccgatgactctcacgagtccaagatcgtcatcaatggtaatgtatctctatgttccttcggtttatttcggtttatcccggttttgtttcgattctttaaatcttctagtcgtttatggttggttggtttaagagtgtgtgtttggattgaattttaacgtgcaggagaagaagaggtgttggaggaggagaatgataatccgattgaagaagtccggttaacggtaccgataaccgacgatccaacactaccggtgctaacgtttcgaacatggactcttggacttttctcttgcatattgcttgccttcgtgaaccagttctttggtttccggtcgaaccagctttgggtatcttcagttgcggcacagatcgtgacccttccgctagggaaactcatggcaaagacgctaccgacaaagaaatttgggtttcccgggacgaattggtcgtggtcttttaaccctggtccgttcaatatgaaggaacatgttcttattacaatatttgctaacaccggagctggtggagtttacgccaccagtattattaccattgttaaagcgttttataatcgtcaacttaatgtcgccgccgccatgttgctcactcaaaccactcaggtatatagtttttacatgtcttaagttttattgtctttttgtttttataatgggtggatataacagtagctacacaaaaaaaaaaagctattatcttcttgattacgttcttcaatctttatgattactgattattatttttctcgcattttatacatttacaaattattatattcattttgttgttgtgggtaatagtcatttaaatactagaactatggcctaagaaacaaatatttttaacgatttgtgatctttaagactttaacaatcatttcttttgcagttgttgggatatggatgggctggaatcttcaggaagttccttgtggattcaccgtatatgtggtggccgtcaaatttggttcaagtctcactctttaggttcgtttcaatgacccatatatgtgactcttattgctttctcttaagccaagttttgattttggctatgtaacagagctttacatgagaaggaggatctacaaaaagggcaacaaacaaggtttagattcttcatcattgtcttctgtgtgagctttgcttactacataatccccggctaccttttcccttccatttccgcaatttcatttgtttgctggatttggaaaagctcagtgaccgctcagattgtcggttctgggctcaagggtttaggtattggttcgttcggtcttgactggtccacagttgctggtttcttaggcagtccgttggctgtaccattcttcgccattgccaatttctttggaggattcttcatctttttatacattgttctacctatcttctactggactaatgcttatgatgctcagaagtttccgttctatacttcacacacctttgatcagactggacacacctataacattacccgtatcctcaatgagaagaatttcgatatcaatctagacgcttacaacggttacagcaagctctatttgagtgtgatgttcgcgttgctctatggactcagctttggttctctttgcgctaccatctctcatgttgccctctatgatggaaagtaaggaccttccaacatcttttgaatagcttattttctatgatgactctctctaagcttcttttgtgtttgtatcttaaggtttatatggggaatgtggaagaaggcaaagacagcaacaaaggacaagtacggtgacgtgcattcgagattgatgaagaagaattatcaatcagtacctcaatggtggttcatcgcagttctagttatttcctttgctttcgcactctatgcttgcgagggctttgacaaacagcttcagctcccatggtggggacttatactcgcttgcgccatcgctttgttcttcacattacctatcggagttatccaagcaactactaaccagcaaatgggtcttaacgttataacagaactgatcatcgggtacttatacccaggaaagccactagccaatgtcgctttcaagacatacggatacatcagtatgtctcaagccttgtactttgtaggagacttcaagcttggtcactacatgaagattcctccaagatcaatgttcatcgtccagcttgttgcaactgtggttgcatcaactgtctgcttcggaacaacctggtggctcattacatccgtcgagaacatatgtaatgtcgatttgctcccggtgggtagtccatggacttgtcctggagatgaagtgttctacaatgcatcaatcatatggggagtgattggtccagggagaatgtttaccaaagaaggtatctatcccgggatgaactggttcttccttatcggtctcctcgctccagttcccttctggtacctatcgaagaagttcccagagaagaaatggctaaaacagatccatgttcccttgatcttctctgcagtaagcgccatgccacaagctaaggctgtgcattactggtcctgggccatcgttggggttgtgttcaactactacatcttcaggaggttcaaaacttggtgggcgaggcacaattacatcctctctgcggcgcttgatgcaggtactgcgattatgggagtgttgatattcttcgcattccagaacaatgatataagcttacctgattggtgggggcttgagaattcagaccattgccctctagcgcattgccctctagccaaaggtgttgttgttgaaggttgtcccgtgttttaagaattgaagtagatgcaacgttgtcctgaaaggggtaactgttgatggcttcggtaaccttatatctgtgtaaaaccctccaagttaagggactcaaacaatgtaaagcactagatttggtttcatgttcttcagtatttaactattccctttgtaagtataagaacagtagccaaataaagtagagctttcttcattccaactatataatcaaaatgtaacaagctccaaaagatatcattcaaatgatataactaaggtttaagatgtgtaccaattaaaagtaatttgagctctgttgcatagctggataatactttaacaagattcaagggaaattttaaacaatggtctccgagaacttttttgtttttcgacagaagatgatgaaagcaaaagtctagtttagctatgtcgcatacccatcttcagttgaaaagtccagggtttagccagtccctgcaattacagtgaatatgagtgagatattaccatctggtacataaaggttctagcttctttttttttgtttcagttcgtgtatttaacttactttgttacatcatcaagatgatcatcaacatctgtgacgtccttccatttctcagatgaaatgtaatctgacaaaactacattggccgatggctcttttaagagtagcttgcttcctccatctgctccaactactctccagttcttagaagcatccttcacacagagctagcatatacatacaacatacactatcactaaatccgtaaaaagtgacaaataggagtttaacagctgcagagaaactgcatcaagcagaaagtaccaaaagaaaagggcgagaaagggtttattacatagaccatataagcttggtgtcaagaaggttggtagcacaattcaagcaaacagtgtgaactttaattagctagtatagtcatgtatatcttataaatttacagtatttgcttaggatgcaaagttgagacaagagcctggagtaaccataaattagcatatacaacaaaatttgagtgtctcagtctttcactattttctcttgatcttatattgagcataacaatataccaaaaccatattttcaaataccaagaagctatactggtgtagagtggccttgatatatattaaatactaaattgactaacttctcaatctcatattcatattctcctaagcttttcaaagcattttcatgattagaaataccaacctgcatcacagggcttcgctctttaccctttgataaggcttcaagctttttgttgttcaactacaaacagcataaagggacaaaacataagatagttaaacgaaaatgctgcatttgaaagtaaaggataagacatttaattaccaagagaattggtgcctgagggaaatagcgagaaatgtgatcaccaatgtttttagccacaccacagagctcaacgtcatcaaacctctcgtttgcatgaaagtatccaacaatacttaaaccttgagccacataatgctcctctatctaccacaacaaaaaatatacctgaatccgtaagtttttctttaaaggatataggtacaaacaaagctacagaacaaacacataaagatctgaaatttctatgttaatatagaaacaacaataagacttcactgagaatcaagcaaacatatagaaaactaagaacaagctaataataacatatgcagctcaagcttagtacacgaactaaaaatttccagaattcgtaattcaatatacataccaatgcaatcagatcataatctctttcaaaattcaatttcaaagctcgtaaaatcaaatcgattcgaataagaagagatacgaaccatgatgagggagatctcgagaggaggaaggagagcgaggttagagtgaaagagcggcacagaatctgagatctctacaactccgtcgtccttagggctgattctaccgacgaggactccgttgaccgccgccgtcttgtgtcgcagcgagtgaagaacgagtttgatgtacgcgttctgggagatctcatacttcaattctccgttacttcccattcccatttctaactcgatcggcgactcactgagtcaattgaaaggaaaattataatgtcgcaaaagcaaatcgagaaatcgttctgagatttagctcctttgttaacgacggacagtggaatctcgcactaaaccgggttcgggtcagcccgattttatcaccgaaaaccctattccccacaagttttcactttactacattaaagtttttgaaattatagaaaaagtcaaaaaggtttattatatttactaattgcacctcataatacacatcaagtgacgacaaaaaaaaaaatacacatcaagttttacattacttctaaactacaccatctatttcattatcgtacaaataaacccaccaagccctcttgtcacattatgatatcaaaatatttttattagtatactttactacactaatttgatatcaaaactgaaccaattttacaaactaaaacctgaagaagaaaaagtaaaactcattttttttctctttggcaatctaatcaaattgtaaaactatacgatatttgcagttatcgtcttggagagaagtgggtcaacagaaactacggttactccggtctctcctcctccgtcgtcagcctcggctttaggttttgaaacggtgacgttttgctttggcagctgcttgtttgacatgtgatcgatggatttccccggaagattgagccacgtgtagacagacatgcctccaagagctgcgatagcgccgcagatgctgatgaaaccagggtcagagccgaagataacgtaacctccaagcaagatcacacatgtcttgaattgccctaatactacatgagatgttgctgatgttgccctgtaagaaacaacaaatttagttagcattttataacctcaagactgaacttccaaccaaagcaagagaacaaaaagactaacccgagagcgagtgcaccagaccattggagaagaaagccgagaagagccgagatgaggattgcggaagagttagttaaatcccatttgaaaagcaaaactccaggtgggtcaagccatggcatgagagccaacaagaagaagacagtaaacggtgttgtcttccacatcaatctacattcaataaagcctttattttaagagacttgtattgcttacacctcaagtaaaagtaaaagagagagattcttatttcttacgctagggcagtccaattagcttgttgctgaagattagaccagagtattttgttaatggcacttggaataatccaagcaacagcaactaatgcaccaaacaaattaaattctagatccgtcactgtcgcgattgccacacctagagatactacagctaatgccatgacctgtaagaggacaaattgcaaaaacagagtaagcaccaaaaacatgtaatgaattcttgattgttttgttgacatgtcataaaagatataagcgaaacctttgtggaagaaatggttttcttgaagagaacaaactcggcaagaacaatcgttggtgtaactgcgatcttagccatttgatagaatccaacgctggaaacaaagaagaacaaaagctttcaagcttaagctatgaatcttgattcaaactttagcgattgagctatgaacctattgtgtttgagactggtattagcgagtccagaagcaaaggccatgacagctccaagagagaaaagagatgagaaaggtgttgtctttgatggaggagacattggaagcaaagagagagacttgaagaaagctaaaagaatccaagccacggtataatgaatcaatgttagaaagattgggaaattgaatccaactcttcccatcacctgcacaattcaaccttacaattacattcacatggtaaataaaaaaaagagaaagaagaatttgagattgaagaaaccaaattactaatttattggcaaggatgattccaacagcaacaacgaaattaaaggacattgcaacaacagggccacaaaatctctgttgttgccttttagctccttctgatgttttaagctcattgtacaaagaacttctgagttcttccaaagctcgtcctacaaattcacaaacagatcaaaaaagcctaaaggtccgatcaaaaccattaaagatccgatcaaaaccatttaacttaaacggtgaagaacagagacaacgtgggaataaataaagcatcatttttgatcatgagaaatctgaattatgatgaggcaaatcaaatgaagaatatggaggcagattcatgaattgttgttataataatgacgtacctgcttctgcagcatcactatctttccttttgagaaattttcttgcatcttttcctaacaaagaatcaaccagacccatcacacagcaaattaacaaaaataaaaaatttgcaatcctctctccgattgttttaatatcttctaagaaaaaaaccagatcacattttccattttgatggaagaaaaactttacttttaaacaaataatacgaaaatgactgaaaaaaatctggattttaatgtcatggtataattgtttcggctgttgtacaagaagcagagcccttatagagagagagagagagagaaaaaaagatagaaatttagcagtttgcttgaaaacgcagtttcattgcgtatctttctgttttattttattttaaatcaatttatctcgaaaattaagaaaattttgaggaatttttcagggattttttttgtttctcttgaggaaattgtcgagtttgtaatttgccacgtgttgacttcatcaacgtacaaaattgtgacttcattgataaaaaattattcagatcggtacgaggttttatctttctttcttttttaatgcacaaaacattcagattttagtggtagtttttatttacaagagtgcctctgtacctaacaaaattaaaacacacacatatatatatatatatatatatgacattaactaactaccaattttgtgatcacaataatgacattgtacatttttgtacatagtttaagctgctagcttatagtcataagcatatagacgtcacctcacgcaacatactgttgtggaaacataacactatcagtaaaaaaaattaactttgaaagagtagcgttaattagttccgcaacctaccaaaagaaagaaagaaagaagtgttagttagccaaatgattaaatagcaaaagctttggttaagtgtcatacgtataaagagtaaattaaatgaattttatgtataagtgatgaaagttgatgatacttaaaaagcttattatcactttacgaataaaaatgacttaacatgtacgcttgacctcgaaaacgagaagctttaattccaagatttcgaagtctcaacaaacttttggagccgagggcctacgtaataaaacaaaaagcttgcatggccacgtcatcatctctttgtataagtaaacttcttattctaataaaaatgtaagatttgtggatccactactttaatttctgtcgattttagtatgattgaaacattaacaccgataaagtcaggtcccctggtcgtcttttggttcataaaggtaatcccattttggcgaaatttgtttgaacttggaagtggaagaagtgaaaatacatgtagcacaagactgagattgacgagccttattgattcggcccatttttattcagaccttatgttagttaactggcccgatcagccgcctgatggctggtgaataaacccgatcattactcaataaatcacacaattattattgtaaatctttttcatctaactaaaatactgaactttctaaacaattgaccattttgttttgtttattgttttacagaagaattaatgtttccatgcattacggatttatagttaagattttaaagtctagaggttagatttaattagagtttgaatttaaattattttattaatttatgaaactctacactattttttttaataatgttgatacaaaatttaggttattcacgtaattctcgtattatgaatttattatgtacttgacagaattatttcatcaatctttttttcgttaattttttcccaaaattttagcccatgtttttaaaaacatggggccaacttttgatcatgattcatgcatgatatcaagcactaatttgtcatttcctaacaaatttcctgatagaaaacttgggtcaacgttctggtacggtaatattaaaaatttataatcaagaaatggaacttcgtgccataaaataaaatagtaagaaaatggtaatcacgtgtaagtaaatattaatcgagtgcttgttttggaatagaagaaataaatctgtcgatcttacaataatcacagagacaggagaacgtgttagattgtgagtttgtgacttgcgttaattatctggctttgttgtgtcatgcatgttctaggcatgtgacattcttttagttgacaatttgtatcggtctaatttacttatagcaaaaacatcaataaagtttcataaaaaaaattatgtctcaaattactgattttaattccaggaatagacccatcaattagtcgtcggttagggcatttccgtcattttaaagttaaactaagatagtttctcttttctgtctcctccattaatgtcccaatcataaaacattcaattatcatctgagatttgagaataataaataaataaataaataaaaatctgaaacatctctttctctgtttcttcttacagcttcaaggcaaaacaaacccccaaacaaacaaaaaaccttcttttcaaagattttcaaaaaatcggctcttggagggagacagagattgatcgatggaattggtcccgtacgattcggagacgaaatcatcgatccccacaaatctcgcgtggcaagagatgtttcgttccgcttcatctcgtaaacctcaagaccctccgtcttcttcttcttcatcgccaccgcgtaaaccttccggcgatggatcatcaagcaaaacatctttatcaaccgttgattcccaagcccgtctcgctatgtacatagcaatggctcacgctggtctcgctttcgccatttgtgttctgtatttcgtcggaaagctattacaagagtatctaagaccgattcaatgggcgattctctgttcgattcctttacgaggtattcaagaaacccttgttgatttctggagcgagcctttgaaattagggcttacggaagttgttctcgctgttcctgtttctgtcttcaatgttttcatcgggtcgattgtggatattaaaaacgtctgctttagggtttttcttaggagatcgaaacctaagagaacgaggaagaagaacgatactgggttttctaaactggttaaatggttagtctcttttggtgtctttgtcattgcttatgagaggattggtggaattgggtctcttgtcattctctctttagggtttttgtttagttccaagaatgttgattcgtctctctctgcggtctcttctctgaggagtaatagttttaggagaagccatttcactgcttatttcactagagggataatgacgagattgaatactatagttgctattggtttgattgtgctcatgattgttggatctttgactggtgtcatcttcttctcgtataagattggtgttgaagggaaagatgctgtttattctctgaaatctcatgttgaagagagtaattacgctgagaagattgggatcaagcaatggatggatgagaatgatgttccgggaatggttgatatgtatacaacgaagttttatgaaacggtttctgagcagattgatagtttggcaatgcagtataatatgacggagttagtcactgggattaagcattttgtgatcgggcatcctcagaacacgtcgacgccttccacggcgcttataactccgtctccttatacagagaagctcatgagtttgaggactcgggttaagaatcgagagtggagtcagatatactcggaggttgatgtgatcttcagggagcttattatcactagagaagatttagtagagaaagctaaaggctttgctgttaaaggaatggatgtatcgcaacgggttttctcgagcagcgcatcggttgttggaggcggtgctaagttcgttttctctattggaaacttgataatctcaggagcagcagagtttttcaactttatctctcagctaatgattttcatttgggttttatacattcttatcacatcagaatcaggcggtgtgactgagcaagtcatgaacatgctcccgatcaacgcaagcgctagaaacagatgtgtcgaagtcttagacttagcgatatccggcgtgcttttagcaacagcggaaatcgccttcttccaaggatgtctcacttggctattgtttagactatacaatatacatttcctttacatgtcaaccgttcttgccttcatcagcgctctgttaccgattttcccttactggttcgcgacaatcccagcggctttgcagctcgtgctagaaggaagatatattgttgcagtgattttatctgtgactcatcttgtgctaatggagtatggtgcttcagagattcaagatgacattcctgggtccaatgcttaccttactggactaagtattattggtggagtcactctgtttccttctgctctagaggtaagaaaattaaaggattgggtctttatgaaatttggaacaaaaattggcgattttgtaatgtttttttcgggtattttgttgttgcagggagcgataatggggccgttgataacgacggtggtgattgctttgaaggatctgtatgcagagtttgttctgaatgagccaaagaagatcaattagttgttattggtttctttaataggagcttcaagtgcttttgccgtggctgctttgtcttggaagaagattcatgtagattagtagagagactcaagtgttgattgaagtgtgtgttttgtgtggattgtaatttatagtgtggagagaaatgtgtagcagtaaatttcaatttcttgttgtcactgttgtattattgtatgagttctgattcttttgggaaaccttgtaaatttctttgccatattcgtttttcttttaaactttaggttttacaaataacttatggaattagcatttgaattagagttgagctgacgaaaatgttaataatctgttgtattttttttgtaaaagtatatgtttataaacatgaaatataaatattcttacttaacaaaacaaaacaaatggtgttatacagtagttaagagagcttaaagcccaataccaatcaaaccatctctagcttatacaaatgatgttattatgacaactaagcccaatcaaataagagtatgtgcagtaaattgtagtaactagtagtatcaaattataataaatacgggtacgtaagtgtaagtgatgtcggaagtaccaaagaagcgggtcagagccgtgttacagaaactgataatgcgacttcaagctaataataatccacgtgtcttgtgctcgtgtgacgtgtcatgatttgatgttgttttttggattttcctttctttccacaaataaataattggtcaatgttgagtgatggagattttctcttgtttaaagtaatcatgttcgttaagttatatcccgccattggtccccgaatggtcgacgaggccgacatatgtatgcaaatacatggtctaaaatgaaatttaaataacgtcatgaaataatattttaattaaattatccttattataa

SEQ ID NO: 909 - DNA, 82033 bp, Arabidopsis thaliana
gatcacagagtatacaagtctttttgttactagtgttttaattgtttaatcaccattgcgtaatgggttcattacgacaaatctagaaaagtatcctctgtttcgttttactagttgacaactataaaggttttagataaagttggaaaataccatttggatttttgtgttgtcagtgtcacctgtttaaatacttactattttaagaatatactatacatggcaatatagcttattcgctatttactagtctcggaattcggaaattacaacttaagaggtcaaaaggttagaatgatagaccagcgaaagtacaaataagcaaatttataaaaatcttcgtttcgactagtagtacatatatttgacaaatattgacaaatttaacgtccatgaaaatgtgtactttttaagaacgcaacaaacaacagaatattttcttatctatattcaaaaaagttataagaagtcaaaacgttagaatgagagaccaacgaaaatactatagattagaaaaactactagtacatgttaacacataatatctgacatatgttacttgtaaacatatgaaacacttgacaaaatttaacattttatcaataacaaggtgtatttttcaaactccacaaacaatagaatatttgaattgtcatatttattaaaaggttttattagtaatttgttttatacctcacattctacaccaacctaaaatgtcaactccgcgatctatccgagcatgaaccagaacatagaattacttgaccaaagacctccgacatcaacggaacgttctagaaatttgaatttataaatttcattcaaaattggtttatcttatagtatatccttgaccactattctatatataatccgacaaaataaaataaaaatgaggaaaacaacgtggaaaaagagagaatgggctccataacgtttagatgatagaaaaatcttctggttgagattagttagccaaccatccccactccttccaatagtacccgccattttttcaattgtattgccaaatttagtaatttcacgcattttaatttatacaaaattttaataatagaaaaaaatttggttatcatatttttttttcggttcttatttttctctttattataatatttttttattttcataattttcttatcaacaccagctaattttggttcttcgatacatgctctttttatgcttttgacctgccttatatatactcaactgaaaataatgaaacaaagtaaaatattcgtgttccactaaaatcaaaatattttctaatcattttcactatatatcgaataaaacattaccataacatgaaaatctcaaaaagtcatatacagtatatgtaaatccacaggaagctaaaagatgatttttcaatattactatatttagagaagagaagatttttctgttagaacaaaaaagattgttatataggtgaaatgaatgatgacttcattgagatatgttattcttatccatttcttttgataaagatatatataataataaactccgaaacaaaaaaaaaggatcaaaaattgaagtatctctttacctttgcccacaattctagagagaaaaagagggtctgctttggcggttggaagtagcagttgctatcaaaaacattgcttcataaacaaaacctcaggtgttagattaggccaaccgttatcttctatatcttcttcttcttcttctctttgattcttcaaaccaaagcattaacaaataaagattcctttttgttatggtttgatttattggtcgccatctctcgcccaacttcaccttctctgacataatcactacaccttcttcctctctgtttctatatcagaaacttcatcttcctctcaagttttctcatttcacactcaaattcaattccctttgttcgtgaggttgaatttcggttgcaaacatttgggtttgttgtaaattaaggttccgtttgtaaaagagattcctttttatttggggaaatcgaggagttcgtgtacggagctgagtttttgcctttttgatggttgcagataaggtatttgattatattcctcagtgaagtttcatgtgtgttattcttttgttattgttgttgggtcatggaaatttcatgactttaattcttttttttctttcatgtgtgtttcatgatcatttcgtgtatatagttaaggttccatgtgtgtgtgctcataacttataaacctttgttgcagaatctcatttaattcttctctctatgcaatctttttttgtttgtttgtcctgtgaaggtctaaaatcttgaaggattcaaaaatttccgatgaatacacgttattccaatcagccggagttatcttctagtaatatcacgatcactatttcatcgtctgctttgttaagctcctcaccgcgaggcgataacagtcatgttgctgctgctaatggtcaagagaggtctccatcttcgttttatataaggctggctatgaaggtatctagagctagatggttcatcttcttgagaagagtgtttcactaccagaacggttcaagatctgaccttgggtctaatcctttcaattctagcacttggatgatgtctgagctcattgctctacttgttcagctcactgtgataacattcactctagctatctccaaagaagagagaccaatttggccagtgaggctatggatcacaggatacgatgtgggatgtcttttgaatctcatgctgttatatggtcggtatcgtcaactagacattaaccaaggaaatgggtttgtccttggcgatgttgagcagcaacagagaggcagagaagaaactaggtaacactcaaaaatctttatcttttgtcgattatgaatccaaaacctttacaagatcctgatattgctctatgtttgcaggtcctctcacttgatgaacaaatgcagaacgtcgctagagcttttctttgcgatttggtttgtgattggaaatgtttgggtgttcgattctaggtttggttctttccaccatgctcccaagcttcacgttctctgcgtctctcttttagcttggaacgctatctgctattcctttccctttcttctcttcctcttcctctgttgccttgttcctctcataagtagcctccttggatataacatgaacatgggatcctcagacagagcagcatcagatgaccaaatctctagtctccctagctggaaattcaaacgaatcgacgatagtgcttctgattctgattcagattcagctactgtaactgatgatccagtaagtcctaattcttttactctcaattcaagccaaatccacaagttttcttggaccataaggtttaatctgtgatagctctgttttgatccactaagggaatctgatgtcgaatgttgtctattagtctcgtttatgattgaaaaggacttagattttgagttttgatttggttttgcaggagtgttgtatatgtttggcaaagtataaagacaaagaagaagtaaggaagcttccatgttcacataagtttcactcaaagtgtgtagatcaatggcttcgtatcatctcttgttgtcctctctgcaaacaagatcttccaagatgacaaagcaaataccctaaaagcaacaaaagctcaatataatttttttctttctcagttttttttttttttagttttggattgaagcaaagtcgattacttgtgtgagtgtcaaattttttgtacataaagagctcaccagtaatcgttatgtacattgtgagtagatgatgcaaatcacaatggcaacaactttatagaatcttaatatagtgtttatactacatattttgttttttctctcgtctcatttacatatcttgatgtatatatttttttatatgttcaatttttttttttgcaatttaaaactgaaaacccaaacattacttcattaactatcaattaggatgtcggttttcttaaaagaaatatttttatagcattaactatatctcataagtataaaagttttggacatggcatctaaatagttggagtctttgagatggttttgacttcagctatataagtaagtcttagggtgtttaatttagagtttgaattttaagcctttgagtctgtcaaaacctaaaataggcacaaaccaaacaaaaacaatcagatgtttttttttggttacagaatctttaaattagactgttctagattctcaattggcactaacacaactaagtatgttcctaattggttgaaaagtcataatatttgtccttgcacaaaatgtgtaaaccataaaaagaagaataaaacctccaagtcaaatattttctactaatttacaataactcttttctagaatactaaccaccaataacttaaaaaagcagtttgtcaacaacatccaacgactatttttagctgccttctctcacaagtcactattataaatgaccttttggattcattagcaagaaacaacacaaatcattctttaccttcataacaaaagtcactatagaaattaccttttgattcattagcaagaaacaacaacacaaattcattcttatttacgttcgtcaaaaccatgacgaaagaaaacccttcaaccctaaatctcggacaacctaaggcacaagaaaagtattccacaagtttagccaagatcaaccctaaaccctccggtagctctaccgttgaatcgaagagccaagacaataactcacctagtttaaaacgttggagatcgtcctccggtaaatctacgaggctaaattgtttatgttctccgacgacacacgccggttctttcaggtgcaggtatcaccgcgttgattcgttgacacgtgccgggtctattgggtcgaacctcgctgttttattgtcgtccaagtcgagccggtttagtgactccctcaaggctcagtaaacccggttactggatttgttcggtataataactgtcggttttgttatttgtttgtttcttctacttcttcttttgacattgttcaataatttttatcgaaaaagacattggtctgtattactaaaccgcttgaaatcggcttaacccgattcaaggtaaacttttatctaattttcaccaatttgattcaaatttaagcatttattacatacacattttatatgcttcaaaaatacttgaaatgaatttttctgtctacattttatataaagaaaatataaaataattttacgaagtcagaaataatacgcaatataatatatttttgcaaatttatatatattgtaaacgttttgatgatcacattatttttaaaatttctgaagatataattgaacttatcatttcgggaggttcgattttatatgttacttgtcaaaaatttaaaatttgacaatagaaaaaaatggctatatcacatattatctttgattttgtatgattattttgcatttaacatcgtaaaaaatgtactaatttgaagattttttgaaaacttaaattctccaatagcacaatagatcatatattctatgggtgaatgtgaaattcaaatttatgtccggttcaattcagctcgagttttacttaaccggaacgaaaatcaaatcgaaccgtattttgaagaataaaacgacgacgatttgagcagatttttcaggatttaatttgtaataatgcaaaaagattgagtttttgttgtttgttgagatatttaaaaagattcttcaggttttaatttgttttccaactctctcctctgctttacaacaaatcgtctccgtcttcctcgctcagcttcaacaaccagagccgacttgagattgagaatcaacgtaatcggtaaattttcgtatacgcaaatccattctactcattttgagttcacttacatatcaagattcttctatctctgttgaatctgcgattcacgaatccattaggacgatttttggggatctagatcgggttttgtttctcagaacctgtaattgattgtgtaatccttgagttcattaatgtataaattcaaatttcccaatttgggtttgtttctgatggattttattaattttgtgtgtccataaattgtgatgtttaagattaaaatttggttaatgagctttgattaagtctttagattctccattaattttcttatcttcttcaatattgtatatattatgtggacataactgaatcatctgaatagtaaaatcatgataatgacttcagtttctaagcaatgtttgtgttgcctatattgactgacttatttagattactctgaattttgcaacttgtgttacagatactctcgcaaagtctcatcctttctcagcaaaaaacactaggaaatggttgaaaggtacagtgttcttcatatgcttgcttctgtagagctgttttttgaaattagcaaaacaagttcacaatgttttatatgcaggcatggagagttttgatttgctgcttaagatatatcatgtcgcagtgcgttgacggtatcaagcatttatgcacctctgttttagggtgttttgatcttgatttgtataaacaatctggtggccttggagatcctgaattgcttgcaagagacactgtttgtatgccctatcaccttctctactctttttttttttttttttttccggttataagattcgatgcaataccatttgaggaatgcaaaaatatttcttctgaagactattgatgattgaatttggttttggaatgcagttagtgtgagtgaaatagaagctctttatgagctttttaagaaaatcagcagtgccgtgattgatgatgggctaataaacaaggtataactctaacttgtttgatcttcttcctcatttggtaaagctttagtgattgatctaacaatctgtctaatttactcatctcttgtttgtatcaggaagagtttcagttggctttgtttaagacaaataaaaaagagagtttgtttgcagatcgggtaatgtttctttcttcacattataagtgttcttaaacccatttttgtcaagatcaagtttagaagaaatgctgaaatatgtgattttgtttctaggttttcgatttgtttgatacaaagcacaatggaatactggggtttgaggaatttgctcgtgctctctccgtctttcacccaaatgcgcctatagatgacaaaattcactgtacgtcccttttagcttgtatctcaaaaacaagattgggataacacattaatgatatatactatttttttgcagtttcatttcagctatatgatcttaaacagcaagggtttatcgaacggcaagaggtaaagcttccatatcttcaaatagcttcatatataaccttgtagaagtgcgctttattatcctcactgacattttcgtccatcatttgtccaggtgaaacaaatggttgtcgctacgcttgctgaatctggaatgaatttgaaggatactgtcattgaggatataatcgacaaggtaagttacttactttttttcctcttcaccctatattttttctttgaaagtaatttcccgagttttgaatgtttcagacgtttgaggaagcagacacaaaacacgatggaaagatcgataaggaagagtggagaagccttgttcttagacatcccagccttctgaagaacatgactcttcaatatctcaagtgagttccaaatctttctatttatataaccaggattgaatctattcaaccaaattccttctctggtttctctttcttctattctccatgatatgtaataaaggtcgtgatcctgttgtgtgcttgctctgcagggatatcacgactacgtttccaagctttgtgttccattctcaggttgaagatacctgaaaaagcaaaagcaaaagcaagcagcggcaagacatcattgtattgttgaaggttgttctttcgttatggttctttatttgttacatttctaaatctctgaactcattttattttttattgagctttttttgtgaagcaaaattcttctttttagtttggtttttgtcctttttgatttcgctcggtctatctgtagatacaacttttgcatcttgatgttatggtaatgtaaagtttttcagtttatttattaatccaattaaaaagatttgcttcaatctctgtgttttggttattagagttagcttttaatattaattcaatggatttctagattgcaagcaaaactagtcatttcatatgtgacttgtaagcaaaactagtcaaaactgagtgatgtcaccagccctcctaatgacgagttttccgagatcagctccacaagaatcaacttacatgatgacaaaaagtggatcttcgatgagacgccattagagagaagaggagatgatcttaccaacaagggtatacgaaagcagagcttcgggggatggttgagaagcagagacatgaataatgttcttccaaaaagaagaagaggtgagaaaagggaaaaaaaacctaattgaagaattagcgattttccctcaccaagaaccctacattaatacaaaaggaagtgacttgccaatcaagtttcccatccattgtagatgaggggaacattgtgtttgtagtaaggcaatggaagaatgactcatttatgcttcaatgacttccatgttctttcttgaggagaaggaagaccattcttcttgttttgctacacaagactgaaataagaaacctcttctaaaagttcttcacgctccatgtagactatctctttctccaaggagcgcttttcatttagaaaaagcaacttttactcttcatcttatcttcggccatactagacgcaaactcaacttcaagatcaaacagtgcttctaaagccaactcaactcaatagccatacttcatgccgtctcttcagcttttttatctttcaaaggaatatttcattaatatgatttagtttttattttatatacatcattttgacatatatatttttgaaaattaattttatgctttaaaccacaaaaaagtttaagtttggacctttcacatttaggtttcaattattgtctacatgttttcataactatattcacacaaataactaaaatctcctcatagaaaaaagattaattggtttgaaagaataaaaagagtataaaagattatttttctatggttaaaaaatatgagagatttgccttggaaacgatagttaaaattcaaagaaactaagcttgatataactacaagtttcgtacataaaaatgtcgaaattgttagatgtaatgaagccaactttagcttgaagcctcaccatgtaatgttttatctcgccggagaaaaaaaaattcatttatcggtgaaattaatttataagaccaactaaaacatcaagcacattagatctattaatgattgattaatgttaatgtgcttttaaaattgaataaaacacatgatcaatcatatttttagcgtataaaaaataaatcatataaacgagatggaagaccattcttcttgtttttctttacaagactgaaataagaaacttcttctaaaagttcttcacgctctatgtagactatctctttctccaagaaatatatactaccaaacacttttcattttgaaaaaacagtttttactcttcatcttatcttcagccatactagacacaaactcaacttcaagatcaaataatgcttctaaaagccaactcaacccaacaaccatacttcacgcactctcttcagcttttttctctttcaataagaatatttcattaatatgatttagtttttattttttatacattattttttacatgaatattgtttgaaaatcaattttatgctttaaaccacaaaaactttaaatttggaccttttacatttgggtttcaattattgtctacatgttttcataactatgctcacacaaataactaaaatctcctcataggaaaagattaattggtttgaaagaataaaaagagtataaaagattattttttatggttaaaaaaatatgagagatttgccttggaaacgatagctaaaatccaaagaaactatgtttgatttaacttcgagcttcgatcacagaaatgtcgaaattgttagatgtaatgaagctaactttagtttgaagcatcaccatgtaatgttttatctggtcggagagaatttgtttttgtttatcggggaaattaatttataagaccaactaaaacatcaagctcattcgatctattaatgattgattgatgttaatgtgcttttaaagttgaattaaacacatgataatcatatttttagcgatttaaatataaatcatatgtaaataattaatgagaactaatgataattgttttaaacaatttatagtcttcaacataaatattaactaaaaatgctatttaaaacaactttgtagaaactctacaataaaacaattaattctcttgtttattgtaaggaagaaaaataatagattataactctaaactatataaaattaaaaaaaattagaaaaaactacaaaaattagtattttaattattaaaattcaaaaataatttcaacaaaatatcatgtaataacatgtaaactaggtaaatacttgtctgttgcacggcaatatgccatcacagttgtttgttatagttaatttggctatttcaagctatcatatattaatatattacgtaagatgagtatttgtaaagttttaaatttatggtttattttggaaaattttatcaactgtgtatagataaacgtatacaacattatattataatagaattctatcattacatatattttaatcatcttatatatagttgtttgttacatatagataattgtatattttctatggtacagtataatataatttgtatgtgtgtcaatcttaggtccatgtgccaagaaattgttctatattatgtaaccaggggcggaggcagttatataggaggggggtcaactgacccccatgacatttataaaaaaacttttttaaagtttattcgataaatcatttggcttcaaatctctaatatgacccccatgcgttgagatgaaatctcctctttgcaccctacgtcgtattttttttctctttaattcatttaatgtttttacgatttcattataattacaaattttgtatctgcatctgattcaattaacctggaatttgcatctttttgccaattattgtttcaattttcttataattattttatatatggctttaaattaaaaataatatggcttaagaagcataaattaatcaatatactaaagagatattgagaaaataagttatatatatttcataaaagtttttttcttactattatttttgattagtttcaaaaatagaaaacgatgaaaatgctgaagttacatgtatatcttttacaaaaaaataactatattattttcaaaacaactataattagtggggtttatagcaataatgatatgtttcttagctttcttttattaaaaacatgtaatagcaaaaataatttttaaaaagatcagcaataaaatttattttagttaaataaacactaatattgttatatacttacattaatatatgaccactgtatgtaacggttttgtgtgagatatgattagcgtaattctggttagcaaaatatggtcataactaagttatatgacctgacaaaaaatcagcttggatttgctagaaacagagttcctttcgcataaaaaaatctttttcataaaaccgagttcagagaaaaagcttcaagataagaaagaaactacagcagaaaaaaattctcaaagatatgtaaaacgatagaaccaaaactcttaacaccgctaatattagtcgactttgtgcaatatttagtcgacttcctccatcttgctaccttcagcatcagcatcatcttcaagcggaggcatctcagcatcagcttcaacggcatcatcctcttcaatgctcaatccaagcttcaacatcctgtggattctgcttccaaaagtgttgggctcatcaaggctgaaaccagaggtgagaagagcggtctcaaagagaagaagcacaagatccttcacagacttatcgttcttgtccgcttcagctctctttctcagctcatccatgatcgagttctctgggttaatttccattgtcttcttgcttgacatgtaaccacccgtgttgctatccttcaaagcttgagctttcatgatcctctccatgtttgcagtccagccatactcgcctgttactagacagcaaggtgagtccaccacacggtcagagacgataaccttctcgaccttgtctcccaaaacgtccttaatcactttgcagagtccctcaaacttctccttgagctcttctttcttcttcttctcgtcatcagtctcttccagcttcagaccttccttggttgcagagacaagcttctttccctcgaattccttgagctgaccaatagcatactcatcaatagcgtcaaccatgtagaggacttcgtaacccttcttcttgagcttctctaggaagggagagttctccacggcctttttgctctcaccggtgatgtagaagatctcgttctgaccttccttcatccttgtcacgtagtccttgagactggtcaattcatcaccgctcttggttgagtggtaacggagcaactcagcaatcttggttctgttttgggagtcctcgtggatgccgagcttcaggtttttagagaaagcctcatagaacttgttgtagtcctccttgttctcggcaatctcaaagaagagctcaagacacttcttcacaaggttcttgcggatgaccttgaggatcttgttctgctgcaatgtttctcttgagatgttgagaggaagatcttcagagtcaacgatacccttgacaaacccaaggtaatcagggatgatgtcttcacagttgtccatgatgaagacacgacggacatagagcttgatgttgttgggcttcttcttagtgtcaaagagatcgaaaggagctctcttgggaacaaagaggatagctttgaactcaagctgtccttcaacagagaaatgcttcacagccaaatgctcctcccaatcattgctcaaactcttgtagaaagcagcgtactcctccttgttgatctcctctggcttcctcatccagataggcttctgtttgttcaccaaatcccactcatgagtaacctccttaatcttcttctttttcttctcctccttttctttctcctcatcaatttcctcaaccttgccttcctcatccttcttctcttcctcctcttcatcatcagagatctccttctcaatggtcttctcaatccagagagagattgggtagctgatgaactcagagtgcttcttcaccaaatccttaagccttcgctcctcaatgtactccatctggtcttccttgaggtaaaggatcatctttgttcctctaccaagagcctcaccagaggtgtctctggtcaccgtgaaagatccaccggcctgagactcccacacatactgctcatcgtcgttgtgcttggtagtaacaacaaccttgtcagcaaccaagtaagcagagtagaaaccaacaccaaattgaccaatcatgctaacatcagctccagcagccaatgcctccatgaactccttggtaccagaccttgcaattgttccaaggttgttcaccaaatctgtacaatagaacaaacacgaatcagcaaacacaaatcaaacacatagataatggttttgaatgaaatcaagtacaacttgcttttgaatgaaatcaattacgtaccagccttggtcatcccaataccactatcgataatggtcaaggtgttgttagtcttgtccggaatgatatgaatgaaaagctcaggctgaccatcgagcttgctcttatccgtcaaggactcgaacctaatcttgtccaaagcctgtttcaccagaataaaaagctcaatcataagtaacaaaatacacacaacatatatacaatcaaaaactaagtaatctaacaaatttgaacatgaaaaggttccatcaattaacaaacgaaaatctcaaatcgaaaagaacactaaaccctaataaaacctaaatctacacatagatccgtcaaatcaatcgaaggagatacacaaacacattaagcttaaagataaacatagaaagacagagagggagagatcgtacatcggaggagttactgatgagttcacggaggaagatctccttgttggagtaaaaggtattgatgatgagggaaagcaactggttgatctcagcttggaaagcaaaggtctctgcgtccgccattatcgttgatcgggaaaaaaatctaagaattagggtttatgtgaatcaaaaagcaaattcttaagagaagcagagaagtattgatggtttgattaagggggaaaagtgtgtaatatataggggatgtggaaacagacgtcataatataatggaaattgtaaaatataaaaattgtcataatattttactttccttttttttggaacaagtgctacttactttttttttttttttttttgttaaatttttctattagctaaactaatcaataaaaacaatgtttttctccatatacaaaattcgattttgttatggatttgaatttacaagttcccattcattctagtttatctatgtttagatttttttagatcggtcctagttttgggttattttttgaaatcgataaagttaatcccttagtttcaagatatctcaaaattttatttcaaattttagttatgtatttaatttataacaacaagataaatagttgtgttaaaaaaaaaaaaaaagttttaatcaattctgaagttaaaaaaaaaaaatcaattttttctccccacaaaccccacgctttttagagaatatgtgtttctttttgttattgttttaatttatttattttacaactttcaatattattatttaattattgatttttttgaaactttattaaaagatacacataccaatctgtaaacaggaaaaaaaaagttgtaagcaaaaaataaaattattgctttgtttttaaaatagtaaattatcatcaataaaataaaatagtaaattacaaaattaacaaaaaaggaaactaaaacctgttacaaaaaagtagtaaattacacctgttctgcaaaataaaaagggagtagaattaaatctgactgttttttataaatagtaaattatcatcaaccaataaaataaaatagtaaattacaaaatttaaccaaaaaaaaaaagaagtaaactaaaacctgttacaaaaagtagtaaattacacctgttctccaaaataaaataaaagggaataaaattttaaaaaatttaataaagttttgtatttttctaccaaaaaatagttttgtattttgtaatttccatttaattatattgcagattatgtggacctgaaaagcaaattaacataaatcaaataggaaggatctagaaacccttataggttcccagtccccacaccactatatataataacatccttccccaaagtctcgtatcaatcaacacttctctgctctctaaagaaaattttgctctctttatctctcgatttgattcataaaccctagctcttagattttttttccgatcaacgagaatggcggacgcagaaacctttgctttccaagctgagatcaaccagttgctctccctcatcatcaataccttttactctaacaaggagatcttccttcgtgaactcatcagtaactcttctgatgtacgatctctatctctctacaccttattttatacttgtctgtctcgtttgattgatctggctgttcgatctgtagatttaggattgattagggtttagtgttctagccgattttagaattttggttggtaattgaagttgcgaagctgtttgtgttcaaatctgttgattagttttagtgttgataccaacgattaagcagactcttgttagatttacaaagtttgcttatatgtaatttgtatatacgttctgtgtattggttggttacttacgattgtgattttactctggtgaaaacaggctttggacaagattaggtttgagtccttgacagacaagagcaagctcgatggtcagccagagctcttcattcacatcattcccgacaagactaacaacaccttgacgattatcgatagtggtattgggatgaccaaggctggtacgtaattgatttcagtcaaaagcaatttgtattggttttcgttgattatttatgtgtttggtgtgttggctaatacgtttttgttttatttttcagatctggtgaacaaccttggaacaattgcaagatctggaaccaaagaattcatggaggcgttggctgctggagctgatgttagcatgattggacagtttggtgttggtttctactctgcttacttggttgctgacaaggttgttgttactaccaagcacaatgacgatgagcagtacgtgtgggagtctcaggccggtggatctttcaccgtcaccagagacacctctggtgaggctcttggtagaggaactaagatggtcctttacctcaaggaagaccagatggagtacattgaggagcgaaggcttaaggatttggtgaagaagcactctgagttcatcagctacccaatctctctctggattgagaagaccattgagaaggagatctctgatgatgaagaggaggaagagaagaaggatgaggaaggcaaggttgaggaagttgatgaggagaaagaaaaggaggagaagaaaaagaagaagattaaggaggtttctcatgagtgggatttggtgaacaagcagaaaccgatttggatgaggaagccagaggagatcaacaaggaggagtacgctgctttctacaagagtttgagcaatgactgggaagagcatttggctgtgaagcatttctcagttgaaggacagcttgagttcaaagctatcctctttgttcccaagagagctccttttgatctctttgacactaagaagaagcccaacaacatcaagctctatgtccgtcgtgtcttcatcatggacaactgtgaagacatcattcctgagtaccttgggtttgtcaagggtattgttgactctgaagatcttcctctcaacatctcaagagaaacattgcagcagaacaagatcctcaaggtcatccgcaagaaccttgtgaagaagtgtcttgagctcttctttgagattgctgagaacaaggaggactacaacaagttctatgaggctttctctaagaacctgaagctcggtatccatgaggactcccaaaacagaaccaagattgctgagttgctccgttaccactcaaccaagagcggtgatgaattgaccagtctcaaggactacgtgacaaggatgaaggaaggtcagaacgatatcttctatatcactggtgagagcaagaaggctgttgagaactctccattccttgagaagctcaagaagaagggtattgaagttctctacatggttgacgctatcgatgagtatgctattggtcagctcaaggaattcgaaggaaagaagcttgtctctgcaaccaaggaaggtctgaaactggatgagactgaagacgagaagaagaagaaagaagagctcaaggagaagtttgagggactctgcaaagtgatcaaggacgttttgggagacaaggttgagaaggttatcgtctctgaccgtgttgtggactcaccctgctgtcttgtaacaggcgagtatggctggactgcaaacatggagaggatcatgaaagctcaagccttgagagacagcagcatgggtggctacatgtcgagcaagaagacaatggagattaacccagagaactccatcatggatgagctgagaaagagagctgatgcagacaagaacgacaagtctgtgaaggaccttgtacttcttctctttgagaccgctcttctcacttctggtttcagcctcgatgagcccaacactttcgggagcaggattcacaggatgttgaagcttggattgagcattgatgacgatgatgttgttgaagccgatgctgacatgcctccacttgaagatgatgccgatgctgaaggtagcaagatggaggaagttgactaaattatcacacacagtcgacttaatcattaggggtgttgagacattggttatctttttatcttttttttttatgttttcgtttgaactaatattttggaactattttctggagtttatttcttctatcgcttgttttcgtgaagattttttctctgaattcggtttgatgacaaaggttctcttatgcacaatcttgcaaatccaagcttattttggttatgtagcctataactaagttattagtatgactaatatggctaataaaatacatgaagcagctccaaatcatattgttaagcatctcagacaacacagcttacatattctttacaataataaataatttattgttcgacataatactgttgttactgtttgacttagcgttaattttctgcacaaatgttgttactactttgattaaaaaggataatttgtgtaacaattttttggtcagttttaaaggttattattatttttttaaataacttttacgattagaatatgagtagtgcaacgcaaaataacactgccgtttaagacgacggtcccttgacagaatcttcatcaacgctcgatttgacgtctgccgatttccttagctccgacgtaaaccactgatcgtcggtattcagctatattttgatttctcagctccaaaaattcccaacgaaatggagaaaatggccaaaggatggtttccgatgagcggcactagtagcagcggagatcagcagcagcaaccgctgcaaacaggaggaacgtctctgctagctgattggaattcttacgcagcatcgagagattttgaagaagacaccggaactttaggcttcgatatcgaatccgccgttagatctgccaacgacactgtttccggcacctttaatgtgtaatccatccatctctttctcttaatctttaggggtttaacgattgatcgtgaccgtatctgagaaattaggcgttttcgcctgctattgaggattggattggtgtaaattaaatctggaatctgagaaattgtgattaaccatatagtttaagctttgccagattcgttgatcagatttacaaattctcagggtttgaagctattgttagtgaatgattttgattagtgtcttctctcaatgacttagaattgattaagagtcttaagcatatctttttcttgaagtgttactaactttttgattttgaattttgttgtactcaaatctggattgttaacagtgtttcgaaaggagttagagataacctgcagtctgcaacaagtagtatgccttcaggaaaagctttgatgtatttcggtttacttctagcaagtggtgtattcttcatcttcattgccttcaccatgtttcttccagtcatggtgcttatgccacagaagtttgcaatttgttttacccttggatgtggatttatcatcggatctttcttcgctcttcgtggcccgcaaaatcaactcgctcacatgtcatcggcagaggtaataactaataacaaaaccttgtgttgtgcagcttcttatatctgctgtatttcgtttacatttttctctttggaattttaatttcttgtttgctggcttctccagaggcttccactaactttaggtttcattgccaccatggttggcaccatatatgtctcgatggtgctccatagctacattctctctgtgattttctctgcattacaggtacttaaatttcatcttccttcccgactcttgttggtgtttatatcctctgtttttcatatgttaaaattttcctcttccccatttcacaaatcttacctatgaagttcttttttaccctgcatgtttcatctagtaagctcttgcctcgtcgaaacataatgtgtttagtaaaaaacatgtagactttcttattgctgttttaaaatacaagttgggttagtatgaattatgaagaagccttgaacgccatatctttggttggtctcttggcttgtttttgcaaatgcacttacttgcgacagaaacagctttgatatattattactcacccgttatcgatatggaatatatactttaagaactcactaaatcatatccttcatgtcggtttaaagattagtcacgtatctgcacattctgtaagtatagtaatctcataaaaaacctggtctctgttctctgtgaatccataggttattgcactggcgtactactgtatatcatatttccctggtggatcatcgggaatgaagttcctcagttctactcttacctcctctgtcttccgaatgtttgggagatgagctttcgctttgacctatgcaaagaaaataacttgattctctcgtgtataaagaaagatgaaagatcttcaacagtggttaaatgacaaatctggtaaaatatgttggtccaatggctcaaagacagttttgttataaatttcctatattgatactttctgctaaattggttcaaaacttcaaatcactagccactggatgaggtatggaacttgaagagttgcttggtggatacattctctaatctagggtaagtcgttagcttcaatgtcttactgtgaattattacatcagaattaagaaagttattacacgtatgttttcactgagtttactacactggcaatgtggcatacatctcttactgcaaattgcagacaagtggtcaatcaaatcttttttagttgggcccaaaatgtctgttattggatacgttgggccttaaaatggcccccatcagtcaaaaacatcactgcttggagaaggatctagaaaaacttgcaagttagttcaaacaaaataaaggaaaaagaacgatctagaagaaagaaaaaaaaaggaaaagaaacccttatggaggttcccacaccactctatatataataacatccttctcctaaatcccgcatcagtacttctctctgctctcaagataattttgttctctcaatttcattcttaaaccctagttcttcgattttttccgatctacgacaatggcggacgctgaaacctttgctttccaagctgagatcaaccagttgctttccctcatcatcaataccttttactctaacaaggagatcttcctccgtgaactcatcagtaactcttctgatgtacgatctctatctctctctaccttattgtatacttgtgtatctcgtttgattgatttggcggatggatctgtagatttaggtttggttagggtttagtgttctttccgttgggagaattttggttacttactgaagttgcgaagctttttgtgtacaaatctattgtttaggtttagtgttgataccaaggatttaagtagtttcttgttagattaccaagttttcgattgcttatagttgatttgcatacatattatgtgtattgtttgcttacgattgtgattctattctggtgaaaacaggctttggacaagattagattcgagtccttgacggacaagagcaagctcgatggtcagcctgagctcttcattcacatcattcccgacaagactaacaacaccttgaccattattgatagtggtattggcatgaccaaggctggtacgtaattgatttcatcctaaatcaatttgtttcgattttgttgttgtttgttagtcttgcatctgtgtttgttttgttggctaattcgtgcttcttctattagatttggtcaacaaccttggaacaattgcaagatctggaaccaaggaattcatggaagcactggctgctggagctgatgttagcatgattggtcagtttggtgttggtttctactctgcttacttggttgctgacaaggttgttgttactaccaagcacaatgacgatgagcagtacgtgtgggagtctcaggccgggggatctttcactgtgaccagagacacctctggggagactcttggtagaggaacaaagatggttctttacctcaaggaagaccagttggagtaccttgaggagcgaaggcttaaggatttggtgaagaagcactctgagttcatcagctacccaatctctctctggattgagaagaccattgagaaggagatctctgatgatgaagaggaggaagagaagaaggatgaggaaggcaaggttgaggaagttgatgaggagaaagaaaaggaggagaagaaaaagaagaagattaaggaggtttctcatgagtgggatttggtgaacaagcagaagcctatctggatgaggaagccagaggagatcaacaaggaggagtacgctgctttctacaagagtctcagcaatgattgggaggagcatttggctgtgaagcatttctctgttgaaggacagcttgagttcaaagctatcctctttgttcccaagagagctccttttgatctctttgacactaagaagaagcccaacaacatcaagctctatgtccgtcgtgtcttcatcatggacaactgtgaagacatcatccctgagtacctcggatttgtgaaaggtattgtcgactctgaagatcttcctctcaacatctcgagagagacattgcagcagaacaagatcctcaaggtcatccgcaagaaccttgtgaagaagtgccttgagctcttctttgagattgctgagaacaaggaagactacaacaagttctacgaggctttctctaagaacctgaagctcggtatccatgaggactcccaaaacagaaccaagattgctgagttgctccgttaccactcaaccaagagcggtgatgaattgactagtctcaaggactacgtgacaaggatgaaggaaggtcagaacgatatcttctacatcactggtgagagcaagaaggctgttgagaactctccattccttgagaagctcaagaagaaaggtattgaagttctctacatggttgatgcgattgatgagtacgctattggtcagcttaaggaattcgagggaaagaaacttgtttctgcaaccaaggaaggtctgaaactggatgagaccgaagatgaaaagaagaagaaagaagagctcaaggagaagtttgaaggactctgcaaagtgatcaaagacgttttgggtgacaaggtcgagaaggttattgtttctgaccgtgttgtggactcaccgtgctgtcttgtaaccggcgaatacggctggactgcaaacatggagaggatcatgaaagctcaagccttgagagacagcagcatggctggttacatgtcgagtaagaagacaatggagattaatccagagaactccatcatggatgagttgagaaagcgagctgacgcagacaagaacgacaagtctgtgaaggaccttgtgcttctcctctttgagaccgctcttctcacttctggtttcagccttgatgagccaaacactttcggaagcaggatccacaggatgctgaagcttggactgagcattgatgacgatgatgctgttgaagccgatgctgagatgcctccccttgaagacgatgctgatgccgaaggtagcaagatggaggaagtcgactaatttatcacacaaaagtcgactaaattattagcggtgttataagactatggttttctttttttcttttcgttaaaacttatgttattttggtgattatcttcacgaattttttctatggttttattgttgtgaagatatttctctgaactcggttttatgacaaagattctattatgctcaagagactgattcttacatatccaagctgaattttgtcagggtattagtagtaacctagttatgattatatcttcctaattagaatttagaataacaaattataagaaaatagaataacacagagatcatatcttctggcatacatatcttgctgtgaattatattgcatccgaattagaaaagttgccacagttaaattgaaatgttttcactaaaaaaaaaaaaaactacgctgccaattgccaatctcttgctgcaaagtgcaaacaaatggtcaatcaaatttttagatgggcccaaaatgtccgttgttgaatactttgggccttaaaatcgacccatcagtcaaaaagactcgtcaatattagagactggcttttttgatacaaaagatcacccaataatgcaagattaagcctaaatttattattttgtcccaaaaaaaaaaagccttaatttattaatgtaatcaaaattaattaagggaaaccccacactgcttttgctctcaaaatttgaccgttagtggagacttattatataataccacgaacttggcgttagtgcaagtgaaactctttagtctttagttaaaacttaaaagcaaaggctatgttaggttaagacaacggagcctattgattaacttatgtaatttcttttcaatagtcgtattttcctctcttttttttttcttttttttttggcaccttcctattttcttaccaaattattattgttcagtattttgtatataggagtaaactgagtgattaccatgatttcagctaatatttaacgattatactcacctaatttacagttagctaaactgaactttctaaagcatcatatatacccaagcatgtattcatatttgggaaaattttagactagcaatatactcattcagaattcatataaagttaatttgaggcatttgatgtaaacaattattgatgtactttattttatttttagactttaattagagtttaactaatgtgagcgagaaacccgagtcctggaaatacggaagaatatttgaccctttaatttacacctttcatcacacgtaatatcatccattttatattatgatccacaaacagcaaaggcccattaatctcattatattttagattaattgattgcaattgcccaacttctccactcagcaatgttagttttaaagacacatcaagttagtgtattttatttttaatctttctataaaaaacaacactttgtttttgtctatttcttattctgtgaaaaagagaaatgaaaaagtaaaaaagataacaaaaaggctggtttttcacggtgagaatttttcatggtcacgcaataacttaaatatgaactattaaaataactaagattgaaaaattagcatgatcaaaagaagaagaaaaaaaagacaacatgaagcggaaaggaaaaaaaagaaagctgaaaatctaattaacaagattgcggaaaaggattaaaggacgaagaaaaagagtgaaaggtgaatacatatataaactcatattatatatttccaaaacatatttttttgaccaagagttaaatggtgtgcctcttttaatttttaaaacttaaaagtaacaaagttaactctctagtcagtttagttaagactagggatgttttcatgaaattgagtttcaactgagttatgtgttttcttttaacatatatttctcttattacatcctatatagttctcactttagattgttggttttttatcaagtaagttacaaaagttatagattgctttggtctctacagagaatgttaacaatgaagtacttgcgataactaaaagagagttacataacatcaatgaaatgaagttaaaaagaaagagttttgagtttcgatctaaaaactaggattgagaaatatcatttggttctgaaataattggaggaaaaaaggtgcaacgaaggcgagaggcaatcctttggtagaaggaatgagagcacgtgtggttgttgtcatcacaaaaaaggtcactattatgatttccctcttaaagccatatctcattatcattggccccatctcatttcacatcatatacatacctacaaacacaaaatgtctacttacatacattcatgcatatatatcagtttttgtaaatatacactttcctaaatcaattatacactacaaactatatataatagggttcacacttgatatggagatgtcccaaattagtaataaaaagttttatctaacaatatcatcctatatgtcctcgacgaaagaaatcatcatattcctatgtgcgtgtggattagtttttttcatagttgaaacattccatggctcataatcttcttctgtataatttcactaaatggtacatcacatatatttggattttgtttttcgatttgaaatgtgtatgagctttgattatatattgactatgtgattcgtcgtccacattaatttaagcatgaatctaattattcgccttttctaaatactaatattagaaaatttcctcttttttggattggttggttttccatattatcagcaagtatctaaatggttttcttactacagtgtcttcgtagtcgtatgagtggttacaaccaatggaattttatcaacatggccactcataagacgtagcattatcatgatcaaccataatatatgttatattcattggatcgacaaattaacaaagaaataagtagttttgatcgatgcccacttcttttcacacttctgccactacattcttggactgcttctgctactaaataccccacagtggaccagtttttattattataattgaatttataaaattgatacagacaaatgcttgtatatacttaattagcagaaagaaagaaaaaaaactaagtaaaaaattgcccatcataatcatcgatcagatccacttaattagtaatttataacactcacttagtaatatttatccttagttgcttatatatatatccctagacgtattttctattgctctatcatcatgtggtgagatctctgacctaatcgaaacgtgatatagatccagatcttgttccattgtcgtaatcaagtctacatcttttaatttatcttaattgttatcatcactattaactttcttaaaagtaagaaaaaccatcacacttcattataataaaaaccatcacccttcattgcatacatatgtgaacatgtataatttggaagctgcttagctataacagtcattaattgtcgacgacactaattcaaataacgatagatgcgatagacaaaagaacaatatggaccatttaatgataatcataagatttgagaaagaaatcaaaattttaacaagtttggaaaatacagttgggtacttgtcttttctcttgcatcttttgctgtctctttacttccttcttgtttgttggtttttggcttattgttttcccttttatttttcctctttatggaccatattcatttaactctccccacacatgttcgtctcttattttaattttattttggtatgactctcttatttatttattaaaactaaacaaatactccataagttataaaccaaagaaagaagttatagatcaagggttgacaaaacgttggagcttagtccaaatgatgaaatgcctcacacgaaatatgtacatacgtcgaattcaaagcgttagcaaaacttttggtcttaaagttgaggtcatttgtaccacggtgcgcctgagaatgatttagacacactagtactgtttatgcaaatgatttagtatgtacatttcatgtaaatgtggtagaccccaagagatattcgtatttttgtgagaaagaaactttgttacttgcttaccattaatgtaactctttaaaatgaaagaatatctgttgtctctaacttacaacaaaagttacatattacgaaacatattacatcaatatatgattaacatcaccagtttttaagtgaaatttacggtaattagagtacacactattccataattaaatacctgcagaataaaaccatgttgtcgaaatgctttctctcactttactatgtgtatagatatgcacatgcataaccatctctctacatatctattgatacatatttaatcttttgattctactatggcatgtgacttgaggtgtggtgttatatctttatatataatcttcttgacctaatgatgcttgacccatgatcttaattttagtttactttatcttttccataatctttttgttttgtccagttcctcctttttaatttttctaatcagtattctaaatttccagtccaagaaattggatctaaaacaccttcatcttaattcaatatatgtatgagcaagtgtatatatgtatatggatattaattagtattagcatacgtatgatataaacagataattacagcgaatgaaatggaccgacaatgctagcagagatgagcattagtaaatttaattaatctttcacataaattcctagctttcatgtgcatttcacactcttcaagattccatgtttcaactactaatttaataatttatatatcagaaatccaaagtagatatctccatctttctttcagttatttactaatctcatttttaccactatatagccacttcagactctcccaaagtaaacaaaaaaaaaaacaaataatcacaatccaaattatctaaatgtttctttcgaagcattagaaaaccccaattatgttatgcgtcgtttatcaataataggtagtagtagtactactagtagtagcattcaacaaatatcattattagtaactagaagtctagaagtcattattgatctgagtaaacgttatcttccttttgtttcttaaaagataacaatccagaaataacaaataatagggccaattctaacatgtcattttctgaatttgataacctaattttcttagatgatttatgactatgtaatagttagatctataggagttttttttttttaccatttatgaataatattatcagcatgcctcatctagaagcatttaccacagataaatccacttacaagaaaaggaataaatataatttaccactcttttcatctatatttttatttaattttcaacttatataattctgttttgttcacaaacaaataatggtgaaaaaataaagtgacattgtttggaaaataataataaagggaaaaaggtagaggtgctttttgggatccagatcttcctttactacttcttcttctctctctctcctttggtttgctctgtttttatatatttctataaaatcaaagtaaaaaccaaatccatggggttcttcgcttcacaatcccaacgcacctctctctctatctctcacttcttcttcttcctctccctcttcaccaatgccacgtaaccctagattctgcttcttcctcttccttctttttcactcctctcttttcttctccatcccctgtttttccatagacgaacagggtctagctctcctctcatggaaatctcagttgaacatctccggagacgctttatcttcttggaaagcctccgaatcgaatccttgtcaatgggtgggaatcaaatgcaacgaaagaggtcaagtctcggagatacaactccaagtcatggattttcaaggtccgttaccggcgacgaatctccgacagataaagtctctgactttgctcagcttaacctccgtgaatctcactggttcaatccctaaggagcttggagacttgtcggagctagaagttcttgatttagctgataattctctctctggtgaaatccctgtggatatcttcaagctcaagaaactaaagattctgtctctcaacacaaataatctcgaaggtgtgattccatcggagttagggaatctcgttaacctcatcgagctcactctcttcgacaataaactcgccggagagattcctagaaccatcggagaactcaagaatctagaaatcttccgtgcaggtggtaacaagaatctcagaggagagcttccttgggagattggtaactgcgagagtcttgtgactttaggtctcgccgaaacaagtctctccggtagacttccggcgtcgatcggaaacctgaaaaaggttcagacaatagctctttacacgtcactcttgtctggtccaatccctgatgagattggaaactgcacagagcttcaaaacctctacttgtaccaaaactcaatctctggatcgattcctgtatcaatgggacgtctcaagaagcttcaaagtcttctcttatggcaaaacaatctcgtcggaaagatccctaccgagctaggcacctgtccggagcttttcctcgtcgatttatcggaaaatctcctcaccggaaacatcccaagaagcttcggaaaccttccaaatctccaagagcttcagctaagtgttaaccagctctccggtacaatccctgaagaactcgcgaattgcacgaagttgacgcatttagagatcgataacaaccaaatctccggcgagattccgccgttgatcgggaaattaacaagcttgacgatgttctttgcgtggcagaatcagttaaccggaataattccagagtctctttctcaatgtcaagagcttcaagcgattgatctctcctacaacaatctctctggttcgatacctaatggaatctttgagattcgaaacctcacgaagcttcttcttctctctaactacttatctggattcataccaccggatattggaaactgcacgaatctttaccggttaagactcaacggtaacagactcgcggggaatattccggcggagattgggaatctgaaaaatctcaacttcatcgatataagtgagaatcgtctcatcggaaacattcctccggagatctccggttgtacaagtctcgaattcgtcgatctacattcaaacggtttaaccggtggtttacccggtacacttccgaagagcttacaattcattgatttatccgataattcattaaccggttctctaccaaccggaatcggatcgttaaccgaactcacgaagctcaatctcgcgaagaatcgtttctccggcgaaatccctcgagagatatcttcctgtcggagtcttcagcttctcaacctcggcgacaatggcttcaccggagaaatccctaacgagttaggacggatcccgtctcttgcgatctctctaaatctcagctgcaatcacttcaccggagagatcccgtcgagattctctagcctcactaatctcggaaccctcgatgtctctcacaacaaactcgccggaaacctaaacgtcttagctgatctacagaacctcgtctcactcaacatctccttcaacgaattctcaggcgagttaccaaatactctgtttttcaggaaacttccactctctgttcttgaatcaaacaaagggctatttatttcgacccgacccgagaatgggatccaaacccgacaccgttcggctgtcaaagtaaccatgtcgatcctcgtagcagcaagcgtcgttcttgttctcatggcggtttacactctcgtcaaagctcaacgaatcaccggaaaacaagaggagttagattcttgggaagtgactctttatcagaaactcgatttctccatcgacgacatcgtcaagaacttaacttcagctaacgtgatcggaactggaagctccggtgtagtttacagagtcacaatcccgtccggtgaaactttagctgtgaagaaaatgtggtcaaaggaagaaaacagagcgtttaactcagagatcaacactcttggatcgattcgacataggaacataatccgtcttttgggttggtgttcgaatcggaatctgaagcttttgttctatgattatcttcctaacggaagtttaagctctctgcttcacggtgccggtaaaggaagtggaggagctgattgggaagcacgttacgacgtcgttttaggcgttgcacatgcactagcttatcttcatcatgattgtcttcctccgattctacacggtgacgttaaagctatgaatgtcttattgggttcccgcttcgaatcttacttagccgatttcggtttagcaaaaatcgtctccggtgagggagttaccgatggagattcgtctaaattgagtaaccggcctccgttagccggttcttatggttacatggctccaggtaaaattcaaaatttcgattttaacgttataaacttatcaatttcgaaatattaactttataacggattttatttgttttgttacagaacatgcttcgatgcaacatataacagaaaagagtgatgtgtatagctatggagtggtgctactagaagttttaaccgggaagcatccattggacccggatctacccggaggtgctcatttggttcaatgggtgagagatcatttagccggaaagaaagatcctagagaaattcttgacccgagactccgcgggcgggcagatcctataatgcatgagatgctacaaactctagcggtctcgttcctttgtgtgagcaacaaggcatccgatcggcctatgatgaaagacattgtggcaatgcttaaagagattaggcagtttgatatggatagatcggaatccgatatgataaaaggcggaaaatgcgaaaaatggcagccgcaaccgttaccaccggagaaaattgtcagtactcctcgaggttcatctaattgttcgtttgcttactcggatgaatccgtataaaaaattttacaggagttcgattagggtgatgacatttataaaatgtgtgtgtgaatatttatttgttgtcgatgatttgttagaatcagggaaagaaagatctaagcttagcttattgttttggtttgtgagttttaattttattttttcttgcaaacgagttgaagaaagaatgtattgtaaaataatttcaatagcttgaagtggtttattttattattttttattttcaaaataataatataaacataaataattggagatattggttaactttgctaaaccgaaaattcatagatccaagaattatccatgttcaatagtccattttgtctgaacattgcagaaactaaattttgaggaagagaaagattagtttgaacattgatccacaattctattatatcaaaaaatagaacatgatgagttactatttataaaatttttgaaggtatttgcttttgtaatttttgaagaatttaagatacaaatactggatgagaaaggccgggagtgtttggagttacatacagaagaaagattcgttcttctttattaaaatttttattcaattatcaaattatataatctttggatgtttgctaattttgtgaaatttataagagaggctttcgacgtgggatcacgtggacccacgcgccacccatcacatgatcatgtgttgtctgaataacaatgactttccagccaacaatcaccaatttttatcatctaaatacaataaataatatttttggttatataatataagattgaagatgactcgaggctcacataacctttttaagctatcaaaaaaaaaaaaaaaactttgtgtgcacacaataataagattgcacatgccttaaccaaatgtaagaacgacagttttcagttttgtgggtgttgcttctctttgttgtgtatatgtttgtctatttaatctcttaagttcaagaggttttgatagtgacttccaaaagtttttttaaattagtcctgatttttgagttgccatcacagtttaaatgtagttagtttagttgtatagcaagagaaaaattatcttaacaaattcgtatcccgaacaatatattagttctcgtgtagatgagtagatccattactcgtgatattaatgattatttttcgtatttttgaaacaaactattgacaaaataatacgaaatcagctaaaggaaaaaaatatgtgaaaaaggttattgaagtctcgcaacagacagaagcaacaaaaagctaatgatgattatgcggaatgtacgggagtccacttcatgtgttcgattcgatgtattgttgtgagctaacattacatcatctcatgattttcattttcaagtcttgtgcccatgcatcatccatgcaagagtttctcctagagatatttaaccgggtatgagatccggatacatacatataatgggtttcaaattcgcgggcctaacgggcctgttgtgtttcaaatgagtccgtttaaatatgtacaagaagatttctatcgtatcgagttaaatgacaaaattaaaatacgactgagtaaaccaattcggagaaccgtaattggtttaaccaaagtgttgttttgttaaccaatttctcaatataacgtttaacattgagggatgcgtttctcaggtgttggattagggttttttctagatgaggaacgtaatgctgagtacgaatctgatcttctagttctaggatttcttaatttgcggcagactgtgaccccatttcgaaacaatgggttccttaagatggtaaaaaatgatgcatcagaaggccttgatgcttgccgtggaagctaaagtgaataaaacagaactaggtctatgcagaactaattcttgttcacccttaattaggattgtcatgttttcttctcaaaagcctaaactaggtcttgttcctttctcattcgtctagttagtactttttttagtaggctactgcaagcaagttgatatgatggaatgcagataaaagttagaattgattactaatttcttgctgacacaagtattaaaattgtgaaagagtctgtgttgtcgatcgttgtttcagtctctaccactagacatttgatgtttctcaaaccccaaattgttaggtcccttttcttttgcttttgtctaaagattttgctgagaatttgggcttcgtatacaatctcaactttacatgcttttcctggctaagctagttagccagtcaatctcttgcttaacttttctctgccacttgcaattgacacttttgtagctaattcctgaagtttcctagaaaaaaagtattcatgaagttaagactataaattttaaaaagaactccatgttggcttgtgttaggagatgaatctgcttccttttgttcttttgatttctttcaaccaaaaaagaaccaacatagcaatctactgtcagatcctttttcttttagattgtatcttgtggatcaaatatggatcggatcagatttagtaatcttgaagcaaacatgaataagtgataagaacatgtggccgtataagaattatctctttgactcatttaattacaccaaccttactagatatgtcttaacaatatacaacaaaaatcttatcttggctcttgcatagagtctgttgaatcttgattcgtttttttacatcttgtgagtgggcaaaagaaagatctatgcttgaagaacacaagggtaaagatagagactttgaagatgaactctgttcttcaccatctttttgtagtgcagttccgataaactaagccaccggctggtggactgctcaattgaagctgacaaatcccgtgtagcatataagaataatgaatcatcccaaaaatagctttgactctgaagttacttctgatttcataagctatcctattgctcgtcacttgtcttctgagctcaagtatatgatttacaggcaagaagaccaaatttgaaatcaaacggatcggttctagcctagtcttgccgtttctttgcgaaaacggcaagacaccttgtgtggcgatctttgtgtcggcaaaccagagctctaccataagattctcaaacctcacatttagtttcttgttaggattggtgaaatttaactgcaacaacatatcaccgttgaaataaaccggtgactcaaagaggatggtgttgagctttgcattagagatgtcaaaaacaggggttcttggtttgacggcgagatagagaatcaaagtagcaatcccaaagactataagaagtatgctgaagataaaacacaaagctgcaccacaccaaatccatggattggtccggcttgttcttagctgtaagagaaccatcgtctcgtgtaaaggatgcgcttccatactgtctagtttaggagttgcagggctcttctgattagacaaaggtgatttagacacaatcacttcggtaagagctattggtgtagtcgttggagttgattgtgtgcttcttggagttgttctccatggcgtgtatattggagaataccatttagaagacggcgtttcccatggtggtgtttcgggcggctgtggttgagattgtggcggtggagaaaattttgacatgggttcttatgtcttgataattgaagaggaagaaggaaactcttgaagtttctgtcttttgagtatcttggtggtgtgagaactgatgtttgtacaatgaaaggaaattttggaaatgtgttatggtgtttggttaaatagataaagtaaagtttattacctttgaaaaagagattgtgagtgggaaaactaaaaggagggagcgccttttgcttaatgggatgggttttgttttgtagagttggatttatgtagaaaattacatgttcatttttctcctaatacaacaaaagaaaaataaaaactatttgattgaagagaattcacgcatttttatttacattttcatttaaaaagaatattcaaaagagtcggtctacttctttttcattataaaaattggtgtatgttctgcgtacaatggttgatctacaatttttttgaccagggtcattatatatatatatttaattaaaattatctatatgttttaaaattttcaatctctaaactatattattacatttttgaaaaaacatattactatattttgctatggttttgctttttttttttctttttttataaatattatcttctaaattaaatgtttgtcaaaaaatttcacgtttccaataaatatataaatagtataaaaagttgtaggtttcaatgctatagatatgatagtaaaacataattagaaaacggtttggaaatagatttataattataatatttttttaactacggtcctgtgaccctaatcttcaacatagttccgcccttgcctgtacattttaattattttttttggtaaataaagcaatagtgtggagaaatacacatacggaaattaacgacacagccttagacaaataaataatttgagatacgtaactagaatacaagtgcttatttcgttgcttttgagttccggtaggtttttgaatcaacatttttctattcttcatctttctttttggtaatgtgtgtgagactttgtgtcgttaggtgtggctccctaaacacttcatcactaaggaaagacttttctcaataaagtgcatgttgtagtctttttttttgtccttccaacaatgatttcatgtttctctcgtttcttaaaataggagatttgctctctttaagaaatttgagatcaaatgatttgataaaacttattgatttgtctagaagatttactgtagtccactagtttgtagaggttgcaattaacagcagtttatttattattatttcatttatatgatttttatcttgaaaaacgtacatttgattgtatacgatttgaatagtcgcctaaagtttgcttatagaaagacgttttacatattaaatacgtggtatacactttactttggtgatttggcttttacgttcacaatcttgatctaataaaaacaatttcaaaaactaccaatgagattctaaattttcaatataccaaagatttaccaattctttctatattcttaataacctccatcctcgaaagtccaaatccaagcttatggtatttttgggatatttaatggttaatagtatcttagattgtttttttaaaataatagtattttttagaaaactcatatagtaaccatacactgcaaatatataccacggattatatattagtggtaactagatatcttggtcaaattaaaaggttttatatattcaagccaaaaaagcagagaattattgatcaatttaaaatggtaaataaacgggtaagcagacatttaacaccacagtaattggcatggtgtttatgtaactcagttagcgaatttaaatgtaagaagtttggctcttttcttcataatggtgcgttaacagaatacgaaaatactcttcaaagtacataaataatcatagattcccaagagaaattttgttctgactcatgcatcctttagatatataaaggacacggcgtggtattgaaaatcattacatgataaaatggagtttatgggtactataaacttgcaacaatatagcaacaagcaaaaaatacttttggtcggagaaggagacttttcgttttctttgtctctagccagagtttttggttctgccacaaacatcactgcgacctctcttgacactcgaggtagaaatatttctaacaccacaattcatcttacatatttggttatttttatcatcttctgataatacatctaaaacaccgaacataagatatgaaagttaatttggtgattattgttataagctaatgatgaatgttgtagaggagctagggattaagtacactgatggaaaagcaaatgtggaagggttggagttgtttgggtgcacagtggtccacggtgttaacgtccactccatgtcctcagactatcgcttaggtcgatacgatagaatcatctttaattttccccattcaggattaggttttggttcagagcacgacatcttcttcattatgtaagtttcttttgtatttcttctctttttgtttattcttgttgattttcaacatatgcgttttcgtgtacaatttacaggttacaccaaggactcgtcagaggatttctggagagtgcaagaaagatgctgaaagatgaagatggagagattcatgtgacacataagacaacagacccatttaacaggtgggggattgagactctagctggagaaaagggtttgcgtctaatcggggagatcgaatttcacaaatgggcatttccaggttactccaacaagaaaggaggtggaagtaactgtaactctacctttctgttaagaaggatactttccttactagattatcatgtatattctagtgtatattcctttagaatatacatgataatctagtaaggaaagtatccttcttaacactttcctatcgtaaaagcttctactttcatgtttaagatatagtgttcgttgattaatttatcaagaattctataatagtgtaatgaaagagattaattgttggctattttcctaaataaacagactttaacaacgatgattacctttgatcaaaataaaataaaagtcaatttttgttagcacgagaccagtaaagagacaagtatccaaaaatgatgtataatgcaatataagacttttctctgttaccaattcttattgcatgacatataatttctctgttaagatttaatacttgttgcatgacatacaattttgtaatcaacaattaattttatactgttccgctaattagcctcagatcagctaaaaaatgtctgtcatcggttctaacctaccttaccgtttctttgtgaaaatggcaagacaccttgtgtggcgatcatttcgttggcaaaccagagctctacggaaagtttcccaaacctcacacctagtttcttgtttgacttggtgaaattcaactgcaacaacatgtcaccatcatcgaaataaaccgatgaaccgaagagaatggtattgagctttgcattagagatgtcaaaaacagggcttcttggactgacgacaagaaagataatcaaagtcgcaatcccaaataagagagaattaacaattgtctcgtgtaaaggatgtgcttcaataccgtctagcgtaggcgttgcatgaatcttctaattagataaatgtgattaggacataatcacttcgataagagctattggcatgttgtggcgtatctagaaaaacgtttaaccaggtttttatatttatatttttaaaaaatttataatctctaaactacttggtattacattaaaaaaaatcattactatgttttgcttatgttttgcttatgttttgcttatgttcattttcccaaaataaatttaattagtaattataggtttcaagtttatagatatgttagtaaaaagaattatccaactagggaattgaaaataaaaactcgggtctagaataaagcttttagttcgtttcctcttaagagtgtatatgaagaatattgaatgcttttcgaattacataaacacccacaaagttcgaagagtcaaatgaatatagctagtaaaagaaaaccaaacatttaagtctgctttgacccatacaaccataaatacacaagtatatcgctgtgtatgatttccctcgtaaagccatatttcattatcattgtccccatcttatttcacttcatacatatctacaaacacaaaaatgtctacttacacacatttcggcatatatatcacgttttgtatatacatactttaaataatataccaccccaacttttatgaattggaaagggaacataatcaaaaattttaccaaaccagagtttctaaagtataaacatttttttggtaaaaataaaactaaatagaagccatactttaaagaaatgaagagtggcaattgatttaacatgatacaatttttattttttttgataaaacatgttacaacgatgaaatagattaagatgtcaaagtttatggtgacaaaatattttttaaaaagagggtaaataagtttaagatgaatgtacgagatcaaaaggttatcagagtatgaacttgtatctatgaaacaacttaacttaataaaatacatatcaaattcaaaaagagacattgacaaataatatatcatcgatgtaacacatcaacaaccactaccacaataccaaaaaccctgctaattctaataagcaatctttgttactcgagaaagtgatatatacatatatacaatgaaaaccactctacgtaattaattttttgccataacaatataaaaagattgttgcatacgtttctatcagtttttatttcacatttaatcatatatgaagaacggtaattatacaaatagagaaatcatatttagatagataggagaaagctaaatagataaggactataaagtatatacatcatataatctaactattattacaagttatatctcaatatcaatatgttcttcaccatcgtttgatagtgcagttccgaaacagtaaaccatcggctggcggactggtcaactgaagctgataactcccttttagccaatatgaatagtaaataaacccaagaaccactttcactttgaatttacataataacttaataaaagaaaaaaaaaaaaactatgatagaaaaattagcatattcttccattagtttcgcaaatgcgccgacaacgtttttgacttcaaaaacaaaagtagaactcgtgtgtgaaaagcaagattctttcctttctggtataatgttctaatttgtaattaaaatatcgaatattgcttctgaaaggatcatatgtataaatctgacccaaaaaaaaaagctatatttcttagaacatgtttcatgcatgaacgtaaaaagaaaaaaaaaatagacaacatgaatattacggaagggaataaaaagctgaacatataatgaacaagatatagaaaggatttattaaaggacgaagaaaaggagtgaaaattatggattcatttggtgtcaacagataatgtataaagtagagtacttgagtatgttaaaaaaagactaccagagttaaatgacatcataaatgaaactaaaaacagtttgagtttcaatccaaaaatagagtacttgagacttgagaggtagttgaaaaagagttaattaacatcaatgaaatgaagttataaacaagtttgagtttcgatctaaaaactaggatttggaactaaaatttgcctctgaaattattggagtaaaacggtgcaacgacggcgagtggcagatcctttggtagaatagaaggaatgaccacgtgtggttggttgttgtcatcactattatgatttccctcgtaaagccatatttcattatcattgtccccatcttatttcacttcatacatacctagaaacacaaaaatgtctacttacacacatttcagcatatatatcacattttgtatatacataatttaaataataaaccactccaacttttatgaattggaaagggaacataatcaaaaattataccaaaccagagtttctaaaggataaacattttgtggtaaagataaaactaaatagaagtcatactttaaagaaatggagaatagcaattgatttaacatgatacaatctttttttttgaaaaaacatgttacaacgatgaaatagataaagatgtcaaagtttatgctgacaaaatcttttttaaaaagagggtaaaataagtttaacatgaaggtatgagatcaaaaggttatgagtaaaattttctttctatgaaacagcttaacttaataaaatacatatcaaattaaaaaaaaaaagacattgacatatatatcatcgatgtaacacatcaaccaccatctttcttgagagttttcttgttcgtgtgaggagaactaagatgtgttttgaatggaaggaacgaagatgtgagttttaaacacaatcacaatgttttactatggttttgcttatgttttgctatggttttacgtatgttttctttatatttttaatattatcttttaaatatagttcttccaaaaatttcactttcccaaaatatatttaattagtataagaatttatagtttcaattttatagtacatgcccgcctattttatagtatatttaactgtgactttgattatctatcatgtcgtcagtccaagaagccatgttatctaagtttctaacgcaaagcttaacagcttcctcttcggttcacctgaaccgtcaatttcgacggcgatatgttgttgcagttaaacttcaccaacccgaacaagaaaatcagtgtgatgtttgagaaagtttcggtaaaaatattgtttaccgacgaaatgattgccacacaaggtatcttgccgttttcgctaagaaacaacacgactaggctacaaacgatccatttggttgcaaagccgatcttcttgcctataaatgatatggttgagctcagaagacaagtgacgagcaacatgattgaatatgaaatcataagtagattcagagtaaaagttgttattgggtatattaactattcgtattggttaaaagggagttgtcaacttcagttgaccagtccgccagccgatgacttactgtctcggaagtatacactacagaaatatgatgaagaatgtatgatgggtgatatatatataaatattgatatataactcataatactatttagattatgatgtatatctaattagctttcctctatctatccaaatatgatttctcttcttataaaattattgttcttcatatatgattaaatgtgaaattatcacataaactgatagaatcgtacgcaacaatctttttatattgttatggcaaaaaactaagttttgcatatgttttgctttcgtttctaatattatttttaaatctaatttttccaaaaagttcactctcccaaaatatatatataagtagtttaaaaattgtaggtttcaattttagagatatgttagtaatttttttattaaactagagaattgaaaaataaaaactctcgtatataaaccgttacagacacaccgcacgtcacttgagtgtaactccatttatataaaccgttacagacagaaagtatgaaaaaataatatagagaaagaagaagcataaaagtaatttttctgaaaaaatgaaatgaaacaaaaaagagagagaaaattaaaaagtctatttttctgttaaaaactcacttcttaagtgtatgaacagaatacttaatatatacctttcgaattacataaatgcccacaaagttcgaagagtcaaactacttgtaaacaaacaaaaccaaacatttaatacctctttgacccatgcatccataaatacatatgtataccagtttatatgcaggtatacatggtgtgagatgcaaacgaatgttcaggaaactaaaaggttaagacattacactaacaaacaaaaaattcttttggtcggagaaggagacttctccttttctctgtctctagctagagcctttggttctgcatctaacctcaccgcaacctctctcgatactcaaggtaataaaaaatcttagagatatatcattactgtttgatctatttgtatatctatataaaatagagtacattttcttgcaatattttaaaatttgcatcgaaaaaaaaacaaacaacaacgaatgttgtaggggagctagagcagaagtttaagaatgggaaggcgaatgtagaagagctggaaagactcgggtgcagcgtggtctatggagttaacgtgcactccatgatcacaaaacctagcgttggtggttctgcgatatatgacagagtcatcttcaattttcctacgcatggttcgactatggtcgtgagcacgaaatcaaaaccatcatgtatgattttaaattatatacacaacttgtctccccctatgcacataatttaaaacaatactttttcggcttgtttcatccacgtacgctatgtgattttaggagacatcaagagcttgtacgagggtttatgaagagtgcaagagtgttggtgaaagatgaagacaagggaggagagattcatgtgattcataagacagaatatccatttagcgagtggaagctcaagactttgggtgagaaagaaggtttagatttgatccgtgaggtcgagttttgcttaagtcattatcctggttatttcaacaagagaggaagtggaggttatagtgactctagcttccctgttgggaaatcttctactttcatgtttacgaaacagttcttttattaacttgtatttacttatcacttttgcccagataaaacttatcactatgatgataataattatagtgtttgatttagtcatttgtattaatttttctttaccaagagatttcagctacagtttttcttctttgaattcagacctcataacataatagttaggtaagattgaaaattcaatttacaacttacaacatacatcatgaaatcctaattatgaatgaaactcgactatatattcgtatttttaaggatttgtgaatacaatgtgtttgtttagtgatgataattacaaaaataacaacacaaaaaatattttacagacaccacaaatatcagtcacaaacaaaaccttcatgatttatcatttatcaatatatgaggattctcaagtttaatattgatcataataaaaagaacatacaacaaggttacatatcttcacacatatgaaaatcaaagaactcacaaaaaacacaaacttattatacttaacaaacataccacacggatcacaacacataggcataaaattgaaaagggcaaaacataaacacataatcttaagaaaagagatgtgttacatagttacttgtttactcgatggcactatactcctcgatcaaattcttctccataccacgattgttcaagatcgcgtggaccttagagcaattacaaggcataaccacacaccgtccgatctggctgcctcgagctccatttgaaccaccaagcttacgtgcgatgaccaccgaattaaccacgtcgtcagacggatgataaatggttaacacctcaaaccctttaagatcacaagagtcaacgattggatacaagaaagctctaagaccatgagcacttcttagcatcaccacagctccaggagccatatgcttctctaaatgctcaatagctttgacctttgactctttatccatcccaacaagagctgccaagaaaacaacatcgtattggtctaacccctccttagcgtttaatacatcagttgtgtggaaaatcatgcgtttggaaaggtcagaatcacgagaaacgaggtttgaagcgagtgtgttggcgtgtgagtcgatgtcgaagttgtggaacgttgtgttggggaggtggaacttggccaagacgatggaagtaagtggcatcggaccggaaccaataaaggcgactttggtcgggacatgggttgtgtgttgagataggagatcgaattcgagtttgcctagtttgagatagttgttgtaataggggaagatgtgtaaatggtttagagggttgtcttcaaaagagcctaagattgctgaaaagtgttgctctaaataaccttcggcttcaccacaaagcttgatgagatgagatctcatgtctttgactttttcatcgtgtatctctgtgacatcgatgttcgtgtccgttggtaagcacgtggacacaagttgtctgaacaaagtgtcgacattcttggatggttttaagctctcgaggtttgagatttggttgtataagtccatgatttgcttcacaacgaggttgttttcgcaagccatgtcgacactatgaagagagaatattgagttttgaaattgttttcaatacttggaaaaaagcttgtgttgttgtgttgccttaaccctcgcaaggggtcgttatttattgacgcatgtggggtccattcttggctaaattttgttattttatttatttgattcgattcatataggttacaaatatttcctctaggtcattttaatgtatgttttagaactattgtttttttgtttcaaaacgtttcgtttccaaataagtcctcacaaattttataactgacctttatcattactatcctcaaaatagtaaaaataccatgtacaacttaaaaaatgtaaaaagaggacaatactgttacctattttcacattgcttaggaatgagagtaattaatggctgatcaagttactttagtcacaaattggcggggaacaagacaaactagtaacttatagaatcatatacactcttcaactaaaaatcgcgatatgttccatttatggattttattgggtttggtttcatgacgaatgaatttaccaaaataataagagtttaacacacattagaattggcttcttttgttacacataatagttttagacacatattttgtaaatcagtaaatggtaaatgccaacatgcaacgcaaacatttttttcttttcattttgtttatcgtgttttcatttacaaatttttaggtctattaattatagttataaggtaacggaaatgaacattttaactatattttcatgaagaaaaacgaaaaggtaaccaaaactcaaaaaattaagagtaatttttctccacaaattcacattaaatattagcgttactcgtcgagtgtaaatattccattagtgatgtgtgcgtatgcgtatgcttatgcttgtcattacgtaatctcactgttatgcatgaatggaatctaaaggaaaatactacgatttagtcattatacgtgtagtcgtgaataattgttaattgtatcaatcatacgagataacgtatagttagagttggtaatttaggcatgtctcataacatttttaagtcgccacgaaaatgcatcatattttttttttttttttaatgtaaaagaaataaagatgaagtaggtgatgatagcccgaaaaaataatgttctatctgaattttatattatatactgttgaattctaaacagtcatcaaacttaaaaatcttagattccattcactactcatcacatgctaatgctttgttgggaataaatctcagtcctttggggtcactcatccaattcagacatgtttttgtttttgttttttgaagaatattgttagacacgtaaattaattgaactcgctataatatccgaatcaaagtttgtattctaaacatgttttttagaactgaataattctgaattacatataaaaaggaaaaaataaatctgttttattaaagcaccaaactgaattaaaacatactactatataggttttgcaatagactgatgttacacatacattaatttatatcaataatgcctcttgcatgaaatgaatggccaattttacgtagctctcatcatacgttaaacgatcctataaaagaaagaagcggttctgttttcagatttgaatattaaccgtactttactaagatttatattcttgtcaaaatgcatctattaattatctatagtagatatggtaatgctataccctttaaattaagtgcgtatacatcatggtcatgttgagtttgagtgcgacgatccacgtagtcatatactcatatggtatcaaaatttctggagatttagtatggtaatcgaaaactcaaaaccctttatgatttttttgttaaaacttaaaacaaaacctttaataataaataaaatttgataggtatttagatatgtacttgcatattatgtcggacttttaaaataaaagtttagatcgtttgaacatccaaaaatcattaagtaagtcagataaaaaaaaaaaaaattattttttttatcataaaaaattaaaggaaaaaaaaaattaattgtttttttgctattgatgtatgttgtttcctgttttcgttcaacacatcgtgtcgtttttatacccggacattgttagtgtctaccatatagccaccacagcaaaacccgaacccggaaatattcgggtcgggtcgaagttgcagaatgagatttgatttgccatactttttgtcgcctgaacgcaaaaaccttgcttaaaccctagagagatagagatgtttcgggcggttggatcggctctgaagaggaacaaagaagcgtttaatggaattgctcgaggattcaccacttcgtctcatcgagttttcacttctaacattacagctgcttctgtaacctctgcttcgtcttctcctttagctggaaactccttctatggcttgcgatctctgctcaaggtagtgtgaataatttcccaaaaaggttgatactttttcgttaaaggttgagacttttgatcagggttatgttaaacttgagatttttggttacttttagaggatcctgagattgggctctgatcaggattatgttttgtgtagggtcaaaatgcttcaatgtttaggaggatgtcaactgtagcgtcgataagctcagagagtaaagagggtttgaagcttcttgtcactggaggacctcaagctcagaaatgggttggaatttggctttttggttcggctgcttgggttttcagcatggttgtacttggcggtgtaacccgattaactcgatctggtttatcgatgactgattggaaatttactggtgaattccctcctctgtcagatgaagcttgggctaaggagtttgagaaatataagcagtcacctgaatataagcggttagtgtttcgattttggtagctaaagctgttgcttgcatttgcgttttctgtatttggacgaagtcttgatcttgaaaatgctgtttgtgttttgggatttggtgttttgtagtgtgaacaaagggatgaaccttgaagattttaagttcatatattggatggagtatgctcatcgaatgtggggaagaggattgggaatcatgtttgctttgccgttttcttattttctgcgtaaagggtatattactctacgtcttggagttcagctctctggtttatttgcgcttggtgctggacaaggtttcattggttggtggatggttaaaagtggtttagaggtaagcattaggaagtgtggtagatcctcttattagatgttgttatgtgctgaatattgtgtaaccaaccagtaatcagtttggtcttgtaggagccaccgtctgagtattctcaaccgagggtaagcccataccgtcttgcagctcacctgacctcagcttttgccatttattgtggacttttctggaccgctctctctgttgttatgcctgaaccaccagctgagtcactggcttgggttcgcggagcagctaaagtgaagaagcttgcattaccagtaagcttgattgttggtatcactgcaatttcaggagcatttgttgctggaaatgatgctgtaagtaaactaacaaagttggatctaagcttctattatattagttacagaaaggaagcttagtatattgatctctctgtttgtgaattttagggtcgtgcattcaacacatttcccaaaatgggtgacacatggatcccagataatatatttgagatgaaaccacttttacgcaactttttcgagaacacagcaactgttcaggtacaccattgacacaaagctttctcaatttgcttcaagaatctcaaaaagactgaaaaattacttaaatttcagcttgatcatcgccttctggcaaccacaacattaatcgcaatcggaacaatgtggtggttcacaaggaagctagacatacatccagctgttaaagctttgatcggaagtactgttggaatgactgctgttcaggtaaaatcaatcatcataaactttaatggaaacctaaaatcaaaaccattgataaggtttccctttttgtattttgcaggtgacattaggtgtatcaacgcttctgagttatgttccggtttcactaggaagtgcacaccaagcaggagctttaacacttctcactttgatgctacttctcaatcacactcttcggaggccatcaccttctcttctcaaatctcttccacaagttgctaaatcaaatttcagctaagccctcttcaccaaaatctttcctttttcattatttactaaaaaaacaattctttggctcactatgctactagcaagctttcatcgaatcttgtgtcaatgatgttgtatggttcgaaaaataaagtacaaaaacaattaacaaaagtttcatatgaatcccagaactctgataactttcattgatagcttcgtgttgtttgtttcattgccaatagaaaatcattggataattctagttttagagtcaataatttcttataccaatttggttcagtggtaaattttagttcggttttagtttagatacgattcggttaattcagtccggttcaaatccgtaagccttgtggttgtggataatgtttcgagacagttttttggcgttttggatatacaagactatccacgtgtcgtaatactgtagcttatcggtatccacgtgtcagtagcctaccatcttcctttctatatagccatggtacaaaattctttgttcaacttcacactactactatggagaatcctggaggaaggagaagaagagacatagccataaccgatggagaaagaacgaccggttcttcggttgtggctgcaaccgtagcagctgttgcagtggtaggaccgctttttggtctgatgagtttcagctttgtggcgacggtgactctgtttctgatcgcttctccattgctgctgatatttgctccagcttttatggtaacggtagcggttcttgtgtcggctatggttggtgttggggtagctgcagccatgtggatgatgggaatagccgctttggtatgttgtggccgagagattggtattgaaaccggactggctgggaggatggttgagtcggtggtgagagaattaggttacggtcggagtcgttacttgcgagacaaatcagaggatagttattcaacttcttctccttcttctcgggattactcttcttcttagttcaaacttggaaaaagtctcatgattcatgggaatttcaagaagatggtgaataaagaaacaaaaaaaaacagagacatggctatgataagaaaacaaaattaagtagattttttcgagagtgaaaatttgtaatatctatccaaagaaaatctagtaatgctatatcatttttttcaagttgtgttttttcccaagtcaagacaaatagcaaacagatgaaaaccaaaaataatagaataaataaattgtaagtttctttaggtcaaaacagattgttaagtttaattgatataataattttcaaagataaaattaatcacaagttgtgggggatggattatccgaagtacaatcaccatgtctatctgaattgtttgaattatccaaatccacattatccggattattatccatattatcgaaaacatagttttccaattttttttttttttttttgataaaatgtgaattatattaccaaaaggaaagaggttatttacaaagctgggggcaaggagcttctatggccaaaaaaaaataaaaagccttagataactattacagagaaactgaaactaattttccaatgttaacaagataaatacatatatgtctgtaaagtataatgtattaattatcaattgattttgaattagaagtctaagaattttataagtgtctctcatctaattttcaaattcaaaagtatactactatatctattccataaatattactatatatttacattttgatcgatattcaagtttgtaataatgtggatttaccactacttgtttacaacaaaagatgacacaagtagggtccttcgtgatttagaacaaaaggtacaagttcgtacgcgaaaaaggtacttctacaagattctgtgcttttcacgaatgctctcatagtctcactaatgcacacgaacgctttcgcaatattctccgtacttgtcggtacttcacgaatacattcccttacaaaatgaaaaaaaagttgtcataactttttaaaaaaaatcgtgtcataacttcaatatgatcacaaattatattaaaaaagagtacaatttcacttcataatccaaaggctagtttgttatccaagtcgttctaccaatccccaaaatgtttaaaagttggagtttgcatagagaatatcagaagaattatataatctaagtgtaaatatatgaagaatataattttatgggtgaataatctgaatgtaaaaggagttgaccaggcgttgagtgggtgacctaccggcttaagggaatcacacgctctgtagcgttgaattctttaaagagtttaatcaattcatgcacatctgatgctaatttttactatgttttcatttttgttaaatcaattttattatatatatacatacatttcctttcttcttttgcaatttaaaagccttgattacaagaaagtacaaaaatcaaaagtttggcagttttaattctttgggtggggcaatctttgatatatataagtttttttcatttcttaaccaaattttcttttttctcgttagtaaattaagtaaagagtaatcaaatcgatcaagagataaaaactagaaagaaagaaagaagaaatgggtcggattccatgttgtgaaaaggagaatgtgaagagaggacaatggactcctgaagaagacaacaaattggcttcttatattgctcaacatggtactcgtaattggcgtctcatccctaagaatgctggtaatttaaattttctctatattttttttaatgttttatttagtcaagtgatcattgtaatgtaatataatgaatcgacaaaatttggtctttaatagggttgcaaagatgtgggaagagttgtaggctgcgatggacaaactatctgcgtccggatttgaaacatggccagttctcggaggctgaagaacatatcattgtcaagtttcactctgttcttggtaaccggtatgatcactactcactagatctaattaactacggttttatgattttcttgaaaagatttaatctaggtgtataaattacagatggactcataaatatcgggtttctttactaagtttttgaaattttgatgctgacttactgatgaattgtttttatgagttttttgacaagtttcttgggacacaagaaactgaataagacataagttttgttctatataccataataccaaatctaagtatagggttttaaacttttgggaacttttaattttctataaatttgttttcgactcataaatagagtttgatgatgtattgctgatgaatagtctgggatttttcatgagaaacaacagttaacatctttcttgggaaacatttaataatcttttgacatatatggttcaggtggtcgttgattgcggcgcaacttcctggtcggacagacaacgatgtgaaaaattattggaacacgaagctgaagaagaagttgtcaggaatgggaatagatccggtgacccacaagcctttctcgcatctaatggcagagatcaccactacacttaatcctcctcaggtttctcacctagccgaagctgccctcggctgtttcaaggacgagatgcttcacttgctcaccaagaaacgtgttgacctaaaccaaatcaacttttcaaaccataaccctaacccaaacaactttcacgagattgctgataatgaagctggtaagataaagatggatggtttggaccatgggaatgggataatgaagttatgggacatgggtaatggattctcatatggatcctcttcgtcttcgtttgggaatgaagaaagaaatgatggatcagcgtctcctgccgttgcagcttggaggggtcacggaggaatacgtaccgcggtagctgaaaccgcggcagcggaggaggaggagagaaggaagctgaagggagaagtggttgatcaagaggagattggatctgaaggaggaagaggagatggaatgacgatgatgaggaaccatcatcatcatcaacatgtgtttaatgtggataatgtcttgtgggatttacaagctgatgatctcatcaatcatatggtttgatttttatttggttctaagttttttcctttttctttaagatttcattgtttggattttcattttcgatcacattggtagttaaacattgggtatgattaattaggtgctttctgtttttacagagattaataagttttgctttgtaaagcattttaataaatgaagaaatgtaaataaagagtttttattattttcatcttgagtataataaatagataacagacatacaaaattacaaacctttgatgttggcttctgcgttgaagtctacaaaatcccaaaaatgtcatttccaataacttgcgtatgtgttttgaaagtaattaaaaacagaatcttatttgttactttattctattattttagtaatagaaaaattcataaatatatcacttgttataaattgtggtggaacaaaagcaaacaatggaatcatatactttagaaaagaaaagaaaaaaaatggaatcatagggcctagttaaactataaagcacattgcatatcattcggcccattaaaggcccaaatattggctatatgcgttttggaggagaaaatatagccgttaaagtgagaaaaggtctcttactatgttatcgcagcagtaacaacataacgtaaaaagaaaacaatccgaccgttgtacatatagccgttaaagaacaacaatttaaatacctgaaattttgtgaaagaaaaggaattcttactaaaaaaacacaacgaactcaaatcttcaatcttcatcttactctctaattgctttcctattccgatctctgtttcttcataaagtctcaatcttttttttctctatggccggaactaaagattctcatgtagtggagattccagtagatgaagagcataaagagagacaacaacaacaacagttggttgcggtctcaaatccgggaatgggaatactcaaagtgattcagcagcatccgttgtctgaaatctcagagagtccaggacatttgttgcttttgaagttatggcaaagagaagaagatttgttctgtcgtcgtgttcttcttaaagaatcaagactagagtcaatcaaaagagagatctttcagctttgttgtttcttcctagtcttccatgggttcttcttcacacttgtctactcttcttcttgttctgatgatgctgacgtggtgaaaagtaatgcggtttgcaagaaatggtggataccttctgcagtgtcattagctacttcattggttctggtgtttcttgttcaagctaagctgtttgtgttctggaaagtttacagaggtgttaatagggagaggaatgataatagaacgcttacacggtgtgttttggagttgaggatgaaagggtcgagctttgatttgtcgaaagagccgatgagtgggaagaggatgaagagttcaagcgttgagatcaagtggaaacctgttacttggttctctcagtatttgataactattgttcttctttgctctgcagggttgttcttcccggtctcaaagttcatcctctgcggattttgacaaactcttcctattcactgtttgttcggtaagcaaatcgtgtgctcttcttgttctttaatccaaaattggactctcagtaataaatgtgttttctttctcaggactctgcattctttcttcaaccttcattgtggggatgatgcttttggtccgatcttaccattggcctctgttctagctttgagagagtagctgtcaaatctcccagactgaagattcgccggagggaataagaacaacctgtaacttttagcagtactcacacatagtagaaaattgatgtaattcgggattagaattctgatcttgatcttattaatttcattcttcgttaataataaacaacattgcttgtatagtaacaaatttttgcaataaataaaatgccagattcagaactgcaaactttcaatgtatttagtgatactgtaagattattccaacttgatatactgacaatacatatttaggtacactaggcacataaactttttctaactcaacaaggaacaatcaagtggagttgtgtatcatgtttcccgattcagtgctctgttcctacgagctctcaaaaccaaatatccggaaaacacctgcaaagagatccaagttgttgtcattgttcattttctgctaccaatattagagttttgagttgttgctaacaatgaagtactaatacgcggtagtaccttcatcagtattatacttgggattcttgtcatcacctgcatatgcaagtaaattgtatttgggattccactcaacactgttcatggctgcccgacatggaatctgatgcaccgtccgcccggtttggacattagcctgtttggtagttagtggtcagatacgaggaactaatctcatattgaggaaactacattgaaattagcagtgtttaagtctgggcaatcacttacaatatcaatgaataaatcttcactggctgaagcaatatactctcccgaatagttgaagcttattgttctgactggccacctgtgagaaatagttataaattactaacatgtaacagaaattaaacctttttctactctatggaaaattcatgttgatactcactcaagtttggtaaatgttctcaaacaaagcatgtctgagatatcccaaaggcttactaaggaatccgcactcccgacagcaaaatatctgttaaggtaaagaggaagaattagatgcaaaagcaaaaagattatcattcgtgtctcagaggccagcccacaaatgtaaatatatattacctccctttaggatcaattgcaatacaataacacccggctgtgtgggctgtgagagtgtcaagtggtttaagagatggatatgaaagaacttcaacagtgcctgagcaggacaacatacaaagtaactttcagtaagatcattttctcaagttcaaaaacaaagaaatctttggtagggaatcgtgtgcaggaaagtacagaatttaaaatcctcaccaagtccagtagtcaagaagaaaaaatctccaggcatgttccaagcaatctcattaacctgttacaagaagacaaaagataagagaacattccatacggcaccagaaaattacttgacgattattacatgaacaaggaacttaggtgacatataaccgcatgagcttgaaacaggagatacggaagagccttataaaaaaaaagccattaataaagattaacatgagtctgagcttacgttacctcataattgaatttgcgcctgtgtagaggtttaaacttacggacatccagaattgtaagctcatcatcctacattggccagtaagagaaaggacaacgactatgaaaagggatctatcaagtaatccatagacagtaagaacaatgaaagtgtaaagatatggggctcgagacaataccctattaccaacagctacatgtgtcccgtcaggtttgtaggtgatgtttatattctctccactaagttctacctgctgtgtgcattttccacctgtagaactcgaagaagacatatctcagcaattgatagtaaaacatacaatagtagccacatatcaaaaacctgatcaaattcctctcttatggaatctggctaaataactaatttataattctaagaaacttagatccgatcctcatcaatcaatagtctccgcgatatgactcaaaagcaaaggccaagattgcgagaaatatttgtgaatgacacatagctaatccattagaaaatatacagatttctaaaccaagctccaggcatatttcaggagcaaaactaaacgattaaaagaatataacttactgcgagcatcccaaagacgaacgcttttatcaccagaggcagtagcaacaagatctgaatgtttgggatcccaacatagctgatccacactatcagtatgaccctttagctcaaggtccttagccttgctctgtatccacacaccacacaaacaaccaaattacaaaaactacataactcaaaaagtaacaatgacaaagataataatcgagttttaactcaatctacaatacttctccatatgtattcatcatcatcaaaaacacatagaagttcccatagctcaaaaaggtaaagaaattacatgaccgtgtggttcgatattccaaatgcgagccgtttgatcaacagaacccgaagcaagctttgttccattcgaattccaagctactgaatgtaccttcaatccaaaaattcccccagattcagcaaaaaactagggtttcgcaagttttattgagtacagaaaattagactggagatagaaaaaaaaaaccttcttcttatgaccttgatattctctgctatgtaagctcttgaaaggaatcgtcgtctcctccattttttaattctcaactcttcttcttcaaccttccttcgcggcctactgaatatcagagcttcgcttcctgaaacgcagcgtttagtcattccggtatagataaaccgaatcgaattttagtaaaccggatgtaaaaaaccttctagatggttaagagtcttcagagagaaactaacaagaagagcggtaaaattgggtaaaatatgaaacaaagaaaaaaggtgaaaaaaaaaacagctaagcaaacaacaagtaatcatttcacagtctctataaaatgacctcttaaatccaccgacgttatagagagacaacaacagctttggttctgcctccgccgcttcttcttcttcttctaatctccgacagatttactctgattctgttgtcttcgagatgatgatgatgtcgtcgcttggtggtggtggtggtggaggaggaggaagtggtggtggtattggtggtggcggcggagggaggtttatgacgtattcgtcgtctctttcggtgcctccttctgctcctcagtctcctaattactccggtggtctccgatcacagtcttctgtcttcgttgagcaagagaagtaatcgaatcttagtttttcatcttcttttatatttttgttttttattgtttggtgatcttttataattagctgatgtatctgatgaagtatgttgatctttgctttgctgattttgatttttagatcttaatagtgtatctcgaatctggatttttgtcttttttgttttcttttgattatattaggatctatgtttcggaactagctcagtctatttcagatttgtctcaatccagttcattttttgtaaagcataagtctttagtgtgtgaggatcatttcattggttgtgttcgtttctgttattgttgatttctgttcttggctgatgaaactgttaaaaaaaatacgatttttggaagattgactagatccacttcacaaaagaatggaaatttgaatctggttgtatcgatttagagtgaatttgagtgtatctgtttgtaagtttgatgtgtctttgaggcttttttactaatttggatactctgcacaatttctgttttggcaggtatctttcagagttacttgcagagcgtcataagcttactccattcctgcctgtgcttccacatgcatttcggctactaaaccaaggtgagcattactgtttttgttgtttattatttgtattttcatctcacataatacttcattctttgcttcagattcatgaagctataatacagttgataaactcttaaacagtactgctaagagagacctaattgttagctattagaagtagatcacgaaatgactaattctatatttcttatactgacttcattctatttaaccagagtgtatttaactagagtgagagcaaaaatatattttaagctaactcaattaactatgctgtctctccattcattggtgtcttggtgactgatttgttgactaattctaactggtgcgtcttactcttgcaaattgacatttttggaacagaaattttgcgtgtaaccacactgttggagaatgctacagttttaagtcagagtgggcttgaccaccctagccctctggcttctggagggatatttcagaatgcaagagctgacatgaatggatgggcctcccagtttccatcagaagtatgactactaaccattaacataactctctaattcatactactgcaatagaagttttattgacttaagttataatactgacataacatatttgactgcttttagtcctagtttatcatgacaggtaggctaacacttcatatccgtaatgtttgtatgttcataccttagatcaacactaattagatactccactatcctcacgagtaggattgaaattaatgctataattttctcatatatctgtggtcactgtatgcatattattaggatataacagctacaggttgaaatgccttgatacagtgaccactctcattgaatgaagttccagggcaagaagttgcagtattcatgtgcttatgcttaaaggttgatcttgcttctaattttgttggttgatcatttgcagagatctgttccatcatctccgggaccaaattggcttaactcacctggtagttcgtccggtctcatcgccaagcgtacaatcagggtcgatattccagtcgacaattatccgaatgtatgaactttcatttctacactgagatatactacttcctggttggaatgtaactccttaattttctatatggcagttcaattttgttggtcgcctcctgggtcctagaggaaactccctgaagcgagttgaagcaagtactgattgccgtgttcttataagaggaagaggaagtataaaagatccaattaaggtatttattattaaactttacaacttcatttgtatctacatttcaatgtttgtacaaggtgttaatatatttcttcttgtaggaggaaatgatgagaggaaaaccgggatacgagcacctaaatgaaccacttcatatcttagtggaagcagaattaccgattgaaatagtcgatgcacggctcatgcaagctcgggaaatacttgacgatcttcttactcctatggtttgtttttagctctccccctccctttgattttaaaccagttattgttacaaagttttcacactcggtttctgttttataggaggaaacccatgatatgtacaagaaacaacagctgcgcgagctagcattgctcaatggaactcttcgtgaagaaggatctccaatgtccggttctgtttctccttacaatagccttggtatgaagagagccaaaacaagagaagggtaaaaaccatcgaacagtttggctgtgatcataaagcaatatgaaaccgatccaaaagtcgacacaaaaaggccataccactcttgacgacacggtactgtctcttgtccttggggtagaaatgttgtatatatgatttatgaaatgtgtttgtcagtctatgtatcattgtcccggagagagatcagatgacaaaattgcaacggaaacacaagagctgatgagtctctgtctctctccgagactttgattttgtttttgtttatgtttttatgtctggaaagttgggttccaacagttttcttttaagttttttgtttatttgttgttttagcaaaaagaaaacattaaatcatgatgatggtttgtgtctggtattggtaatgataataatcataatatgttttggatacataaacgtcaaagtaaagcttgtttcaatatgatatgtggaattatgtaaagcaaatgttctgttctcgagtatttttcacatttttattactggaagtcgacattttctattacatgtcaactctgttttcaacattgaaagattacttgattaaactttaaacagatctatatatttaagtaaatcggttagtatacccatatgtcaatcggtttaatggcctgtgacccttataacctagtttcttgtgatgcaaggtagctttcctttactgttttacaaaaaaggcctattcaaaaattgttatgtactttatataaaagataattttaaaatcctatcgaatttggtaagagtaacatcttacatatgaaatctaccattcacaaatactactttattagtaatatgcaaatgcataacaatttttgtaatgtatagattttatttgcatataagaaagtgtttttcttttcatataagaaagttttttaagaacaaaaggaacatatgtcaaaaaaaattgtgataagttttccacttttcccttttccccttaaggtaccaaatctttgcaatctgaaataaatatcattttcttttgatttcctgtttcttttttgaaaatttcttgtttaatccttcttctattttctttttccaaatttgcataacgtttcttattatggacaaaagagtcaatgggctccgtcagtaaacgattgggccttattatagcccataagtacagaatctagctcgctacgtggcaaagcttcaccgctcgaaagagaggaatctatataaaccgtatcgatgctaacaagtttcatcttcaaaacaaccccttgagatttccgaagatcatcaaatccaaaaccctagaaaccgaacaaaaggtaggtcaaaattagctccgataaatctcgatttcgatttgaatcatcgttactcttagggtttattcgtttcccagttcttgatcttcgtcgtttgattctctcgcggttttgtttccttgcgtcgatccatgtgttttttctgttatcttggttctagaatattctcgtacctacttctgatgatttacctttaactgatgcgtaattgcttgatctgtttctgaattgttcgttgattttctctctgtttgatcgaattctgatcggattgtctcttgggcttgagtgtttgatttcgagatttttctggttgatttcttcaggaggtgtatcttaggctaattatcaaagctgatttgcataaagtctttccttttaggatagctatgttcttgctccatatgttaactggtttttgctgtgtactgcttttgcatctgtacttgtagcagtatagtaatttttttgatttgattttgttcctagctagcagaagctaggactattcaatggcgtcgaaaagaattaacaaagagcttagggacttgcaaagagatcctcctgtgtcctgcagtgcaggtgagtgttttaatctatgatatctactgtgaaatttaaagaaccactttgatagattcagtagatgatgtagcattaacctcagaatcagttttaggagaatgtttttttttttgtccttaagatacattatgagctatttagattttaatgaattggtgatgttattaggtcctacgggagatgatatgttccaatggcaagcaactatcatgggtccagcagatagcccgtttgccggaggtgtgtttcttgttaccattcacttcccaccagattaccctttcaagccaccaaaggtaacagaagttttttgttttttgttatgtttatttgtgtagcttaatgaatttgttcatccacaccattatgatttagagagagtgttcaatcaagtaggctttttgtggcaataaaccttcattgtttatgatgcaggttgccttccggaccaaggtttatcacccaaacatcaacagtaatggaagtatctgtcttgacattctgaaagagcagtggagccctgcacttaccgtatccaaggtgatcaaattgtttcacttccttactttttagtatagcattagtctattttccaccacaccttcttgtgaccatgtcttagttaaatggtcatgtcttagttcgttctctgatgtgattatcttctttgaccaacctctctttacattggttttatgaacaaacaacatcgcaatcccttggatatagtcaaggccattatcataaaagattgagctctgttatttgtacccttgtctaaatgctgtgatatggattagtcaagtaaattctagttatctcttttaataggagtgttacattatgttataatgtttaaaggccttcattatcgctgttgatgacatgttatctagatttaatttgtttaatgactctcattagcgagacaatgataatcttttatttgcatataagctgaagaactaaagttggtggtgcaatttccgcaggttcttctgtcgatatgctcattgctgacggatccaaaccctgacgatcctttggttcctgaaatagcgcacatctacaagacagaccgagtcaagtacgagtccacagctcaatcctggactcagaagtatgcaatgggatgataacaagcaataatacccaccaccagtacattgcgtattaaacaggagaaataagaaagaaagaaaaaaactcagtttggcttttactttggctacttttgcttattagttttttttttttaattatatcttgaagctgtgtgttgggtgtgtacatgagctttatgccttatttgaaacattgagatcttgcaaatgcttttaagccaataatccgctatcatgatgagtcccttgctagtagtgtagaagaatatcacataagtttgcagataataaaacatttgcgcataatagtgattgtgaaattagattggagttggaccaacacattttggtgatcgtgacaagtttatacggtgttagattcctattggcaaactactataaaagtcttgagaatagaataacaactgaatatgactattgacttgatccatttgtacggttttctctttcttttttatttgaaaatttcaaattgggtttggaacaagttatatttaactggtttacgaatttagctacttattcggtctttttcatagctgacaaagatacataatgtatatagctgttaaataaaaaaatgaattccgtgtgacttcaccattagaacgcgtttttggttgggtgaggtctgatgtgcatcagaaacaagtgattatttggggggaaataaataaattcgaagaagaagtgtttataaatttaaatcaaaatgttgaattcggttaagtttggtcgaccatacgaagcttcaaatattgatgacatttaagaaagaaacgcatgaggtaacagtgtaactcaacagttaatgcgaaatacacgaatacacgcgatgcaaaaaccgcagaagaaaacgtgcgcaagcaatttattaccaaattgatcccaaaacgacgtcgattcgattcacataaaccaaaacgacgtcggattgatgcaatcatataaaaaagaaaggcgtggaaggagttaataaaacttggaatgagacatgtcggccatttcatggtgttaagaaaacagagccctcaaatactttttaaaaagaaacagagtgcaccaaaatcctcttaattttctcaaaattcaaatctctctacagatcatctgagaaattttagattctggaatctatttgattgtctctctctacagatctctctgtatatagaaagaggtataactgtctatcgccatctttatctccttggctttttctctctgttacaaactattcttcctatttttagatatcttctctctttgtaatttacctttcgttaaacactttaaggattcattagggtttttgtcgatttccttctgcattgcttttccttccttttggaggaatttttaggtctcggagttttgatttcgacctttaaattttgcttcagaggagagattctatccgttacagttcgtgaatttcgcgtttgaagaacttgaacttgattctgaagaatgtcaggtaaattttgagaagagataaaatcgatcagtgaaatgattgtgaaattagcttcgtttttgatgtatatggaatatattgctacaggtcgagaacaaacaggagagaaactatcagattctgagtacatagaagaagagccacggcgttctagaattgggaatttgaagaagaaggcttttagttgttcaactaaacttacacatcctttgaagatgagaaaaggcaaacgtaaaatcgatttccagattcctttgattgaagatgttagagatgagaaagaggagaagcttgtttctaaattgcgtcaacaacttcttcagaaagatttgttgcctccagtacatgatgattatcatatgttgttgaggtatgaaatgagctaccaaagttccttcttttcttatatacaactggaaagttgaagacttttttatttgtgtctctgtgtaggtttctgaaaacaatggaattcaaaatcgagaaaactgtcacggcatgggaggaaatgcttaaatggaggaaagaatttggaaccgatcgcattatacaggtacgagatatggtttcagctgtggtttcagagtagtagcatcttgctgtggaactaacaacattttacaaattgataaaataggatttcaatttcaaagagttggatgaagtgacaaggcactatcctcaagggtatcatggagttgataaagatgggagacctatttatatcgagagacttggaaaagctcatcctggtaaacttatggaggttactactatagagcgatacttgaagtaccatgttcaagaattcgagaggacacttcaagagaagctacctgcgtgttcagttgcagctaagagacgagttactacaactactacaatactagatgttgaaggcctggtatggtaaactcatgtagatgctttaaaggaaccacatggtttttcttgaattataatattgctcttgtggttgttcagggtatgaagaactttactcctaccgctgctaatctcctggccaccattgctaaagttgattgcaattattaccctgaggtacttaactctttgatgaatacactttttgtactagaagctctactccaagtataaaaggggataatatttgtgatgaatccaatgagccaagtggacatggatgtttcggttgctctaaaagtttgtaatcatggtctctgactcttgcagactttgcaccgaatgttcattgtcaatgcagggattggattcaggagttttctttggcctgccgcacagaagcttcttgatccgatgactattgcaaagatacaagtaatgactatcgctctggttttacttttaagtatatatcctcgtttctgttattagcaaccactcattacttgtgttacttaggttttggagccaaggtccttgtcaaagttacttgaagcaattgattccaggttaattttttatagctcacctcatagagtttttgttttgtagatagcctcattcaagttttggttatggcatgctaacattagtatttattgcttttctttcctctctgtacagtcaacttccagaattcttgggaggcttatgcaaatgtcctaacgagggagggtgcttgaggtctaacaaaggaccctggaatgatcctgaaatagttgaggcatgtccctttttgtttttgcttataagaatcaattatcttggtaagttgaactaatattattgttgtcttgttttacagctcgttcatcacatggaagtaaataatgtaccgcaaacaacaacagctcctcttcatgtaagagattatgattctaccacttgcacgatctcgcctaaagtgagcttactccattaatttaagaggttttatctttatcttccatacaatgtagtaactttaattcttgtcaggaaactttgaaagaagagccagaacctgaagaatattactcttccactgggtccagatcttcaatgcacacttgtatagttcctccactctctgataaggtgctttttgaccctgtttgtttctcaaaacattttatatagattggtttttgactaagcctcttcgtgcaggctagtacatcagacggtgataaattcattactaccgtggaatctatagaatcggctcaatcccaattacttgacgcggatactgaaaacactttcgcaaatacatctgtaagagaaggtgtttcttttcttcatgccttgttacatagtttcgttaatgttctgtttcacatggattgtaatcgctactgtatattcaaaatgatcattaacacgtttcaggtggtcagattttacggtttggtgctcttagagagaaaatcaacagcgagaacatctttcacttggtgaaaatactactagtttttccactgaagctatttgttctctttggtttcctattacctggatactggcaaagacagaacacagtcgttgtcccagattcgtcgacaaacaacaaggttcttgagtgtttcgatcgtcttaagaagatggagaaagaattcacagagatcagtagaaaacaagtaaaaatcccagaagcaaatgagaagctattagcagaatctctggagaggatcaagtctctagaactcgatctcgacaaaacgaaatcagtacgtaaccctctcgaacttgatcttataagaagcttgtaaacgttttatcatatattgtaactcctttttttgtgtgtgtgttttcaggtattacatataacattaacaaaacaacttcagattacagaacagcttgaatctcaagacgaagaagtaagcccactcactttgggttaagtttcggtttatatttgattatctaaacttatgcgttcggttgattgagactctgattttctatgttggcagcgaagaaaaggatgctgtttctgaagctcttggtcataactaaacggacaaaaagacaattatatacgtagacctttggttttattttggtctattgtaaagtttgtttaaatttccgagtgaggaacaaacatcgcggtttatgtttgaaagttgaaactctctaatttactagtaccaagagcttacataattatgaaataaagttggaataatgtacatgttggttagctacttgtttacattcagttacaactcgtagttaacaatattactgaaatgttcgacgtaaacaatgaaaaaaaagaaaaaaacacggctccgaattgttgttcatacttctcaatcggtctaattaggcaattacgcttaaaattaaaaataatgtaattctttcttctttctttcaaaacaattacattagtttagtaacaaaaatattcactgcagtgaagacgacaaaacgccatcgttttgggaaggggcggcgttgaagacaggtgcgcatgtttccgcgttattctaagctgtaatccggacaaaatgtatgtaatagtcatcgacggaccatcttttattctattttatttttattttatttatataattattctctctctttcatcttcgtggtttgccatagctcttcttgaatcaaggtcgtcttcttgaaatcagatctcttcgtgacttctcctgtaaccaacaaagaaccatggagctcctctctagagctcttttcttctttcttctactctcagttctttcttctttctcttcttcaagtttcatttcaggtacacacatacatacacactttcgtcttattctcgaacaaattgttggtttggttagatgggtcatcatcaattttctcgttttcttattgcagatggggtcttcgaatctcagagtttggttcttggcagaaacttgcttcagaccaagaaaagcaagtttcttaaatctctcctcttcccataactttactgttttttatatactttctaatgattccagcaattgattctccttttagtatgaagatcttagtaaagagcttctaattatagacggatccatatatagatagctagttaccatatatttgactacaatcttgattcttgattcctagctatgaattgttggaggaaaatgtgagttcttggcattctctacttgtttacttttagtcatgtggcttaatgatgatcctcttgacctctacaaatgttgctattcatctccataactcttttcgtgtgaattgacaattgtagcagttatttgggcgtttgcttcgtgtgaattcagcccgatatattgagataaaaattgtttgtattcttctaagtgatatggttttcctctttctatgaaacagcatgtcctgtgaactttgagtttatgaactacacgatcataaccagcaaatgcaaaggtcccaaatacccaccaaaagaatgttgtggcgccttcaaggactttgcgtgtccttacactgaccagctcaacgacctgagctcggattgtgcaaccactatgttcagttacatcaatctctatggaaaatacccgcctggacttttcgctaaccagtgcaaagaaggtaaagaaggtctcgaatgccctgccggatcccagttgcctccagagacatcagcagaggtaaacgcagcaactacctcgtcgtcccgtctttggctgaccgtttccgcggctcttttggtttttgttaagttgttctgaggctgataaatccgaatttctgcaatgaacttattacaacaacctgaggaagaggatgtatgtatatccacgatttgttttactgttgtactgtctcattcttttgttactagggagttcaaaaaattctaaatgataatttgtaatggcctttgtgtgtctacttgtctcttcttatataaaattgaccaatgaagtaaatagtaactagaagatagtgaaatggttaggatatataaatcaccaagagtttcaacaatctctcgtaaatactgtatgtatataaaaaggttttctgtttgttctttatggcttttgagtacaatcaagtatgactctatacatatacatacttatctaaagacttgcaaagtaccttataacagctgtaacctgcctctcactcggtctgtgcgatggtaggaaagattcaccacatgagtcttgacttgcgacggaactgcttccttgtgatacaccaaggaccaggaaagatgctcaactgcgcatagtaatcaggacaaccgcaattgcgtgaggctaactaagttcatgagacttcactatgttaaattaatctagagaacaagcttcagataaatgtccggtatagaaatgaagtacgtaaaggtgagtttatgcatcattatttgcacactatgcttatttcaccaaatgcgcccaacgtgtatataatatgaaaggtagatctcagatagtagaactccagaaataatctgttgtatcatttactaatggttcatgagtatgaatgaaaaataatatcacttacattactaataagctttgccccatgccatgatgtgtccacgccgtaaggaggaggtattactctgattccgttacttatagatgaaggaaggtgatcttgcagttctctctctagcctctctggatacagatcacacaaaataaaacagaacccataagctcgccattcacgtatctccgagtaaattgatggcatttgcaaaagaaagacgctaatagtaattgaacctgagagtccaggcaaacacgcgcttcccccagttagtactacagtcttgaaccaactatcgtcacctgtaagtcctgctgcatcacagtggtccatacagagcgagacggcctggtgcagactcattgcacgcctgttttggccaagacaaaaaccaatccaaaaataaattataaattggccaaaagtatggaggctcttcacaggaaaatagcccagccctgatacgcataaggaaaaccgtggaactcataaacgagtttgtgcactatactgtataatcagatgatatcaatttagtttcgagctaattagattgaatcaatttaagaagtttcaaggtttgatgttatggtattaagcagtgcaggtcttacattccagcgagacgtggttggaataatatctcccctgtttggaaacgctcttttgataaagtaaaccatccttcacctgaaacttccactgaagcttgtgtgtcttttgaaagttcagctttataatcaagagccacataacacagtttctacattcgcaaaacaaaaagaaaaacatcatatataaagaactatactcagtaacttccaatataacgtgctatgaactaatgcttgtgcatgagttgcacatattcaacgccttcaaggattatattggcagttatagaaaactggttgaagttcacaaggtgctatgaacacatcgggtttgatggcttgtgtgtggcggtatcatatgtgtattttacggaagaggaatttaggatggaaacctacaaagttattttcggagaacatattggtaaatggtcatacctctttaagagtacgaacagtgtagagtgattgaaaggaaatgttgttttcttgcatcttctccttaaggaagcccgtgagtttcaatgctccaaaaccaatgacttctacacctacctggcgcatcaccttaccatgtaaaactgcagaacacagcaaaagtaattgttaagacaacagtgaatggtgcagaaagaatcagagagatacacgaggatttttttcagcaaaatgaaatgttcacattttcatctttcatcaagttcagttccacaaaaagaatcacatcatgagtgactaaagctagaaagtctaccatgttgttaaacaacatctgtgaagatacaaaaagagtttaatagtagagagaaataaactgactcggaagaatggtgatgacttggaaaccaatgttgacaacaattccagatgtccgccgtgctgcatatagagctaacacagcctggaaacagagcacagattattcataatcttcttatgactgtaatagtaacaaaaccaatcatttcacaaggagtgcataaccttagttatactatctctagttaatggtgagataatgaatcaaatcccccaaaaatcaatttcccgccaatacaatttattaaatgtactggcctacttgcttaaaccgtggaaaatatggctatagtgatggtgaatgaatctgtctgagaaatttactactctgaaatttcaatgcaagagttctgatattttggagcaatatccatcagaaagcactgaagtgtgaacaaggcttacctgattaactgcacacactgcagggacgttcatgtcaaacaagacattgaaaatagcagtcttaagttgccgccttgatgccttggctgattcagtatctgataacaaatttaataaaaccttaaaactggaaccacgagatgtaatcctgaacataaacaagtataataacagtagctaaccatcaaaatggcagagaggtagtgataccactattggctgcatagagggctttacctgcatcctgtaagcaaactatccacatgaaatcgggaaagcaaaagccatagagacaaatgctaaaatcattcagctgtcactccaaaagaaacgaaaaacaaacctggtgaaaatggttgcaaagaactgttgaagtctagcataaatcggtgactcaatgttaccaaattcctggcgatcgatcaaactagtaagaactatcttgtgttgcaagagagaagacgcaagcttactatctttgtaaatataaataatgatccgcatttagtacaaaaactatctcaccaaaaaagtagcagaacgtccagaaggagacgcatacttgctccaaccaaacttacaatatccagaaccaccttcaatgagtcgtagacgacacatacagaaacaaacgagacatattgagcacaattgaatgacataaatctatatgattatccagaaagaaaaacaaaaacacaaagcataccatcaataatgatagaaccaggaacttgtgccctctgactataaatgtgcataaacgacaactctcctgattgactagaaatcattctgcaaaatcgttaaactttgaatcatctacaatgttttaacactgaaactaccaaattcaaaaagaaacaaaattcaaaccccatcaccaaaattctctaccgataaaagcaagcaaaaaacactcaccggagaggataaccagaacgcaaactagtttcagcgaagaaaatggagtcccatggctcttgagaacactggagataaaatatccagagacgattaccactagctacgcatttccaggctttgcacgttaagcccaatttcacagcatcttttggctccatcatcatcagtatctggactagaatatccatcggtagctgatcaaacgcaccaagagacgatgaagaagacaataacagaggaggaacatcgatcgctctctgatgattcaccaaatccttgccactattcgatcggttccacaccgatccccatactttcttcaggatcatcgtcgagtttgcggatttttgttttttctcgaaatcagaaattttcccaagaaaatcgaatcaggaaaatttgataaacacggcgttttttctttggtgtgacgtcgtttctagttgggatgagactgactgacgtgtactgtttaatataatgacacgtgttcaatagcgttgaagaattttggtactggctcactaatgtcaataatcataacgatattttgtgagcccaattggaaaaaaaaaactcgaagtggtcaatatcacgtgctcaacttttattgttgttgttgtgaattacaaaatttcatagaaacagaaaaataccaataagtattgtttttagtggatttttcttaatctggtcgactccaaattttgttattttgttgtgagagcagtcctcttcctttttaagagtgttttgttaccaggcctgatcatttggttcctctttaaaagtgttgttactaggcctctgatcatttggttacttggatcatttttggatcgtatccattcagattcggattttgggtcttgggattttggttttgttaagagattttaattttcggtttcgatttggttcaattatatatggttcccaaaaatatttagttctacgaaaaaaactttcaatttcaaaaccgtttataataaccttagaaaaagtattttgttactttggcttccaaatttttagaccggcctacgggttaccattcggtttggttcagacttggtactggttattctagtataggaatcgagattctattcggatatttatattggtttattatgttcgggaattagtccgggcctagttgttaattgggttaatatctgatccaaaccaatttggcaaaaataagtaattccatgatgtatctgacacgtggatactaggtattggctgctattagttgacgtgtatagtatttgaaaaaaatgattaactaccttttttttatttacggagcatagatttttttttggagaagctgtgtataaattggatcctcagatccggtgattacctaaatcgcgtcaattctcaacccagttttcagatttggtattcgattttatttatgtaattctcatgttatttatcttttctgttgaaacctctctttctcgaaactactaatattagggttttctgggtttgagaccacgatcttatcgaattattaatatcctttttttttcctgtttcaaacatagggttttagtgcatgagatcgaataatatttatttttgtttccgtttctagggtttattcaattttttgcgtttttacgttgcaatttttattgaaattcagatttctggagaagtgaattttgcggtaagcgtaatttagaatttgtaatccgtattctcatggaggattcgaatataatatgagctctaaattgattttatgtttgcaactttgttttgtttatgtttttttttaattggtttgtgaattttgattataactaaatttatgaattttgcatggttgtgaattactatattgcaggtttttggaagctaacttattgttggaggtggagagatatggctgactttggtttgttctgtttcccttgtttaatggaagttgtttcatcatcatcatcatctctgtgattgtaattgatctcacaccatgtctgattacaatggtgatgatcttgaagatgaatatatggctgatgagtatgacatggatgatctcgaggatgatatgaatgccgcgtttgatggaagagatatcgatgcttctgattccgaagtcgaagatttcgatcaattggtttgtcttcttcctctgtttctcacactcttcagctttgtgttctctgtatatttttcttaacacacaattgcttgtatatggagtgttttcagaacaaggctgcagatacttctgctgctcaagcacggaatgggaaggatattcagggtataccgtgggatagtcttactcttactagaaaagattacagaaaaactaggctagaacaatataaaaactatgaaaatatacccaattctggtgatgaatctgccaaggtgaattacatttcatgtttctttaaggttatttattagtagatgcacctatgttgctcttttctcactctagtcttgtctattggaaccagaaatgcatgaatactgagaaaggcagctctttctatgagttcagaaggaattctagatccgtgagatcaacgattctccattttcaggtttgtctagtgcgttatataacccctgtctctattatgcttccaacaatttggtggctctctcggggtttctaaatgtaacttggtagttttttaatcataatgtagaccttccctgtgctagtattgctgatggaaccatagttttatgtgaagctgatcatagttaagactaaattatgtttgcttctttgttacagttgaggaatttggtctgggctacctcaaaacacgatgtttatttattgtccaactactccatcagccactggtcttctttgacaggttgtaggagtgaaattcttaacgttaaaggtcatgtggctccgtctgaggttcgtttctcaagtcttatctaaaccatctaattaatttgacttgtggtttcctttcgtctctgctgggtttagctaaaaccgatgttccgtatttttcagaaacatcccgagagtttgttggaaggatttacagagactcaagttagcactcttgcagtaaaagaaaggctactagttgctggtggattccaaggagaactcatttgcaaggttagtttagaggctttgaaaatggatatttaggatgatagcaaaccgcggtgattccaccaactggctatgaagtctcttttcactgatttaaaatgccaaaggagttagttgcttattcatgttctaattttgtgttttttgcgccctgcaaccagcatctcgatagacctggtgtgagcttctgctcacgcacaacttacaccgaaaacgctatcaccaatgcagtagatatatatagaaactccaggtatctcttcactttcatattaattttggttttggacgtccaaggttagacgataggacgaacagaaactgaaactagttatatggctttattagcggcgcactgcatttcatggcctcaaataatgactgtggagtcagagactttgacatggagagatataagcttgtccaactcttccgttatctatggcccgtcaatgtaagctcacttattttctcgtttttctggatgtttagcagctaaatgaaactcaatcttacaaatttattttggaaaatttcaacagcatagttccctaagtcctgatggaaaactagtagcagtcgttggagatgacccagatggtctactggtagacacaagtaacggacaggtacttaacattcttcttcccggcaccatctatttcactgcgggtaggtcttggagccttacggttttgagttttgtttcagacgatcgggacgctaaaaggtcacttagattattcatttgcatcagcttggcatccaaacggtgtaacatttgccacaggaaaccaagacaagacctgtcgtatttgggacacaaggaaactctcggaatcagtcgctgtcctaaaaggtaaccttggagccgtacggtccattaggttcacatctgacggacggtacgttgccatggccgagccagcagatttcgttcatatctatgacacaaaatcaggatacaaaaaggagcaagagattgatttctttggagagatttctgggatatcgtttagcccagatactgaatctctcttcatcggtgtttgggacaggacttatggaagtctcttggagtatggtcgaaccagagactacacttatctcgattcattactttgatggaaatttaagctaagcctaaagaaaaaaaacttacgtaaaaataatttgttatacgccgtcttggttaggtttcataatcatatcgacaaaagaaaagaaagagagaccatggttcgattcacaagctgttcatttatgtaatttgttgtaaaaattgtacattttccatgaacttgggaatttgtttttgggatcataagtcaaactcacattcttcgaaaatcttctagatttagttccaagatattagaaaagatttttaagcaaataaagaaagagtcatatattttctcccattatttatggccaaagcatcagtagcatatcatatcgttacaagaatattctcttaagagtgtataaattcatgcgcaagtaatttatggcctaagcattgattgattaattttacatttttttgtatgtgtgtttgtctttgatttgctacaaaaatgtgtttttacagaattaggtcttaagtcgatttgtataaaactaaactgtgtgatttcacttattccatctttttgcagttcagaatgcaaatgaaatcattccacatctcctataagttgttaagctaaattatatagatgatttattttggatttgttgacatatgtggatcctcctttttttttaaattgtgtttagttaagtcttaatctctcatgcaggactagtatgagtggccctccactactaagtttttggccactaattctcaactcttaatttggtacaaaatcttatgtaatcttttgttattaattttacttacaaaacttatctcgttaatatctcttgttactagtggtcaatataggcaaatattctctcatacaaaacctgttatttgtagagacttttttaactgagtgagaataaaatctgtatgtaaatcatatagttaatttttgtcaaggaaacaaataacaaagatctgttttcttttgatttgatagttttctacttagttcaacaaaagtattctcacgagtcacaacactcagtttgttatagcattttcataatgataatttgtttttattaaatttgtgtctagaatatgttaatcatagtagttgacattcaaactccgatatggtttggtgtttttgtctaaggaattttcggttatatgtgttgacattcaacttcaactgttctttcatgtgttgtgacatgtttggttgttgaaaatttgccttaaataataacattatattattaaatagaagattaacatatatatgtaaaatatttagaaactataatatgagaacttttcatccaaaagaaaagaaaaatttacttgataaactataaacatctcgataattgcaaacataaatatgtgaagaaaattaacatatataatttaagttttcttatgaaaagaataaattatagtagttaatatacttttacatgtgtttgtaatacaattttatttcattaaaaatagtaaagaagatgataggatatatcatttattgtttgaataggttaaaaaggtgaaagagaaaagaagaaaataggatatataagatgattaagaaattagaactaaatctgaaatattttttttaatagaccttttataatttaattggattatattgttctgtttttgtgcaaaaataaagttggattgttatgttttgttgggacatgtggatagtttggtttatgaagaagtttaatagagtaaataatatatttttgtgttaaataaaaaatatttcagataattaagagtataaactatacctaagtaatctagcaagaaacttgggagagtcttatcactgcaacgccttttgtgagaaaacacaaattctcccgaagttaagatggttttacatattatgataagtatccaaacaatttatttgttatagtgtattaacaaatcttttgaaatcttatttcaaaagattttcttttgatgctaagagatatcaaaataataaataaataaatgaatatccaaacaaaatcttcatttgtttttatcttgtaatctttaaataaaatcttgatttatttgtcataaattacaatgcccacgagaagataaatagcagttaatccacctatttagcatttactattcccttaagcacgatcgattgtgacgtgtttgcttcaaaaccaaaacgtgaactcaactttatgcttaaaaacaccgaaaaccacgttttgcgttttcataaattaggaaactgaatcaatcataaatataccctttgaatctacccaaaggaaaaatatatagaaacattattataacaaaaaaaaaaaaggtaaatttacaacaaactaataatagtctttgctttacataattaccataaaaaaagtgtttactagtcaaagacttgcgattgcgttttgtaaaaacaaacagtcaaacaaaaccttaagtaaatacaattaaaagtcatatcttgtatggtttggtaagtagctaagtggctagaaagaacttaaaacatttaattataataacttaaataaaaaagctatttttaaatttatatatatatatatgaacaaaataagtagagactattcatccaaaaacgtgaggcacaatacagactcttcttcactcttatgcctatagcctcctattttctctctattgcctcttcttcttcttcttctgttgctttttagattttcatagctttgatattttgttgagtttgagagagcttaaagagattgtcatcttcactaagtttgtatttgtatacaggagaagccctagtcttattatcagctggtagatc

SEQ ID NO: 910 - DNA, 29498 bp, Arabidopsis thaliana
tgtttcagttttggtctgagcttggtttttgtgtggattctagcttcaaagtcgatggaccaattacgaggttacaaaaccaactgtggattctcacttgggaaaccgagattcggatctattaaggttaaaatcccaaggatcaaacctgagatagaagaagaccaagtagaagaagatgatgaagctaaaaacatcggtctcgaggaagaggaaaatgatcatgaagctaagagtatggatctagagcaaggagatgtggaagaagaagaaggagaagagaaaaaacatatatgttgtgaatgtggtaaaaggtttgtgtcaggtaaagctttaggaggtcataaacggattcatgtgctcgaaactcgtaaattctcaatgatgagaccaaagatggtgtctggtatggttggtagatctgaaagaggtgacttagaagtggcttgttgtgtttgttacaagaagtttacatcaatgaaggctttatatggacacatgaggtttcatccagacagaggttggaaaggtgttttgcctcctcctcctcttcttcctcatccacttggtaattcatcgtcttctacacttgatcatgatgatgagtttataagctcagattatgatgatgatgatgattttgatgatgatgatgatgatgatgatgatgagaactcggagttatgggacagtaatttggaattggaaaacgttgttgaatcgattaaaggatggtcaacaaaagggaagagaggaaggagaggtgatttgaagtttgatgaagcagatttgaaggatccacctttagaagatgtgaaggatattgatgatgctaatggtctattgttcttagctactactgcagaagcagctgctaatcttaatgttgctgagacttctgcttcgcgttccgttgaagagaaatatctggaaatggtcaagaagaggaagaagaagcagaagagattgtctgagatggagaaagagtcatcaacatctactcatcatgatcatcagcttgatcaggttgttgttgttgcagctgaggaaggtggtggtgccggtgcacgtgagaagcacgtgtgtgtgacttgcaacaagtcgtttagttcttatcaagctttaggaggtcatagagcaagtcacaacaaggtcaagatattggagaatcatcaagctagggcaaacgctgaagcttcattacttggaactgaagcaataataaccggtttagctagtgctcaaggaacaaacacatctttaagcagtagtcataatggagatcatgtttgtaatatatgtcacaaaagcttctcaacaggtcaagctcttggtggtcacaagagatgtcattggactgcaccagtttctactgtggctccaaccacggttccaaccgctgctccaaccgttccagcaactgcgtcttctagtcaagtaacagagacagtacaagaggtgaagaaattgaagagaagagttttggagtttgacttgaatgagttgccacctaacgaagaagaagaaagagtctaagagacgtatatatgcaagcaagtaatctttttaactttaaaaaaaaaaaagacaaaaaaataagacttattaaattaggaggtaatgatggtaaaaaggagttgttgacattgtagtatgaagaagaaagagagaaagatattttgattttgggttcttatggtacttttagtgtttggcttttaatcttaatttggtggggtcttttgttaatttgatttgatgagaagatatatatactcttttgttttcttctctcaagctttgatatgtttctatctttcttttattatgcttttggattcacataaagcatgatagtttaattgaccaaagttccataaagtaaaccatcttattcatttcaccatcttatctttcttttcttttttcaaacaaatggtttctccataaatttatgatgataaatattagaagttgctccaattaattggaataccgaactctaggacaaacaaaattgacattttcttagtctatgtttgtagaatagtggatctccaagcaagaccatatacaaatttaacttccactaagaaatgatatgatctattatagttcaagttgttgttagtgtggtatttttttacaatttcttagcatatgttacataccccaaatttgagttttgaaacacaccaaatttgaaagaaagaatcaaatctctcttcattacactaagaaaagagaccaaactatggtaggtccaaatttgtaaaatgatttggatataaatccaaagatcatcacattaagacacctatgagtgagtctaagatgaataataacttcttcttttttttaagtatatttgatcaaattgattattggtttgcaaatctaaaactcttcaagacgtgggcattgttaagtgttgttggaacaaaccaacattaagatggctgtttatagtcaaattgtcaaaagtctccacttgcagctaatgacataagaccacttctatgtgtcatcacaaacaacacaccacacaatatattcacacaactatattgaattcttcttatttataaactctaaagagcttacaatgaatatatattaagaccgactcaaattatttaaaggttatgtgcaaattttcattgtacatgtgaatatctaaacttttttcacttgtgtgtttatatatcttatcttctgtatttcattatttcttatttactaaagaaattatggaaaatgatggcaaagttgacaaagaggcaacaattttatacatacacactgacgtcatgacaatgcagcacgcagaaacacaaagtagaaagcaaagaagagttgggtctattggagccaaaatgttacaatatatataaatacaaaacttgtataaatatagataaaaacagattccatcaaacaaaactatcatgtgggaacagcaatctccggttctggtaacagagaataatacagtataaagagcaagcctaactgtagaagaagacatctagtggtcttaaatgctctcttcttcaggcactccacttcttgaatctctgtgatctctacacaatggttttgtaaatcttgagcttgattctttagattctcagcttttgtttctgctttatcaagctttgatagccccaatgtcttctcttcttcaatcagtttgatccgtctctttaggtttcccactgatcttgagaatatgatatattcaatctctgcctccaccttttgctggaagatgtcttctatcccgatctctgttcctccgttacacgtctctgaaacgtttatggtagattcgagttcacggatttgtgtttctttaacctcgagaatacgctttgcttcttctagtttgatctccagatgctctacattgttcaccaggtttagtatctcggaatctagagaagttaattccatttctcccatcttttcagacccaaaccggtaagaagagcttgcttcactagctccttcgtgtcctgcgtgtatgcaactgctgctttctcctccatcatgcagtgatgttataggttcttctttcccaagctcttggaatttttgaagttctgaaaagggaaaaagaacaggagtttagtcaaactcgaaacacaatcatgttaatattacacggcatcataaggaaccagtgttagagtcattcaagttttagttgattaggactactacaatgcagcaacaatcaaattccaaatgaaaatctgtatttatgaaattgatacctttttggagggcttcttgcaaagtctggaaactgttgacggctactattaatggatccagattgtctgatgaaccattgctcttgatttgagactcttcaacacagtctccttgtgaatagtcttctgtttcttcttcttcttcttccacgttatcctttctcttcgaagtatgtgcgtcatgatcactattttcatcgtcataatccatcattcttcttccgccttgttctctgctactcaaactataggaagcaccctgcataaacacaaagttggagcttcttgagtcagcagattccatgctggaatgagagttttccttctcaattttgatcctttctcctctaagtttattactcttctctacactactcttcctttgttgactactatcccccgaactaatcacactcttcccacccgagacctttcctctatgtttgtcccaagaatgactcattgtactactccgatcctcactgttatccgaatcaacaccagctgcaaaagcaagaccattgccataactctccccacccattacaaaaccaaccacactattcaccgagccaacagaaccaacactatcttgtctaacttcaggtcctggcaaatgcatttgtttagcattcggatcaactaatcctgacaacaccctcttcagagctttactattctccatactcacagaagtatcatccttaacaagatctctccttaacctcctcttccattttcttaaaccaaatccttttgatataagaggagaagtctcaaccggtgaattcaactctttatcaagatcaccaatcaaaccattattatcttcaacagattcaagaacagagctttcactctccaaatccatgacgacgccacaaaaatactaacttttcacatgggatcaatctcaagactaaacaaccaccattccagtaagaaccagaggcaaattcaataaaaccaaaatacgaaaacaaaaatgaagcaatagggttctctaaattcaactcaattcccagattaatcacatttacgaaagccaatgaatcgaaagtttcgagcttgacgtacctaataaaatggaacgcaaaaccactcaaaggtgaatcctttacgaagagaccgaaacgaaattagaagacgatttaaacgattcgcagagatctctctctatatccgttgattgtggaaagtttcgttgcgaaaaatcgttttttttttcccggttacgatcaaaaaacattttgattcgtttccttttttttgtaatagagaaatacgaacgtgtgagcgacatggtcgggacacgtggcgaaaccgctggatacttcagcaactactcggatattttatgaccgttcgattcgacgtgatcttatctggtcggatctggaattcaacggtgtgtgatataccgttaggactttaatatgatctcgactattttactaatttaccctcgtctttctaacttcttcagttttgacgtttacatcttttctatatacagtggttgccgtttttaggtatggaaacaacgagacttatccttgagcgtttgataaacgcttccacatcgtttgataacgagacttttctacatacagtatcaatcttgttttgttcatacgtcacacactccaagattttgatggtaaattttttgtttttgtgtgtgtgtgtgtgtaatgtgtatgtttttaaagtcccttatgattgtagataaatgtgaaaatgtgtggggtaaataaataaaaagtcacaagtggactggtcttggaccaattcccactgtgaaatcagatttcaaatgttgtgtcagtgtacacatacatacatgcaccaccttgaattaaaaaaaaaagataattactcgattatgaggagtttatcttacaaattacaatatactaaaatgttattgataagaaaaattgtcaaatactactaggttactacttatgttatgttagtactattgttagaaatttagttcataatcacatagtggaaggaatttcacttacttagaacccaaaatatgttttacgtaaaatattctcttgacatttttctcctattaattgcagcaatgatagtattatatgattcaatactcaatatagtacaatgtttggagttttctatagaccacaaaatacaaacagtaaatgacaaacaaccaaagtactaagaaaattgaaaatggttccctttcttcaatcctacaacctcttttaagctcaaagttcaatgtcttaaatctgactcttgtctatttaactctcttaaatccaatgtaacccatgttatatttatacttctctaataactcgatcttaaataaaaactggagtcttcttggtaaactaaagaagaaaaaaaaactcattaaaaatttccagaaaatgcagaggaggttgagagaagagagagaggagagctaaaaacaaatgacataaaggagaatccaagattataaatttaagttaattataaaatggtttttgattaagtgggtgatcattataaaatgacattggtacatgtttagacattaaccatctccaggctgcttctctcttaaccatttctttaatcactattttaaaaacaaattaatgtccataagcactttcagatccaactcacaactccagattcttctccctcttcattatcacaatcttctgctcttcctcaaaaagaaacacagagagaaagatagacgagagagacaggcttggtaatgaaaagatatgcaggggaagtgacacgtctttttttgccttgtgtctgaaaaagatcaaacaaaagggtaagtctttaagaaatcatctttaaagatttgactaatatgttgctttttcattgttggtcctagctagagagtaaaaagattcaatcttgttaatgatgatgaacattagaccacaaactcaatgtaaagcaatgatttttcttctgacccgtgacctctccattgttgcagagactctctgaaactggcttggtgttgttggtcaaatctgaagtaagaggaggaggagaaattaaataaagaaaagaagaaaacacaaattgggtttcaacagtgttgtagaagagggaccccacaaaatggaagagttagatacatcacatgcagtttctcagattttacctcaatctcattgaactgcatcaactgttgcattcatgttctgactcatctcctctcagtcccactcacttcaatatcatctgtcagagaaacaccattatgagattcattaccaagttagagagataaagacataaccttttgaagctgagaggtgagagctttcatttgagtttaatttgtgtttggtgaaagaagtaaaaggagtaatgaagggaatagaagaagaagcaagtttagttggtttaaccataagaacttcatcaccagcaagctcttcaagtaagaaaggtaaagaagatcttcttcaagcaaataataatgcttcagattcatctccaagtatcaaaaactctcctttctattcaccttctcttgtgtccccaccatcttctgcttttgtttccgctttgcaatctccttatatatccccaagagctacaacaccctccattaccactcacaagccatcaccgcctctttcttacaaaggctcacaatctgatgatgtaccaagcagctcctacactcctccttctgaccagtacgagttttctgatgaacaaccatcagatcggaagctcaagttatcagcatcttgtactccagatcctgctcctccaaggatctctttctctttccctgttcctagggtttctttggctaaagtctctgtttcttcacctgcaactaacaccaagctcaggagctctgatgtcttcatagggtttcatggacaaaacccaaacttggtgagattctgcaaatggttaaagtcagagcttgagcttcagggaatcgcttgtttcgttgctgacagagctaagtattcggacacacagagtcatgagatcgccgacagagttatctgttctgttacttatgggattgtggttgtctcttgttccagcttgctcaactaccttagcttggaggaagttaggttctttgctcaaaagaagaacttgattcctattttctatggaactggtccttctgagattatgggtcttctcaactgcaatgccatagataaagagtgtaaagaagccattgatgggttgattaagtctcatgagtttaaactagaagctaatgagagtaactggagaagctgtgtgggaaagactgcgacgattctcagggcaaagcttgggaggaagagtgtggctgataaagagattgtggaagggattgatgagcttccatttccgaggaacagatcttttcttggaagagaaaaggagatcattgaaatggagatggctttatttggtaatggagagtatcttgagtctacaacaccaagtaccagaggagaagcaagtggacaatctgaaggacttgcagatgaggaatcagatgttgtaccaactcgaaatgggaagtttattagcttggagcttggaagatgctcagattcaagaagtgaggcttggagtgatccaaatggtgggaaaaactctcttaaaagattgttgaagactaagaagtgtagaaacaatagtaactgcaaaagtagcacaagtgttgtttgtgtaaatggagttccagggattgggaagacagagttagctcttgaattcgcttacaggtattctcagaggtataagatggttttgtgggtcggaggggaagctcgatactttagacagaacctgttaaatctgtcattcagcttggggcttgatgttagtgcagatgctgagaaggatagaggtagactaaggagctttgatgaacaagagtttgaagctttcaagagaataaagcgtgagttattcagagacatgccttatctgttgatcattgataatcttgagatagagaaggattggtgggaagggaaagatctaaatgatttgattccgaggaacaccggaggaacacatgttttgatcactactagacttcctaaagtcatgacctttgacactgtgcagctttctatattgccttcgtctgatgcaatggtgttactgagaggaagaagaaagaaagattacccggtggaggaggtggaggtcctcaagcttttcgatgagaaattgggaaggttgagctatggtctttgggtggttggatcattgctttcagagcttgcaattctgccttctgctctctttgaagctgtaaacaaagttcaaatcgaagaacgttcggcctcgccttttctgaacttaaatgatgagcaatactgcaagtccaatccatttgttgcaaaggttttagctttcagtttggctgttttggagcaagctgagggaaacagaaaccttctctcattgaaaatgctactcgtgggagcttggtttgctcctgtccctataccggttaacttattagctgcagctgctaagaacatgcccacaggtggaaaccggttcagcaaatggaacaagtgtctgagtcacacatttgcttggtgtggtggttgtggtttaggacgcagaagcgaagaggatgctgcttttttactagtcagattaggactagcgaggttaacaaatagacaacctggatgttggattcagttccatccgataactcaaactttcgcgaggagacgagactacatccttgcaccaaaggcaacagttcaaggcgtgaggaaaatcgataacccgttgttgaatcttgatcacctatgggcttcagctttcttagtattcggattcaaatcagaacctcctttggttcaactacaagccatggatatggtactttacatcaagagaacagctcttcctttagcaatcacagctttcacaaccttctcaaggtgcaactccgcgctggagctcctaaaagtatgcaccaacgtgttagaggaagtggagaaatcatttgtgtctcagatacaagattggcgccaaggctcgctctgttggaagaagaagactaacaagaaagtcgatgaatacgtgtggcaggatgttacattgttgaaagctttattgctggagaccagagcaaagctgctgctacgaggcggacatttcgatagtggagaggaactttgcaggacttgtatcagtatcaggacagtgatgcttggccataaccatgatctcactttggctgctcaagaaacactagcaaagttagtcagaatgagaagcaagatatgatgaaaccacacacaaaaacatttctcctggttattatttccacattactactctaagctcagttttgttgaagacatcaaatcatgtaatggctatttttaaccttttttagaacaaatcttattcctatgtacattaccaacatccttattgatcattgtctctttgtaaacgcattgaattctcaagccaaaaagctctaaccgataagttaaccaatcaaacaaaagagataacacaatctcagtaacaaacagaattgaaaaaggacaaatactcgtgtaagaagctgggaccaaagacaaacacagaaaaataggtatgggcttaagtaaacatgcaatttaatcagtgtctgggttttgccaacaagtgtcactctcccctcttctgttactggtccccggagttcactgctcagttttgtttccttttcaaaggactaaaaattctgacttgtcatacaaattgagcttaggttttatctggttttggttaaacacaaagttagtcagaatccaacaaagcaaaagcagattattaaggtattgaattgacaatcaagagaatatatgatctcttgaagctttcagatttagtatctaataactaacagtcaaacactaaaagctgtgactttaagatcaacaagttggtctcaagcttcacgacaaaactgtcaaagctgttgtgagatatgtttgcttgaagcaagacttgatacattgtatctgaaatcagatgtaacatgtgaagaagaatggatagagcaagttgattccttcactgtgagaccaaatcaaacaaaaacttattcattcttctcttttgagttcaatccaacacaatatcaacacgaaaaattacaataaatcaaacaaataagtaaaagaactaaaataattgatgataaaaaaaattaaacttatgtcacaagcaatcaaggaaaagtaaatttagggtaagaaccaaatatcatcggagattagacccgatcaagcctccgttaatagcatcatcttcctcaaggaaaagctcatcggagtttctaaagacggcgtgaataatgcacaatagcaagccaacgctaacaccaacagctaaattcacggcggagttagtgaaccatatagcccaaacggaagctaagactagaaacaacaacaccgtacgatcaccgacttgaaagctccagagaataagtggatcttctctgaaaaagtgaaagataagccacaaggcgatgattgcgccaacgacgattaaagcgacgggactagctgtgatgagagcgaacgctgcacacgtggagacgatgatagtgtagttgacgaaaaagtagttgaaattcgtctttgatcggaggagaagagaggaaaagctctccgggagagagaaatcgccggagaagatgagttctgaccagggacggtggctagagatagcggtagtgagattatggattgatcgtgagacgacgtcgttggtaggaagcggaattgatatgtaggttattggaggaggagaaggagtcattctcccggcgagttttccgattttgttgaccggtttgacccgacccgaaatacaaccccgtgcatatagctggggctggctaattaaagaaaggtgtttctaacgactttttaagtcaaccaccacattattcttttcaccaaccaatcaaatttcaacacataataaattatgttactttagaagtttaattgatctaacaaattaaaatgtaaacaccaataaaccctaaacctttcaaattgtaattggattaagttaaccaattctatttttaaattagtttgtggatattttaatcgagttaaaccatattggtctaaggttcaagattttaccctaacttttgaccttttggtggggataaaagcctaaagttactcatctctcttgctttataggattgagtcttctgcaattaatggaagaaaaggactttcttaccatataaaacattgacaatagccaaaagttaaagataaactataagtttataactttagttggcattaaaagtctgaagttacttatccttctacagagtgttattttcaagtgtttgcttttttttttgtaaacagtaaactactacacagtctctgcagaaagagatgaagcatagaaaatgttgtagaacatttggaatctaccttaaaaacaccaatgcacccatgttcgatgatcggttttcgaagagaacccacttcttggttgcttcttacactgcatcaaggttgaaactttactttgcggtgatgactagctcggagaaaagtatcttacatgatcaaaattgtttctgaatgctgcagcttgtgattgttgttgtgcttgaacttgtggttgatgtgttgaatcgaaactgtttcttaagtagagacctgtgttaaagtataagccagttccaccacaaggaggatcaacaaactgaggatttggtgttaagcttgaccgggatgcttcttcatctgcttctccttggttcatgaccatcaagtcttttcccattaaccttaaaaccgggttagaaggacttggaggcacaacggcgttgagactcttcctgctggagaacttactcatctgaagatccaaagcttgttgggtcttgtatggtgactgctcaaatggatgatttggatccaaacgtgtgggtgaattagttaagttcatggtgtttgacgaagaagctgctcttcgctgcagcaagtgagatccttgatgattcaaagtaatgccctcggagattctctcttttctttggcaacaacaagactcttgatcattgtttctaaatctggaaggtgatattgtcttgtcaatggtaattggctcagcctcagtgattgtcccatgatgagatggaacacaaaagctcatcggggttgttgagtaggacatggcaatatccggggagaaattttctcggaaagaagataactcagcaggaaaattcaatctaccagctgcaaagtttgaaacagcggaaacaggtgattcagatgagtttctgtcaagctgatccatggaagattgaacctggcttgtaataaccgacgagttcccaagattttcatcaaaacccatatctctaggacttggtaaaaatgatcctggaggtcctggaataggaatggtatcaacctctacaaataagcttccttgtcctacttcagaatcaaacctttcatcctccttgcaagaggtttgcccgtaaatcatattcccagcttcggagtaatacattgctcgctcgctgggtaagatttcaatagatgttggactgtctgactctgactggtagaactcagcacctgtataatcggtttggtccaacacatgagctcttttgttattatctccttcctcttcactactttcttcgtcatcatcattataatcatcgtaaccactagatgaaggatttgatctcagtaagacctcattattttccccatcatcaccagaaacataatcatcatctcgcagctcacgttcatgagtcatttcagattcccatttccctgtttcttcatcatctttttcctcagagaaatccaaccgagctttctttagctccacaggcatagatagtcgtctccaggcatttggtacaaaaggtggggaaaactttctcatgctagttccacgaggagatgcatctgagcaaaacttctttccaggtggatacttatcttcttgaaatgaagcaacgctcttctttaatcggtttatattaactccctcaagtgactcatcctctttttcactctgagggactctaaatgaacgactttgagcactttgactcctaaacaaagtcttttttcgtccagcaacttcgctccccagcttctgtttctttaaaggataagaatctgtggcagacaaatcagtacctctcaacacagtaggatctcctcctgaccatgtatcttcatcatcttcagataattcatgtcctttctcatttagcttctttgaaaccagaccacgttttgctagcatccgttgattatagattctacgatgatgacccatgtgactaccttctccagaaaaccctctttgcactccgcgtatctgctgtacaaagcaatgtaactgttattttatgatcttgctacaaaaaccagccatgaaaactcaaaaaactaaagacagcaacctatggaattacctctggaccatcggctttgtgattggttagtttaacaaacttgtgaggtttctttccacggcgaattttcctcaagcttttattggtccctttactaccttggcctaaacatttcttatcactactaccatcctcatgctgctccctcaacggagtagtagaactcttcttctcgctgaacccggataaaatccgcaatttctgtcccttagcatcaatataaaccggaccaacaccaacaggcgagactttccgcttcttagacacttcagacttatcagcaacaactctatttgaataactcaaaatcgacacccactttgttccatttcttctatcaagatcttctaacgtgccttgtttcgcagaagcgtagatatcaaccattgttttaactttcacccgtggtggcttacttctaggcttgtttggcttactaaaaacaaccggtggtagtagtgctgagtcaacagacagacactgatcgatgtgagcattcaaagttgtgttagaagctgaagagaaggttttgcaaataggacatgtttttgaagccattattgactcagaagtcgtcacaaggccagcacaactatcttctttagatttcaccatccctcgtccacactttctactgtggttgtccttcttgttacttgtagtagctactagtatctctacttcagacttggaaacacttgtgctcggaaacaaaccattctcgatgattcttgattggctacaaactcctttactactagtctctgctactgtctgatttaacccaagtttagccaaatccaaatctcttccttgatgaacataggatgatactatttgcttcccggaagacggactagcagtggtctcaaacttgctacttactgtggaaaacttctgaaacggtggtaaaggattagttacgccatgagttgagaaaagctggagactttttgaggaaaatggccaattgttcttaatgttgttcttcctgttactatatgcgtaatctctgcaaagcatcacatagataaaacaaagttgattactttcaaactctagaaattagagataaacattaacacaagataaaactcaaaaggaagcatatttaaggaaattttgagaaaaggaacaaaatttgatgatactgatttctaatcacagaaatcacagaaggtggaagaagaaagaaagaaactttgaagactgacccattagtaattatactacaaggaagaaagaagaaaagcttataactttcgatctcgagctatgatttgacactgacccatcatgaaatccagagacttttttttttgtgagacaaacaaaaccatattggcgaagaaacccagaagaagaaaatagattcagaggaaaagaaaaaggataatgaaatttacctgatggagaaattggagagatgggattgacctaactcatgggaagaagaggtgagatgttgtaagaaaggagaagaagaagaagaaagtgggtcatttggtgggttctcagtggataagaacatttgattcttccactgttactatttgcctcttcgtttcccaaatacttctgcataacaccagatcttctttatcatcacctatccaaatctgactcttctctttactccttctgcaaagacaaacacaagtacatgttactcagatttgatgatcttcttagtagaagaacattatttcatgtggaagaagaagtcacacaaaagtaactaggattagtggataaagattatttatttgattttgatgaagtgaaatctcacttaagaggaacaattattcgcacgcaaaaaaaaaaaaaaaaaaggtttcagttaccaatctgattcgagagagtttattttatgttgagtgatcataagaaaaagtggattaagacatatccgtaaatggatgaagaagctaccaaatacaataatagaactcaactaagtaatataaacaaaacagatggtgttcttaaacttcaagatcataaaacatttgtaagaagaaaaaacttgaagattcttgatcagccaaaaaaagacaccatatggatttaagaagtgagaaatcaacaagagatgagatttataacaacacaaagaaagaaatctgaaaatctagaaatcaagaaaccaaaacatgaaaagccaagatcgggaagaagaaaaaaaagagtttgaggaaacagtgatatttttactcgtaaatctatacatatgcacacataccaatctcgtagatttcaagatttggatcttaagatcaaataagagatcaaagagaaggaaaaagaagagtaactaaatctacaaactttaaaacaaggacaagaacaagaaacgaaactaagtgttgatggatttgatgaaacgaaggtatacacaaacctttagattttcttggcaaaagaagaaaaaagtggtttcttagagagagaagagagcattgaagagaagaaagagattgagagagagaagaagaacgaagcactatagaataaaataattttggtgttccatataagtccacatacgtattatcactaaatgtgaataaaataaagaaaaacaaatgagtgcaagacgaagaaatatatattgaaagtgtccacactaacttcaattattatcacactccaccatctttttttttttttgatcattttcttttgtatagattttgatatagctagctaaattatgaattgtttgctaacattctcttattccgataaatgttttacttttgttgttggctttctatgcaaaaaggacttgttgtttcttaatcacatattgtcattagaaaaacaaaatagttaagatacatgcaatcaaaaacactgaaactaaaatccttaaaagaaactaatggttaatggttaaacatccaaataactcattatataactgatgatttgtaaactgtaaaaataattttttaaaatgttatggaatatatatatacaaaaacatttatacgaaaaataatctaatttcaaaatataaaaatgtaattacataggtttcataataatataaggaatttgaatataaaatcatcatacctttgttaaattcattttacaatccaatttttaatagctatccatttcaagatctattaaagttgtcctaacaaaactaaaaaattaagctcaaaaatgaattaccaagtagcaatggatgtggggcccacatagcagacaagcaagcgacacgtcgcaatcacatcaatcttaaaaaaaaatcttggggccgttgttcctccactctctgtattggattattaatttactattttaacctttttaaccaaaggcaaatcatttgtacgttcgtgaaatcttatttacgaatttcgtacaaactcacacgcgcttagatattttacctttacttacacgcgcatctacatatgttcctatccacattcaatacaataatatcaaattaataaatatttaacctttattctcttattttttgtggtaattgttctcttatttttgttctagtataattctatttactatatgtagttttgaaaactcgaataaacttttggatatagaattaaaaaatttacatagtttatgttatcttcgcctcttcagaggatttatgatagaaactataaattcgaaaaattaaataagcaagcatgggaaaaagcatgaacacaaaaatatactaaaaaaagggaagtaagaatatgcaaaagtggtgtatacaaaatagttagtacgtcgattcgacgtggacgaaagagattaacccaaaccaaatcgtatagatagtgtcatgcatgcaatgtatgtatgcatgtgcacaatcttttaattatttcatccataccgtatacgactttgtacttatatctatatatttatgtatatgagggatcaaaggcatttaaaaccgatcttcgattcgtaattagcataatatatgcctcgacagcttcgtgtaatatcaatgctatacttttatcaatttgaatcacgcaaacatcgttataagcgagagaagacagatttatgtgaggaagacttctcggtcacatctcaccatttgattcatattcttccaaacatctcatgcttaagcactaatcaacatttgatcacactcttgagtcttgagttgtttgggagtgtaaaaatcaatgagtgttacatattgtcgggatacaaattctaatgagaacctgaattaagaagagtttatttggatattgatcagtggcacttgaattcgaatctgattgattagtttggagtttggactatggaagttagtcaagttacatatgattatgtggaactcgtacatgaaaacaaattactacttctcttggacaacttatcaacaaattaaaaattagatttaagtttagtgacaatgttaggagatttaactaattttatttcttagatgataacttaatggcaagaaaatgtgcaccaagttaatatatttaagtcataacatctcttgtgctcttaaatatgattagaccaacgatttaatttttatattgcgtaatggaggaccaaaaccaacatttagtttcttgtttaatgttacgatgttcacgccaaaataaaataaccctctaagtgggccccgctttaaataatactatcaacataaattctaaaaaataataacatgcattccgattttctcttttttcttctgtttttttggccaacgcattccaataactctatattctttttttgatatagtatagttcaaagtgtatgttgagagtcgtatgccagtattaattgatttgtttgtataatgtggtttcttatcacttagtattattttttcaactatatatatatatatatataggtagttaaactacattactgtttacggaaaggatacaagttgtacaatgaatccacatcttaacatagcatacataaaaaaaagagtttatatttcaactaaattttataaattttggatgaacctagtgatacattaatatgacttgtgtggcattattacgaaaaggataaaagtttaacaactaaatcatgtatcatgattcatgagtcggcccttgacacagttgcaatgaggtaggtatattgttagttccttttttttggtttaatgttaaattatattgttagttcttcttaattattatttaattagaagaccacatcttatgaatttcttgttatattgtttaaaatacgtttcattattcttttttttcaaactaatatatttattgcttacgtcgactaaaattttctctcaattagaagaagttagatgacaacctaatattcattattattttgtcggcgcctaatttatattaatatacaaaaatttgatatattttgttaaaatgagaattgtcaagttcagatatgcaattatgtgataaggaaaaaattggccatcaaactaaatatcaaagtttttttcgtcaatatcacttttcaatgttgacccaaaattaaaaaaaaaagcttttaaatattagtgtctttcaacttttcaactagtcgttttatcatataaaaattctcaaaattctttctttcatgataataactttttccaaacggtcaaatgttctcacaagttgtaattattttggagttagtggcaatttcaaaaataaaaattgttgaattttaggaccaatattgcctttttgatgcaggagtctctctctcaaaaactaatagtataaactgaaattgttgtggatggatacgtgaccatttattctacaccaagagagtagtgctcaaaatttcaaatcttgcaacaaaactataagctacgacttacgaaccaagctacgtattatccataaagctttttcgaataatctctctataaacagcatttgaatttggatctataacatcatcggagtaacattcttctaactaattgaattaccaatgcatgaatcattaatagtatagtttgcaaatatttgcttataaaactttttatggaccggcgacaaataataatatacatacatatctatgtatataatcgtaagtgtgtctatatattatacagaaatgtgtatcaactaacatgtaaaacaaaagaagacatggagtgagagaagcatatgataataagcaaatgattttgaaaatgcgcatgcaacatagccgttgtgcttgtactcatctctacgcaaatatatttcattattttcactaaaatattctccctatttttatttaaattttcttgtaacaataataaaacagctcatctacaccaaatgcaactatttctttttttgttgttttgtataaaatccttgtccatctaattttgacattgtttacgctcaatatcaatgtgtataataaagtctatatgtttgcaatctaaaataaggaatgagtgaggaaaaaaaagataatgaattgcgtatacataataatgtatgtcatgacggtgactatgatcttgactacatcatatgatttcaaccatacaaatatttatatctaaatagagagaattaagcatcatgatgttaactcttatataatttattttaaattcgctttcataacattataattataagttttcatccttaaaacttaaaacaaaagtgggggtccttttaccttagtggagttctcatatatatcatcctatgaggagagaatttatctcagtctcaccattgtctttctaaagcagcctttttgagattctcaacctctttattatagagaaacatgagatcttgaggtgtctagcttctcaagatctcaagcttaaggaaaatgcctggactttgatctgaaatgccatggaatattatttagtatcttggagagaagtagagttcttggtctgaactttcatgggatgttgtagaagcttgtattggtgtcgaaataaccatttccgctgtaaggaggatgaagaagattaacagaaggagacgcttgctgtgtcttagaaagatctagaaactgagaggttggttttggacttgattcgttgtgtgaaggctcttctctttggttaataaccatcaaatcctttcccatcagccgcaacaccgggttgggagttgaaggaaccgcaggcacagacttactcaggaaatccaaatcttgttggatcatttgtggtggtggtggttgacaaaatgttgtatcttcaagagctttctcctttctttggcaacaacatgattgatcattgtctctgaatctggaaggtctcttgtcagtggtgatgatgttatgaagacttaatgtctgtgtttcaggagctgcaaagtttgaaattgctgaaacaggtgattccgatgaatttctgtcagtgagatcaaactgatcttgtgaagagtggacttggcttgtgataactgaagagtttccatgatgttcaactgcatcagttcccatcatatcccaaggacttggtaaaaatgatcccggaggtcctggaataggaatgggatcaacctccatgaacgagctttcttgttccgcggtttcgcaaccagttttctcataaaccatgctttcaaactcaacatctgcatctttagttttgtccaacatatcatcacctcctttgttatcaccagtctcttcatagctttcataatcattgtcttccccgctaaacgaaggatttgagcttagcgcaaccttatctgtttctccatcatcatcatcccaaccatcataatctgacagttcacgttcttgagtcatttcagactcccatttccctatatcttcatcttcattctcagagaaatccattcgagctttcttgaacttcatgacgcctctcgccacaggtgttaaacatctcaagggatttgctacaaataaatcactttcaatgcttctgttcctagacaaagcccagctctttccagaaacttggctctccccacaaactctccatgaccctatactgtttaaaggagaagaaactgtctcggacaaatcagtactcacatgacttggacttcttaacacaagaggatcttctgacaatgaattccaattctcagattcacaaatgtctgtcccattcttctttccatgccttgaaagagaacgctttgttagcatccgctggttgaatattctaccttgaccaggacctgaagtttctgacctctcaaagtctttaccttctttagaatatcctcttcgatactccggtatctgttacaaaaatgataaagaaacttgtgttactaatctaacaaccaaatcaagaacggatcatgcaaaggcataattacctctgaagcattgcttttacgaacagtgagttttctgttttgaggaactagtttacgatgcttgtaatgtttctctccccaaagttttttcctaaagcttttgccccctttaccttcactagaagatttcttctcacaaacttcttcatgctctcttcttgatggatcagaagctttctcgttaaacttagataaaatccgcagtttttggcccttagcatcaatgtaaacaggtccaatgccagcagcatcttcatcaatgcgagcacgcgacacgcttcgcttctttactttgttggacacttcaggcttatcatcagagacaacacggttagagtagctcgaaatcatagcccactttgtgccatttcttttatcaagatcttctaatgtgccttctttcgcagaagcatagatatcagtcatggttttaactttcaaccgtggcttagtcttaggcctgtttggcttacgaatcggctgctgccccgagtcaacagacagacactgatcaatgtgcgcatttaaagtagtgttagaagcagacgagaaggttttgcagatgggacaagttctcaaagccatagaatcagaagctgaaaagaggctactatgatcttcttttccaccactatccacacaagctccaggtttcactatcaacccacacttttttctaggattcttgttaaccatagctacttgtattttggatttcgaaccactcgccaacaaaccattctcaaatccttgtttagtagtctctactaatatctgataagagccaagtttctctgactttctcttgtgacttaccgcttccacatgagttatgtttggcttcttcacttcaggaggctgaatcggtggcaatggatcagttaagccatgatttaaacaaagttgcaaacttgttgaggaaaaaggccaacttttcttgatgttcttggtccggtaactaaatgcataatctctgcaaaaaacatcacaaaaaccaaatcatcaaccattagtagtacaacaaccagacaaaacataggtacaggcttttataaaaaaaaaaacttctgagagacatgacacaacaaagaaaagtttgttctttgatgatactgagactcgttcagatcatggaccaacggatcaaagaatagtcaaaactcaataccattaagctccacataatcacagaaggtgaaagaaaaataaaaataaaaagcattttgttttgaatctgacccatttagcaaaaatgaatggatgagaagaaaagatgtatcagtaatcaaacctaacaagaaagctaaagactttaagcctcctaaaacaatggtgaagaacaagaaactgttgacttcttctccataaaacccccaacaaaatcggagaagaagaaactttaagattacctgatggagaaagttgaaagatgtgattgacctaactcatcacaagagttggtcagatgtaagaaactagaagaagatgatggattgttattagaagggcttctttgatcagtggatgataagaacatttgattcttcttccactgttactactattcacttcttcacttttatcaaccttgtcgtccctgctcttctgcataacaccagatctttataataccaaatctgagagcctatgaaacctgaaaaagagtttaaagtttaagtctttaaaacccagaaacttgagaagatcaagtaaaaaaatattatttcatgtgaaggttagaaaaaaaacagagaataaaattaggattagtgggtgagattttcaagtatatgggtttgattggtgaagcaaatcacaaataggaacaatcaaaagagttggtttttaattcttcaaagtttttcccctaaaaacaagcatcagtttctaatctgattggagtgttattttatgcaaggaatcatatgaaactcaaagacatcacaataagaaactaatagatcaagacacagaaggtaaaagaacatacatttggtgagatttaaaccaaagttcattgagatttatttttttttctaaaaaaaaaatgaacacattgaaagaagataatctaacccttaagaaaaactataatctctacttatggatgaaccaactggaacatgagatttaacaacaaatctgagaagacaatattaggaatccaagaaacaaaacccttttttataatgttatgaacagaagaaatggatcataaaatatcaaaaacttacagaggattaaagatatatacttataataagcatacctatttttgaagagtataagtttggatctttgaaacttaataaagattcaaagtaaagtaagaacaagaaactgtaaatcggtgagacaatacaaagaaagaaaaaacaaagaagtaggaagacgacgaagagagaagaagaagagagttgctaaaataaaagtttcagataaaaattatatcagtaaatagacagaaacctttagaggatttgattattttcagaaatagtttttcttggcagaagaaaagatttttgttagagggagagagagatgaacaagaaccacgcactaacacatcaaagtggtatcaggttccctaagtattaaataaacatactgtttacttataaaataaacttaaagtaaagaaatgtttaaatgaatttttttttttttttcctcgtcgctgttcctttcgtatgtctgtaagtgagctgtgtgaattcctaaatagttgttttcatttttcaaaccatttttttaatgctgctaactttatttaaattttgggctttgaactgaacgagacaagtagaggctgctgctaactttttgtatcgtgttttttaagaagtggtttctactttctatcattgtttatacaaaatgtaatcatgtttcgaatttttaatttatggtaaggtaagaaactttagttataaaaaataattaagaatttatgtatgttcttgttaattagtataaatttttgtattcttcgaaacccaaagatatgaattgtggaggggctagaaatgcttttttttttcctatggatgattcgaccattaatgaaaagcaaatgaaatcttgacttaaatgagggttgactcactttagttttgggataaagtcttttgaaaagtttatcaaattatgggaagtttccataagaacgatcgagacggtttgtgaacaaatgatcgttcggttctattatatgaccttaattaagattgtttcttctgtgatatggctatggaataatagatagatgaatctatgaccttaggcgatataagatcttctcggagaatattaaggtggagcatataacatgcgtggaacaaaccaatgaccatgatatctttgagatgagatatgaaggcatcggccggaaaaatttccaacgtttaaagtcatagaataaatggtcgaagaatttggaatcatggaaatgaaagaaagtgattttgattcagaatcaatggtttttattgtcctttttaaaggtgaaaataaataagaacatgatgtcttgactgtttttgagagcaagccaaatgtttacgaaaaaaaggatccaattgtttgaaaaagttggtcatgtatatgttagtgcatatagaattatgtaggcactcataaccactttttctcaaaattacaagttctataaagtataaaccatgagatatctcatattttgatctttttaaaacgaatgtatcaacagccagaattatcgttaaatcatcaccttattaagagaaattaagaaaaatcatagaattaaataagagaggatagtgccattttgtggaaacgtgaaattatggttttagtcaaacatcattttcctcgttaagtcatattccatgccctatggacttattggaggtcccataattccttcgctacacgacactattctttttttttttttttggtgaagtaatgaatgacaaattgataagtaatggattcaagcaagacaccaaaacaagaaaaacaaattatagcttcttaatcgcaatgataaatctaaagagcagccgtttttagcttttgattaataagttccatcaaattagattgagaaacaagtggtcgtggtataatatattcgtgtctaattggaatcaattatagatttgtatggtctagaatttacttattttagtctagagtgtcatatcatccaaattattttacaacatcaatatgtgatcaaagacatatttcaacatataatttaacttttgattgagaagattcgatagatacaaaatatgctagaaataatagacttattgtagatcctatgtataaaaacaaaggagtgttaaagagaaaacatgaaatgtccacatatacgtcaaattatcaatggcatgaacatggtgatggtgtggtctgtctaactttttatgatgcttttatttattaatgtgacggaacatattaataatatagtttctctagcattgaataatatatatgtttttattctttttattattcttgggaaacaccgtttatttttttttattaacggggagcaccgatttttccgtacgatttcgaagtgtgttggtcgagaaaaatgagtgaaccgaaattaacgtgacaagtaaatctgatcttgttttgtttggttcggtatgaattttgttttagtttgaaatggtgtttttatttttttggtcaaattttgaaatagtattcattcatttgtttcaattccataaaagtagtaattggtccaccacgatatgtattctttcaagtttcaaacctcatagcagaattttgtattcaaattcaagtaaaatagtacgctcttgtgtatacaattataatttatacatgtctatcaattaaatttcaaaataactaaaatccattcgtacaagaatcattacaatgctggaagacgaaaataacatctttagaaattatatccttgttgtataatgtattcactgatacacatgttttgacttattgatctctttcaattcaatgaaagtttcttatacatatcacatgatccaaacttgttgaactaaatagacttttattttgtaatttcataaaacgtaagtatattgtaataaaaatgattatttggagtattaaacagattcttaagaattcgaataaaccaccttgctccaagaagctgtagtctcttagcactatcacggaaacgttctgactcaaacagagagttcggtcttggagatcaagataccatcactatcagcatatagccactctccatctctaatcaaagttcctccaatatgaaccggcacattcttctcaccatgacctttcttagtagatttcaacgggttagatcccaatgccctgaccccaacatcgcagtcattgatctcatccacatctctaacgcatccattcacaacaatccccgaccacccgttgttctgagctaactgtccgaggtttcctccaacaagcgcgcatctcatgcttccaccaccgtctataactaagactccgccttctcctttcgtttctagttggtttctgacgaggacattgtcttcaaagaccttgagagtcacgattggtcctgagaagcatcttctttggccatagatcttgaagattgggtgaagagcgcgtaagtctccatttgatattagttctgcgttgctgtcacacgcttctgccgttgcaaatgcagccatgggagattctgtgtgtgttctgcatttggaatcacaagacagataagagtagggaactgaaagaaaaaaatgaaaatagcaaaataaagtaaacatagaaaatagttctcattctcttcaatatcaacaaacaatttgaaacttcttctttaacatgaacaattcgtgtgatttaagatgccaacaagaggtattcatcttgttactgacttaaaacgcacttgaatgctgatgacactgagagaagcatctaaaacaaagtaaacaaagacatgtgcaactgtttgcatacaaacagtgttaaagccagacttggaagacaagaagaggttgagatttgaatcaaatcctcagactcaagaaaagagagagagctcaaattacaaacaacttttgaaatgcaatgaccttaaagtttctaacagttgactgaattgatgactgtttgcttgaatcttaagtctgatatatgtaagtacgaacagaagttttgtgtattgtatagagggttgagccagatgctataaacaacctttaaatatttcttccatgacctacatatgaaacgttaaagaaacaatgaaatatcgaaaatcaaaccccatttgtctaataaaacaaagctatttgaaccttatagtatgatttgtttccatttttgtccaacgaacaaagatccaagttaacttatacggcggaagaaacagaacctaatttcactacataacagcaaaatccaaaggaaccttccaagatttctataattagacattaaaaattagaagtaaaccctttgaagcaaactcaattgcacttaaacctggaaaaaacacagcctttttttggggggtaatatgtaagaaatgaaaacaaaagcagctgagaagacttagcaatcatcacaacaactaaacccatctcaacaaaaattgatctggatttcaacaataaccaaatcgatcataaagaaaaaatagaaaatttaccagaggcagaggttagagctccaaagaccaaagctttcggctttctgcaacagatcagagtcccaatttctcaacgacgatactttcatatatttacacaatcaacccaagtagcgagtgaggtcagctttctcgtgtcaggctatccatttactgaaaaatcctcatagaagctt

SEQ ID NO: 911 - DNA, 87685 bp, Arabidopsis thaliana
gatctcatttttcgttgggttttgttatttgcttgccaagtttcgatttttctttccgtagtgttagggttttagacgttcttcgattatgtcaagtgatttggctgacaattgtttaaaggtttaaaatttcctgagaatttgaagaaatgttgatgattggtgatttgttgtgcaggaaaggctcaaggagatacctaatgcaaaccggtcaggtcctcggccacaattttactctgaagaccaacagataaggtcacttcctggttctgagttagatcagccacttctgcaaccgggtgctcaggttaatgttgtggaaagttttggttttacaatggtagtattgactctgattatctagcctctgtgatggctgatgggtttgcaatttttacattaggggtcagagttcttccgtggttttcgctctgttgatcagaatggtttgggtgcagcttgggatgaggtacagcaaggtggacctatgcctccaatgggacctatgtttgagccagttcagcctacatttgaaggtttgtgatttgatctataccacttttatttaatcccggatacaaaacggttagatgtagtggttttgatattgaataaaaggtagtatatattttcacatattcatcttgaatcgagaagtacataacattatttttgtaggaagagaagttaacactgaaagtgttagttagtaatttagtatagcgacatgaaataaatagtgtggtcatttctttccatgagtcctatttctcctgaatgacacgttgaatattcatagctctgtcttagttatatagcctaatgtcgagtgaggcatttttcgtttgcttgcttgattagtttttccattgcttatatattgcaggacccccacagagagttttatcaaactttctgcattcatttgttgagagtagccgtggtggtattccatttcgtccagcacctgttccagttctaggattgtcacaaagtgacaaacaatgtatacgtgatcgtagtagcataatggcccggcatttttttgccgataggggagaggaatttattaattctcaggtttgccatttatctgatagtgttctgtagctgcaacattgtgttatatgctttcaacttaggttttaagggtcgagtatatacttaatattttggtgttatatcattcatgcccattgcccttttgaaatcaagatctattcaattatataacgaagtgtaattacaagaaagttcaggtccactctccttcatcttgagtttaaatcaaaatgtaacattttggaatgcaacgaggtagcactgtcactgtcatatatcacaatcatctgtgggtcagggcttttgtttgggaattatagctgttgttttacttggtaattgttcctatctagtatggatttctcgagaccatgccagctgtgcagtatagttaagccttttgtttgttgccgatggcctaagccgttttctcttctccatgtcgttggctgaatattttgttcggcattgtttttcaaggtaaacgcattattgtcatctttagatattgatgatgggatacaagctcgaggtcatgttcccgggagatttcgggagctagatgattactggaatgagtctcaagctgttgtgaaacctaatttacatcctgctgacaattgggcggctgaatttaaccaacatgggatggatcatggtggtcctgattcatgggtccagtcttttgagcaacaacatggtgtgaatgggtgggctactgagttcgagcaggtaactagcataaatagctatatgatagaaactttttccttcagttgtttgaaacttctctttgattgcccatcccaaacatatgtttataagctttcaatgagtatcaaagacattatgagggcatttattttggtagtgtagactttgatttcgatagtcactagggcatagttgttcacaagcctgaatctgttgtgactttttttatgctgtattagtcatcagtgtttgagtcgcatttgatatcccaacagcttggctttctgataatttatcatgttcttctgaaaatatttggcgcctcatcctttttattttcttgaactttctaaagggtcaatctcaattgatgtcaagccaaatgagaagtatggatatgcaaaatatagctgcaatggagcagactcgtaagcttgcccatacactatctcaagatgggaatccgaaatttcaggtcagtataacctaccattaataattatgtgctttcgaagtgaattccttcatttctaaacagcctttgatagtagtatcagtcggtcaggttgctgtaaactgtactgttggacgacatatctcttttctgggctgtgatcttttactgaacatagaatttttttttgttggtctatgttctagaattcgaatatctctgaaatcatatcacaaattttaattatgcttttcctgttgacttcatgtgctgagctgttctcgatttatgtaaaacttggcaaacatgtttggtgaatgcagaattcaagattccttcagtttgtttccaagatgagccgtggtgaacttattattgatgagaatcaggtcaagcaagcttcagcccccggggaatgggctactgaatatgaacagcagtatctggggccaccaagttgggctgatcaatttgcaaatgagaaagtatgtatttatttaatgaagtatctgttcactttagggtcttacttgccactttagcatgctaatgtaattgatttattggtatacctttgtcttggatggcctttgtatccgcaattgaagctcatgatgataggtttagtaatctcgtgattttatatctgtaacctctctatagtggaaaggcttcagcttagatctctctttgcacatttttccaatggttccttatagttacagaatctgaagtcctgacatgttagaaagtatattgacaacgtatcatctcttttttctcttttataagacgcatcaccctgcatctaacataagcttctactttggtgtgttacagctttcacatggaccagaacagtgggctgatgagtttgcttccgggagaggacagcaagaaacagccgaggaccaatgggttaatgagttttcaaagttgaatgttgatgactggatagatgaatttgctgaaggtcccgtgggtgatagttcagctgatgcatgggcaaatgcttacgatgagtaagtccactgtactctaattgatctataatttaagttctcttcttctttttttcattcttcacaaatcttataagttccctttcaattccattctgttatccttgtgggggtaggtaagtgcagacacaatgggtgttttcaacttatttgttacttttcccctatgcatttctctctggttccttaatccttgcttaggcgaacctatttttgcaactatgcagtttcatatctaccattatgattcgcctgtttaagggattatttctgataacctcctaatttttatctatggagtctaacaatgtttatccaacatgcatctttgacttttaagttcatctaacaaaagtatgtgcctttctaggtttctgaatgagaaaaatgctggaaaacaaaccagtggtgtctacgtcttctctgacatgaatccttatgtgggtcaccctgaacctatgaaagaagggcaagaattgtttcgaaaaggacttctgagtgaagcagcgcttgctctagaagctgaggttatgaaaaaccctgagaatgctgaaggttggagattacttggggtcacacacgcagagaacgatgatgatcaacaggttagttagattaatttgcatgaatattaatctcctataccttatcaaaatgatgaaacttagtcaattttcaaaacaattgtcgttgtggatgcaggcaatagctgcaatgatgcgtgcacaggaggctgatcccacaaatctagaggtgcttcttgcgcttggtgtgagtcataccaacggtcagtgcatgttatctagcaatatgtgtttgttttgttcacatatatggatacttgtggtcatacattttttggaattagattggtaattaaaatcttgttctctgtaactacagagttagagcaagcaactgctttgaaatatctatatggatggctgcgaaatcacccaaagtatggagcaattgcgcctccggagctagcggattctttgtaccatgctgatgtaagtgctctttcttttctaaattctccacagttgaatctcaatatttgtattgaaacttgaattccttgtctatgctataaacagattgctagattattcaatgaagcttctcagttgaatcctgaggacgccgatgtgcatatagtgttgggcgtgctctacaatctgtcgagagagttcgatagagcaatcacatccttccaaacagcattacaactaaaaccaaacgattattctctgtggaataagctaggtgcaacgcaagccaacagtgtccagagtgctgatgccatatctgcttatcaacaggttctgttctacgcacagaaatcaaaacttctcaaagttttatatttccgtctctttctgactgtttttttacttgcaggctctagatttaaaaccaaattatgttcgtgcttgggcaaacatgggaatcagttacgcaaaccaggtttgatttcagtctttgtttcttgtttgatggttgtttatggactggaaccaactgaaatgtggtatgctatcatgtttgttattgtaacaggggatgtacaaagaatcaatcccgtattatgtccgtgcccttgcgatgaatcctaaagctgataacgcatggcaatacttgagactctcgttaaggtacagtataagctcgtaaactcgaaaaacgccatttaaattccgatgcgatttcttacaaagtcagttgatattttggaactttgttaaaacataatgcagttgtgcatcaaggcaagacatgatagaagcttgtgagtcaaggaatctcgatctcttgcagaaagaattcccgctgtgagtagacaaagcagacgattaaaaccctaaatccacatgaaaatcttacaaagacgttacgtctttttgttgtttagttttgtaaaaactacaatttaaaaataaaaactatgggttgaaaattaataaaattgttattgtttttaccctcgtaaaataatgcaaagaatcagtaagcaaaaaggaattgatacattcatgatgcattgtataatgtattgtaataacttgtcttggtccagagagagaatgtatttgtaataacttgacactgacttcagaattggacgtaaagtgacacattcatgcattgtatcaaacattgttaatctgaatatatatatggtcccaaaattagtacttaagtgggaatatatatcgtggtccaaaaaaacttgagtacagagataacattatttgaatcgaatatgttgtactatagagtttttctcaatcctgtaaggttggacctatatatgctctaattgctagtctttgtcttaaactatgaatgggtgggactaattacatattttaaacgctatgcataatgcatttgacctagttttctgcagcgcaccgaaaactttgatgaacagtgcaaaacgtgataaacatatgaaaaacattgcaaaaaaagattcttacacttgaatccgcagaatatctcagagaaacagttacttgctaagtgtttttatacacataaccaactagattatataaacgacattgaaacaactatgaattattttaacgtaggaactaggaagtgatacttgaatagaatgagccgacctatggaatggatactaaatgacctaagaagaccacagaggtaacaatcatcaaaagtaggaagaaggacgaaggtaggggaccataaacatagtgtaaataataataggatacattttcatataagacgtatagtagcagaagcttataacaagcttggcttttgagtagaaagagacgtcatatattgccatatcctcgaagaattgtcttgaaaaagggggtctcacggagatagcacaacgatatgatatcgtcccaaacctaagaaaaccttattcatttttaccccttcctccttcttgagagctacatctttatatgtacgttggttaatttctttagttgacgtttgatcatcatattagatgtgaagtatgttttttttttcttaacgaaaaaaaaaagaaaagaagtattttttctcgccaagagtgtcaaagaaaataaggagttgctcatataaatatgttaatgtcggtttgagagtgctaatttttttgttaaacggtaaaaagaaatgcattgttatgtgcatgcatgcaagcttttaccgttaagaaatgttaaatagctatacacatatcttgtttagatttgttttttttttccttttttgtgtgaaatgaatggtgacgcattcacatactggtttgtatgttagacatttttcatttttgtaaatatggtacttttttaccattcacttttttttccacggtcgtggtaataactatacgacggttaattacattgtatattattttaaaactgaaaatgttatcttatcatgatttacactaatttgttactctaattacacagtagaacattaagtacaaagaatttaaacccaaaaaaaattaaaaaaaatagtaaaaactatatgagttgtggcatttgactcactgcatcattttctttttttttgcaatttttctttttatatactcttctctggaactataggtttctgttttgtcacaggtttcagaccaaactttcaccaaattaacaaactgatttcatacaaaactgaacgaaattaagtagatattccaataagagccgataagagcagatcacgataactatactatacccgtgattacagtatagttctgaccaattgtgcatcacgtgattctctagccaccacagtcttactctatacctatagctaatgagagtacgcagctacaccttgcaggtttaaaattccttacttttcaaaaaatcggtatatataatagaagtatcattatattttgaataaaacgagaacttgagatctaaatggttcatatgtggtgtgtaccgtgtgttaagtgattgaaaaaattctagttttttcaattgaaatttcataattaatatgagttcaaattatatgactatgtgatttgcaatggtgactaaaaaagtagggacatattttcatagaatagtgaaagaataaatctacaccaaggttgaagatatggccgcaatatgatggaccaattagattgtcactggtaacatgtgtgtgtgtatatgtaatcgtgtcgtcgtgtctaagtttcatttgatccaagaatatgaaacacaatgtcctacatggtagcatactatgtcatattttcatagctagatcagtcccatcccataccttgtacgtaaattttccatattatatttcgttagaaactagtttaatttccctccccccccccccccccccccaaaaaaaaaaaaaaaaaaaaatctttggaaaactaagaactccaaaataaccaaaagccgagaaccaaacaaattatcatactagttttttctaaaacaaaaatctccaacaaaaccaatgtttccattcgaatggctaacttttttcaaaaacgagtttttaggctagccattttgaaaactacgtttcagttcaaagagcatgaccgatctcaagtgtgttgtagtgtaggcctggtagttacgagttcaaccagattaggcttgtagagtgatcattatgcataaagcttttccgatcctttagtattcccacttaacattattttattaatattgcttatataataaattaagaagagtaaaatggtagggatcagtcatggatcattgtgctaattaatctattttttatttcatcattagtattttgtgaccaaatttttcttaagtatttgtcataagtataagccataagaatttttattctagaatcggatttttgagtatatattacaattgttatggatagttggacatgtcgtcggcaaagtatctatctagtcaagttcagtttctgatatgggattcacataaaattatggactataactaatttcgatctagggactaagacattttttgtattcagatattctgaagtagattttataataacttttaacctgcaatatataggtgcatgtgactagtacttttacaaatcaggagatgacaactatacaaaattttgttacattagttttatactaccataattatgaaaccgcacgaaaacgtaaaagtgtgtttaatatttttatttttgtttttcgttttggaatgtttattaaaatgtatatcaataaagaactttgaaatttttagtttgtttaattattttaatttctcgatttaaatattagttattgtattagctaggttctttctcttttaacgattatcggtagttaatatatatggaactaaaatatattgctgagttaatatatataaatattagttattttatttaattaaaatataatatattctcttaatgttatcaattgatcaatctattctacctatttataacttgttatagattgctgagttgtattttcctcatagccacatcatacatagcatgttggctaagatgaacgtatcttccattaagaatggatattaactacatatggttttatattatattatagtctttaaccagttatacagattttagattatcaagttggaatatttgtacgtgtgatagctagttgatacatgtcaatttaggtgaccatttttggacgttaaagtttacaaatattacattgaaaaacatgaaccagctgtgtgaacctgcgggcgggccatgaaactgtgtttctaggtgaacttttgttgtcggagtatccacttgttgagtaatggtagtcagtattttcgtcccggttggtcgaaaaacatagttcatttagtcatgaaatgtaattaagtgctgccttttttttgtttcactgattctaactcgaacttaagattaaaatttggtgtatatcatttgaatctaatgctgaacggtttcattattctatgtacaatttctctttcgaaaaatgttggtttcgatcgcaatgaataaaaagatgaactataaagagttgcacacacacacacacacgtatacacataagaatatctttcatcacaatgatatatatactttttttgtttcctttttattttctttgttaaagagtcctttttgtttcacgtgaattaaaggcttgtgatatatttgtggttaaagtttttcttcttgtgaaattacattatatatatatatatatatatatatatatatatatatttgaaaaacattcggttaaatctctctagctttttgtaggccaaaaaaaatctcgaatctctctagtttaaagttcctgtcttagcaatttagccaaaatgtcagctaaattaagcatagcccccacttatttagtaaaaacgatagctaaagttcagctgtttttatgacccaaaaaaaaaccatttcgaatttcgatcattagacattaatgacgcatacatcgacaatggattgcgtgtggtctatttattatgataagaaactcgtttaggttctagagcttaattttctttaaactgatttcctcaatttgtttgtataaaattatcccctttagcatatacgatgatatcatcattcacttcagagaaatttaacttggcgatttagagtggatcagtggaacaaccattctcttggaataacatttgatgaaagtaagtgtggttttaagacctttatgttaaatgtatattttaaagcgctttcaattagttaaaagaattgtaatttttatatttataatgttagttcctcttggataagtctgtttcatgccaaagtcattatagatatagaaagtgctcacttagggttggttacacaatatttttatagaaacatttggtggaagcaagtggaaattcagaccatagattaaaaagaggacattgacaactctaactctctctatatgagtgtaaatattaaaggaccacttcatcatctaaaccctctacccgaagtcaaagatccattttctcttaaagttgtttaatgcgaagcccctttactttaatttctttttaggtagacttgtaccgatggttgagtttaggggccgatcaatgttttcagattcgaaccaaaaacaacaaatcaaaaaattattcggatcgcctattgaagtcggttaaccacaatcatcaaataatatatttcttactaatcactcaagtgattaacatgaatattatggatcttttttggtcatcatcagatcgatctagagcgaccacaactcaatgcattgatagattttaatctggattttaagatcatcaaaccgaaaatatgttttacatggcggaatcaatttgtattgcaaataaaatctaaaagaacaagatatataatagaataacatatcctagtcagaaaccaaattatatcttatctatggaaaagaaaaaaaagataatatatgattccaacttctatgaattggaaagggaacataatcacaaattataccaaaccagagtttctaaagtacaaactattttaggtaaaaataaaacaacatagaaaccatactttaaagaaattgagactagcaattgatttaacatgttacaaacttttttttgtgattaaacatgttacaacgatgtgatgaataaatatgtcgaagttgtgagagacgacagagtaaataagtttaagatgaaggtctgggatcaaaaagttatatatcgaatgttatatacttatatatatcaagcatcttataataaaataaagggaatacatatcaagtttaaaaacaaatgacagtgaaatatagtatatagatgtaacacgttaaccaccaacgtaccaataaaaccttgctaattcggaattttgataagcaatgtttgttactcgaaaagccgaattatatatacaatgaaaaccactctacttaattagtttctgccatataacaattataaagagattattgtgtacgtttctatcagtttctgtaacaatttcatatttaatcatatgttgataagattatatataagacgtccacgaaatatttactctacttatgttaataatctctccactgcaagcaaaatatataaaaggcaaattaaaataaagtgacgaattgataaggatggataaatagagacatcgatctgtttctagaagaataaagaacctgaaaagatataataatcaattgaggaaaagaatctagagagcagagatacaatgacattcataaataacgctacatacatgtaaaacgtaactgaccatttcttttcttttcttattaaagattgaccacgacgtatatatatatatatatatatatatatttttttttttttttacgacgtatatatatgtacatagtatataaggaaaacatactaattcattaactacttcattaacttttttgttaaagcttcactagctacttgattaacttacgtgcaagactttcaaaatgtctacaacagaaatttttaccttaaataaagggcattgtgacatttgacaattttttggtatgactgataatcaatatatttcctatatttatagcaattgaataattgttttggttcaatttcaaaattaaataaagtggtctgcaagaccgcaactcgcaactttaaatttctccctaataatttaaacatacgttaatttatttttctgcttactataagtattttttttgttaaagcttagtacaactgtttaataacgctttttcatgtaatttaataatgatgcatgcaatatttattaatgatgatgttagagttgcaaaaaagtcaatataaaaatcgaaaatcacatatagacattattgtgttgcagaaattttagcttttgaaattcgaacaccaaattctagagggttattggcaaaaagatgtgacaaattaacaaacaagaaatgttgattttgttacgcatgttgacattttaaacaaatgacttgatttttatgtatagatttttttctttttgtaaatttaaaggatgatttagcttttattgtgaaatttagcccaaaacaagtcaaccaaacaaacacattattttataaagcgtcatcagatagaaaccgtcaaacccattcaattgaaactaaactagtgtaacggaaacatatttatattatagtattcaccaatagaaaccaatgcatgcttattttccacacaaactactcaaatatttttaaaaattactactaatgtctaaccaccagttttttttcttctaatatgcatgaatgtgtgtgtatatactgtatatcagtatatgtatatgtgcgttgagtataaatacgaagtctcatcttctaagtccaacaccaaaattatttttctctcttttaactacaagtctactacaacttccaataagagagaagagacagagcattaatggagtcaccaagccttccgatgacggccaaagactggaccaccaccagtctccaccgtgtcttcgccatgcaaggcggcgaagatgacctcagctacgtcaacaattccgatagccaagctttggctataaccttaagcaaaccaatccttatctcatctctccaatccatcaaactcttctccgaccaaactcccatcaaaatcaccgatctcggctgcgccaccggctccaacacgtttactaccgttgatacggtggttgagacgttacaacggcgatacactgccaggtgcggtggtggtgggtcgccggagtttgaggctttcttctgtgatttgccttctaatgacttcaacatgttgttcaagttgttggctgagaaacagaaagttgactcgccggcgaaatacttcgctggcggcgttgctggttcgttctatgaccggctttttcccagaggaacgattcatgtcgctgtgagcttaagtgccttgcactggctctctcaggtctaatacactaatcacttttctataaattattttttgttactctttatttatttatttattcataatattcaccattcaaaataattaacgacgtcaatttgacattataagatatatatgatatatgattttttttagcattctactaatgttaaatcaacattttcttaaatatcataagatttttctatttttctatttaaggtaactaatatatttttttaagtgttaggaaatactatacgttacgactttaactataaatttgttaccttgattattgcaatgaagattaatgtccatcacccaaattaattaatcaacaaagacaatttgacaatataaaaaatataaaattttgtttactatatttcagtctcaaaacaagaacctaaaatgtgtgcattgaaatatatatgcagataccggagaaagtattggagaaagaatcaagaacgtggaacaaagggaaaacgtggatagaaggagcaaagaaagaagtagtagaagcatacgcagagcaatcagacaaagatttggatgatttcatgagctgtaggaaagaagaaatggtgaaaggaggagtgttgtttgtgttgatggctgggcgtccttcaggctcaagtagtcaatttggggaccaagatactcgagccaaacatcctttcacaactaccatggaacaagcttggcaagatttaatagaagaggtaaatctactctacatatatacaaattacaaacacgtgtatctttcatgattatattacataaccgttcatgatgttgtcatgtcactatatatcacaactaccatgaaattaagctttttcctttttacttgtttttcactaaaacattacttttaacatttcatgtgttttttatcacctatatttaaaagaggagaaaaattcttatcacaatccatatcttttaagaataaaaatcttcaaaagttttttgtcatttaattttccataaattagccaaactatttgtcactcaaacgttttatgttcgtttggacaaaagggtttgatagatgaagaaacaagagacggtttcaatattccggcgtacatgagaagtccggaggaagtgacggccggaattgaccgttgtggtggtttcaagatagggaaaatggacttcctgaaaatagttgaatattcagatgagaaacaagaagagtggaagaaagatccggtttcatatggacgagccaggaccaatttggttcaagctgctattcgtcctatggttgatgcttatcttggaccagacctatctcatgagctcttcaaaagatatgaaaatcgtgtttctacaaaccaagaatttctccatataacttgtttttatggagtcgtcgtgttttccgccatccgagtttaatgttgatataatttagctatagattatagatatgaacggaaacattttttttttatgaacggaaacatatgttatgcaaaaaaaaaaaaaaaacagttatgctttgttcgtttccatgtaagatttgtggtagttcatcagatgaattatgtgcgcttgtttaaatttctgaagcttgtagggttgcaaaaaaaacaaaaacaaaaacatatttataactttacaggtattacacttgttactgttctgattcttttttaaattgtaagggcatctccatcaaggagaaactcaaaaagtttctcaaacaaaaaaaatattagtattttactaatttttattttaatgaaaaaattgaaccagttgagaggagaaaaatgtaatgatggcttgtagagagtatctaataatttctcacttgagaaactttctaccctctcttctctttttattattattattattttattagtgaaaaactctcttgaaagactaccaatggagatggtttaagaatctacattaaatttttttttttttaataatggattagattagtatattatttatttatatcgaaattattgtttgtccaaaaccgaattgaacaaaaccaaaaatttgccaaattgaattttcgaaagacaaactgtcatgaattttccaaccggataaatcagattacccgattcaagcccaatttagaaaccacatgcccactctagtcttatatattaggggattcataagaaggcccaacacaggaccaatcttatgacccaatacaagttaacaaactcatgtaataattctcattattgttccgatgataagagaatgattcagagaatcaatgccttgagcttaagctctggtctaaattggttcgttacctcattgaaaatccatggaaataacctcaaaacattaaagcaatctcattgttacatgatcataaccggtttaaacagagacaacctcaacgttgccaaattcatcgaagcatgttcaaatgcaggacatctccgatatgcttactctgtattcacccaccagccatgtcccaatacttatctccacaacaccatgattagagctttgtctctcctcgacgaacccaatgcgcattcgattgcgatcacggtttatagaaagttatgggctttgtgtgctaagcctgacacgtttactttcccgtttgtgttgaagattgctgttagggtttctgatgtttggtttgggagacagattcatggacaagttgtggtttttgggtttgattcgagcgttcatgttgtaacaggtttgattcagatgtatttttcgtgtggtggtttgggagatgcacgtaagatgttcgatgaaatgcttgtcaaggatgtgaatgtttggaatgcgttgttagcagggtatgggaaagttggtgagatggatgaagctaggagtttgcttgagatgatgccttgttgggtaaggaatgaggtttcttggacttgtgtgatctctggatatgcgaaaagtggacgagctagcgaagctattgaagtgtttcagagaatgctgatggagaatgttgagcctgatgaagttacgcttttggctgtgctctcagcttgtgctgatcttggttcacttgaattgggtgaaagaatatgtagctatgttgatcaccgagggatgaacagagcggtttcattgaacaatgcggtcattgatatgtatgcgaaatcagggaatataacaaaggcgttggatgtgtttgagtgtgttaatgagagaaatgttgttacttggacgactataatcgcagggctagctacgcacgggcacggagctgaagccttagcgatgtttaaccgtatggttaaagctggcgtgagaccgaacgatgttactttcattgcaatcctttcagcttgcagtcatgtcggttgggttgatcttggaaaacgtttgtttaactcaatgagatcgaaatacgggattcatccaaacattgagcattacggatgcatgattgatttgctaggacgagcaggtaaactccgagaggcggatgaagttattaaaagcatgccctttaaggccaatgctgcaatatggggatctcttcttgctgcttcaaatgttcatcatgatcttgagcttggagaaagagctttgagtgagctgattaagttagaaccgaataacagcggtaactatatgcttttagctaatttatactcgaatttaggaaggtgggatgagtcgaggatgatgaggaacatgatgaaagggattggtgtgaagaagatggctggtgaaagctccatagaagttgaaaacagagtatacaaattcatttcaggggatcttacgcatcctcaagtcgaaaggattcatgaaattctacaagagatggatttgcaaatacagagcaaagtttgagaaaaaaaaaattatttgaattttgatcagattgagttgatcaaacaatgtcttctcttctaagacctgaaaccggaggagccgagtcaatgaggctgactcagaccggagttggcaaaagagaagctgatggttaattccggttccagttaagaactaaacaggaagaggaatttggagaatctgctgaagaagagaggaagatcgttagttatggtgcctagatgaatggccaaaccgatgcctcttcttcttaaggaaggtttcaagttaaggctcacggcttcaagctttggcctctgactgggcctttggcccatattaaagccttattttcccggaaaaaggctttattttgcgactcaattgtttgtacacttgttgttgtgtagtctattaatccaatatttgtccagaaaaaaaagagtctattaatccaataaaattaagatgtttaattattttctcaaataatgtttagatgaagaaagattaataaaaacgatgaaaaaatgaataatgtttaagtgatagagtaaaagaaagttatggatccgaaatgtacgggtcatttaaggtaagacgtggggtgggtttgtccaaacttgagaacatttaatttcctaaacctcaaatttaactcttcattaaatttagtttcagacatcgaaattctcaaaacacaaaagttaaaacaatatttggtcggagggaaaattgctcaagaaggggagagagatgcggagcgcgggaaacgacaagtggccacgtggctgttacttgatcattctagatttggtaatgttagttcatgctactttcccggcaagaaatcatgagcttcccacattttagctaggcccggctctataccagtgctggaggagctaatgtaccgggtcacccaaaaaattttcttttttatatgtaaatctattacagtcagggttcaaaattttttttacagaataaaacacatgaaatgatgactaattttttttttcagctcagggtccttaaattatttgagccggccctgattttagccatagttttctttataaataaatagtatggaacggtttgacaaaaaatatatatatataatatggaacgaaattcagattgattttcgcttttcactttttcagtattcagatatttaaatggtcaataactaataaattgcatcaaaaacattcaaaattttgttcagattttagagatgacgataaatctcaatcgttagacgtattttgttcaacaacatataatatgtggaattgaattgagtggtgatataacacaaatcaatatattatatgttttgggtaaatttttattaaaaataaaacagtttttatatgaactatttccaaacatcgatagcttggatatatatctcggtgccagaaaaaaacaaaaaagatagtatataaactattaaatcttcgattgattcaagaaaatgatgcatgtgatacattaaatccaacacaatatcagatcgtacaaaacgagttgattcactaagattatgtacgatactctacaatgtgttatcgattgcctttgtttattttatcatcatcaaagtcaatattagtagcttaattattagtatatatatatatatatatatatatgtatatatgtattattagtatatatttatatgcaaatgaaatcatgtttttttggataataaatggaatgatattgaacatcagtataatattaattgtatgcacctatttatatataaatatctgatacgtgttagactatttttatagcgatatagtccgacgactatatctatttggtgacaaggcaatcactagtttgctatttgtttttcttttgttaatttcttacgatagaaatattcataatcgttcgaatgcatgtattgctaaatagtttaaaatattttcaatttagctaataataatgaaattgtggaggtgattttttattttatttttctgaatagctataacaaatcaaagttacatgcgtgtgggaataaaagcaactttttctagactatctttatcaagacacagttatagagaaacaaacgaaccataaaggttataattagttaactacaaccaatcagaaaatgatgtttttaagtttcataaagattatatatcgtgttttcctttttccttttttgataatattatcgtgtccttttaatatacatagaattggattttgtcgtctaattgtgatatatattgaagctgtaaagtactgaacttttgatgatttaagctgtaaagagaagaacagtcgaatgattagcttgcttcacttgtgtcccgggccatataattagtttagcgtagttatattctggcttgtaggtaacgctatccttttggtatatcttgacaaataacatgaagaataataaatttgcaaaacaaaaaagatttcatcagtgtaacttactaataatagtggactttgaaatatgtaatgctaattatttatccattaaataataattccatttctattagactttgtcactttcatcaatatttacattctcttaatgtatgaagcatactgattcaaagtttaaacgaagagttcttccgtatctttagaatataaaacatcaaccagcatactgtaatgcgtttactaacgagttctattgaatatttttagaagtctgcttgttctaaaactctacatgttatttaaaattcttgaattgattaaagtaacgtgcgaaataatttaattgttagtgaaggatcaatcataagttctgagagcaaatcttaagttggacgattgtgtcacatgaacgactgaatgtcagtatatagatcctgaaattgaggtggtcaagttttttcatgtgtaattttgttttaaaattagttttgttttgtactgaagaaaatgttatttccatttgcacggaaaagtcgccgaaagtcagactttgattccatagtttccacttttaagattataaatataagttgtcaaagaatataactatatatgttctttaaaaaaaaagggaaaaagaaaataactatggggttgaatgataatatttgacccagacggactaatatgtttgcaaactggaccgtattatttttgcagttgataacaatttttatgaactgtttttttttttttcataataaaatttgtctgagaggaatataagttatataacgtataacggttggtaaatgattaaacgttggtttattttacaaacaaattgttacaacccttatccccattcgaatttttttaaaaacttgaacggtaatgactggcggtaaaggataatttgtttatgaagtaaaccaattatactttttaatacgaattacaatttggtgtactaagtttttttctttatgaaatcaaagcattacagatataattaaccaagaaaccaaaaatagttttgtctgtaaacggatttgtacatatggcctgctatcactattcaaagtttatggttcaatgttcttataaactaaaaaaatatattctgaccaagaataatgatccaagaaaatagttaaagtctataatttctagagataagtatttacggaataatcatgtttctacatatctagttaattattgtacattcatagagtggtgaaagattcttgaactagaaattcgatttgaaaaatacctcatccaaatacagaacaaacgaaagaatactaaacctaaagaaacttgatttggtcggtgttctttgcacctttttctttctttttatcttgtttttctttgtgtttttatttatttgttatgttctactattatgctaatgctttgttcttactttactttctttttttttctgcttactttggaaaaagtagttgaatgtgttggaaaaaggcatatgttctgttcctgcggttttcagttaatgactttataagaaaatagaaacagctactcaaaccttgtttttgaagcaagacattaacttcttttagggcttggtcaacatttgcaataagcaaatttaatcgaatcttttatctcgttgatcatatattgaacaatttggttagatgcaaacgtgaaagcgaagaggaatctcgcaacacatagtggttatactaatatatgtttatttgacgactatacttctttaggcttcacttcatgaaccttaaacaaaatgtaaatagtttacgaactgatcagggtttgccatattagtccattactgtggtatatgagacatttacacatatcgttggaaaaactgcaattaattttaatttcgatcaaactcccagttaaaaaaaaaaaaagtattattttcaatgtaaaactatcaatctatgtggcttttggaattataaacacgggaggtcaaatggtcaactgagccccataatatgaggtctaagtttcaaaagtaaaaccctttttaaatagcataaaattgcgtgaagaagttggcactctcgatgctgcttgctcgttaccaaattggagtttattaaagtaaagttttacaaattgtactactatctcctaatagatccataaaacaatttaaaaattactagtgtagtttagctaataaaaatcacttgcaatgcaagtgtttgattaaaaataatttaagtataattttttttcttttgcagaaatttcttctatatataatcatcccatctcctcataactcacaacaacattgaaacccatttcttcgcctttaaccttacttgaatttttgtgtgggtcctttttttttctttctccaagccattgtaagctccaatcttccacattctatctcttcttcctcattttcttccatacatacacacatatatatttctgttaccatttaagtgatcataaagttttcttgtgtaggaataaaaaggcagagaaaatggagttttttggtaaaatgataatttcattgagtcttatgatgatgataatgtggaagagcgtggatggttacagtagtggttgggtcaatgctcgagccacattctatggaggagctgatgcttctggcaccatgggtaatttgcttactcctctctgacactttatagttatatcattcttattttctgaccaatataacttcaaacttcaaatttcttaggaattttaaagtttttattagtgagtggtgacaattaatatgctactaattaatatgctacataagtttgtatctacacaagtcttatttttgtgttgttgttgtttctgtatggatcaggcggcgcgtgtggttacggaaacttatacagtcaaggatacggcactaacacggcggctctaagcacggctctattcaacggcggccaaagctgtggtgcttgttttcagataaaatgcgtagacgacccaaaatggtgtatcggtggaacaatcaccgtcaccggaacaaacttttgtccacccaactttgctcaagccaacaacgccggaggttggtgtaatcctcctcaacaccacttcgatttagctcagcccatcttcctccgtattgctcaatacaaagccggcgtcgtccctgtccaataccggaggtacgtttcccgatctcggtttagctcggtttggtaattggtacgtgtggtttgatttatgctctgttttttaaatcagagtggcttgccggagaaaaggaggaataagattcacgatcaacggtcattcatacttcaacctcgtacttataaccaacgtcgccggcgccggagatgttatctccgtctccattaaaggaaccaatacacgttggcaaagcatgtcaagaaactggggacagaattggcaaagcaatgcaaaacttgatggtcaagctttgtcctttaaagtaacaactagtgatggccgtacagttatatctaacaatgctacaccacgtaactggagcttcggacagacttataccggaaaacagttccgggctcagaggtgatgatgacgtggactgtctggaggggaaaaaaaaagttttacttattactgattttggagttttctagagtttgcatagtttgaaaaaagttttcaggaattaaccctaatcaaaataaccaatttctaaatggcggaaatcgaggttttttctcactggcagcttttgtaattcgccggtgagactgaggtgttttcacccgccgcctgagtgattgagttttttttttttttttttgtactttgtttggcttttaagatgttcaatggtctgtttctttaagacattgtctactgaaataataataaaatcaagttaatttataatttttaatgctttttgcctctttagtttcatgtttctgaatttagaagtgaaattttctagagagataagaatatacaacataaatattttgagaaaattcattttcaaaattttataacactatacttttgtcgattttaatccattcgaagacaaacccttagttttaaatcgataccgatatttttcctacataatacataaactctctacaaccactaaagtaaactccatacaataattttcctaattttcttaaattttagtatcaaaattaatctctttgtttttactactctaatgattaatgctaattttgattttatctttgacagctacgatcctcttgaaaacagctccggtgcaccttcacccatatcttccaacttcattttcagttcaagttttgccataaaacttctcgcttcaacatttccctccttgttgattatgtgtttcaatcaagcatttttgtgttaaatcacttttgatgtaaatttactactctttagtctctaacacatactcatcaatcatgctaaacatgatcgaacatctaacgcaaaccagaatccaaaattcatcgatcgtacaaaaatcaacacactccaagaaacctttatatcaaaccgaaagaaacaccagtttacttcattctccaatcttgttcatgttttccaaaatgcgattcctgagcacttggagttggaggggtttctctccataaggatttatctatattatcgtccttagtttttatggacttttgttcaatatctgtagtttgtataatctatttatttgtttaagtgtccatttttctcttctaattttacatcatcaattttatatagtatagattgattattgttttttcttttgctggttttcgattccaatctagctcgaatccgtaaaatcttggctacagtgtaaaccaaactacagtattttaattctgtcatcttacgaatcggtacgggaagctagaatgtgaatgaaatccatctaaagaagataaaaaataatcatactacgcaaggttttatagatcacatgtacttgttataacttagaagttagaatctaatctttagattccattggaattttcggtttagcaaatattttttttggttcgggtgaacccaattcctggttcatatatatagccttatcacacatcttaggtatttccctaaagcatacgcatgatgtattagctattttgcttattctgtgaatttcctcctgattctcgttttgtctgattttgtttgcttccttttctgtttgtgagttcttgaggaaatcctaagtattagtgagtttgaattttgtttgcttccttttctatatacctcgctagggttttgcttatgactgtttgtttggttcctgagaatctcatatccattcctcgtctttttatgatgttttcaggcttttagttttctccggatgcaaaaaactcttaattatggataggataagtcatttgcccgatgagcttattttggacatattgtcgtcactacctaatgctaaagatgttgcggccacaatgattttgtcaaaacggtggcggtttctttggacgatggttccaaggcttgtgtacgatgctagctatctggatattgactatggaagattttcgacctttgtaaacaggtctttgttgctgcacaaggctccacttatagatactttgcatttcaaaattggtaacgcctgtagtagtggagatattccagcgttgattagagctgccgatgaacgtcgtgtgcatgagctgattatcgagattgatactcctcctagtaatatatatattactcctgtcacacttccgaggagcttgtttacatggtgcaaaatgcttgtgacattaaaactaaggaacgtggttcttaccgatgatgttacttcactactgtttttcccatgcatccctcaaaaacttgagtcttatatccatgaagtacccaggtggtgatgaatttttcaacacgcttatatcaagttgtccaattcttgaagacttggttgtgaaacaaatcctcaacgacaatttggccattgtgactgttagagtgccttctctaaagaggttagtcttgaaccaagaagtaaaaaacgttgttaaaagcatagctaatgggtttgtgataaacactcctgctttggagtgcatgaatattgttgatttttcgaccgggtgtaacattgttgagagtgatatgcctaacattgtgaaggcaaaagttgacatttttcatccacgaactgagcaacttttgggttctacaactttagccaagtatcttcatctctgcttaccaacctcaaaggtatgttatttattagcttgctataatatgattattggtctctaatccagactaattaaatcaaacattgcttgtgtaattgtaattatactttctcttatccagaatgtgtcgtatcctgctggtaatatcttcaaccgtctcgtacatctaaggctatgcacatgtgagactgagtggattaatctacttatgcgtttactcagaaattcccctagtttacgagttcttgagattgaacaggtaataaataatacatatttgttttctactactaaatcagtaagattgatatatctgttccactatacactcctatcccaggtccattaccttcgatattaccaaccacgaccgtgctggagtgaaccaagctcgatacctgaatgtcttactcataatcttgaaaccttcaaatgggagcattattatggagcagaagaagagaaagaagtggcggcattcatcttaagaagttcaatctgtttaaagaaggcaactatcatccttcataggtctattgtccacgacgagaaacttgagatgaacaaggaattgtcattattgccaatatgttcaccaatttgtcagcttgctttcagctgaggttatggtcagttttagatcagctatactacaacttattatttcttgaattttcataattagctctttggaatttctatctttccacaaacagtttgctctagtttggtttgaagagagtgttccaattgccacaaagctagatgaaaatttatgtttttttgatcgaagtattgatggatcgaagtttgtatcttcattcttccgcattaatcatttagggtctttaattatctcatatctgtaacgttttctctcttttatgtttggtacattttgtggctaaactactttggatgtctattcttgagaaggatgatacttttacattatgaacatgtatatacataagattcaggcgattaaaaatagattttccacaagttacttaaataaataaaaatcacatcatatgcattgagtttgtttatgtacaacactactttcgtcatctagaccacgttgttagattaggagcacaaatattgaagcaagatatttacttatttaccaaaagaatcacgacattgaatcttctttcatttctctcctcaagacatagtagcataagaaaatgaagatatcatcactaggatgggtcttagtccttatcttcatctctattaccattgtttcgagtgcaccagcacctaaacctcctaaacctaagcctgcaccagcacctacacctcctaaacctaagcccacaccagcacctacacctcctaaacctaagcccaaaccagcacctacacctcctaaacctaagcctgcaccagcacctacacctcctaaacctaagcccgcaccagcacctacacctcctaaacctaagcccaaaccagcacctacacctcctaatcctaagcccacaccagcacctacacctcctaaacctaagcctgcaccagcaccagcaccaacaccagcaccgaaacctaaacctgcacctaaaccagcaccaggtggagaagttggtaagcaagctaaattattgtttttagtcatcttttaagtatttatgattatatcagagtatatactagctagtttctgttgaatagttggaatatttagtcttaaagactaaagatccaatgaaccataatatgttatgttctccttgaacgacttatataaacttagttttagggtcacagaaacgtttttgttttatttattcgaatagaggacgaaaccgagtttagctacgagacgaaaggaaacaaggggccagcgaaatggggaacactagatgcagagtggaaaatgtgtggaataggcaaaatgcaatctcctattgatcttcgggacaaaaatgtggtagttagtaataaatttggattgcttcgtagccagtatctgccttctaataccaccattaagaacagaggtcatgatatcatggtaaatatcctaccaccttttccaatatatttcatttttttctttaatcaaacctgcgtactattggatcaccactttgtttaaaatatttttcttatggttaatgtggcaagttgaaattcaaaggaggaaataaaggtattggtgtcactatccgtggtactagatatcaacttcaacaacttcattggcactctccttccgaacatacaatcaatggcaaaaggtacgatctattctaccatatatcttaaacctataacgtaaaaattactatctcgctgttaaaattaatctcttctatccaccgcgttgaaccattagtaggaatatttttacctggtgtccatcgattatgtctttcggcctgatcatagaccgtctagacaaggttatgcttgtgatattttcgtttggaacacattttatttgacagtttttaaaatttggacgttaaataagaataattataatcgggaccaaaacatcatttcaatgcctaaatgtagtgctaacttctaatatagttctgtatgaagagcctaaaaagaactaattttataatttgtgtgtgatcaaaattgcttaattggtgaggaaacaattatagtacttaatatttattttgtaagatatgatgattgcattaaaaagtttgaataaaacacatacataggtttgcgctagaggaacacttggttcatgagagcaaagataaacgctacgctgttgtcgcattcttatacaatctcggagcatctgacccttttctcttttcggtattgcaatctcaacctccctactaattgttttactaattgaacaaaaatagtaactcaatatattttttattgattagttggaaaaacaattgaagaagataactgatacacatgcgtccgaggaacatgtcggaatcattgatcccaaaaaactcagttttgaataaaaacattattatagatattccggatcacttactgctcctccatgttctgaaaatgttatttggtccgtttccaaagaggtaactattaattattttcaatcccgtccatttggtttatatatatatagctatatagtttttcatttcaatctatgattatgttattttaaataaattacctagttaattaatatagcaatgtcttatgttgtaataaactttcagattcgcactgtgtcaagtaaacaagtgaagcttctccgtgtggctgtacacgatgtaagtttctttcttctttttctgatttattatacagtataacaatattagcaaactatcatattaatacttatataaatatctgaattgcatatttctcaagatatgagtctgtagagcatagatgagactacttatggtctatataatattcaagataagaccatcatgttttatcatccaattgatttcttacttttcagtttttgaaaatattttacaggcttcagattcaaatgccaggccgcttcaagcagtcaataagcgcaaggtatatttatacaaaccaaaggttaagttaatgaagaaatactgtaatataagttcttactagtaatctttaattctttatatatgtacattatgaattgtacactaaaatgatgtttttagggataaactgatgacttggttttgttatttaaaaatagtctcccactcgtgttatataaaatggtttttatgttacttatttataagcaaaccctctttacctaaagaagggtatgaaacaacacagtctcaatttcaattctcttggtaagtgctaactattagtgttatgttagggatcaaattagtttcaattctctcagattcagtttatgtggtagtagggcacataagttaatgagcgcatgaaaaaaccgagaattgatcacacaaaatttctagctcatacatcttcattagccttttgtttagagcaatcctcttctgtctaaacagtgaagatgtgaagtcatgtgtagaaaccaccattatttaaagacgagtcaaaatttattggaaatttttcacaaacgaagctaaaactacaaaaaaagaaaaaaaatcagacttacctcggctctaaaactttaccagtaccatattcgggatggtgaaccacaaccgcgctggaatgaaccaagttcaattttatcgagtcttgaaactctcgaatggatacaatattatggaacaaaagaagagaaacaagtagctgcattcatcttaagaaacgcaaatttttcgaagaagcaactttctcatctaaacccaccgatcataacaagaaatctaagatgcttaaaaagttgtcatcatcgcctatctgttctcgtacttgtcagcttctatttctttgaaactatggtcaatatgtcaagtaacaatcatctttgtttggttggtgcatgtatgattttgaaatcttagttaagctattgggagacgttatcatgttgaaaactattcaagtcctgatatttatcgtatcataaaatagtgtgtaaacacattattgaagaatgtaactaacggatatatatacactcaatctgaaaataaagttcacgcgtctttaattttctttaatctaagaagtcaacatcaaacgaatatttacatataatttacatagaagaagatactacttgatattctcaatgcaactagaatatacatacaactagtcaatataataaaaccaaacaagtagttatgaaaactcgattaaacgaagaccacaggcgttgaatcagctactggtagattagtaataaataaacctcaaaattagtgaaggaagcaaaataaaagactataattaacaaaaagtcttaaaacttgattaataattaaatgaaagattaataaaatgctaattaagaaaaggacataaagtaagaggaaacaaggaacgagttggggggttagaagaggacgtggttgggttgttttcttttgttttgtttccttccactctttcttcttcttcatttcctctttctttcttcttccttctccattttttctctaatcgttggacaaaaaagattgagcctttttctgggttttattttctataaaggaatcgaaagaagcaaggacagattttaaaaaaaaaatcttgggttttcaagaaaaagtagagacattttaaaggtatgatttttatgtttgttgtgggcatgtaaatttctgggtttatctttgtctcatgtattgtgtttctttatttgagaaaatttatgacaaaggaagaaaacaaaaagctagaaatttgattcctttttaagggttttgttttctctctttgatcttttacaagattctgggttcttcagatgtttttctccttttctgggtttaattctttttgggttttatccaaatttatgtaaaaatcttgactttttcctctcctttttcaaaagatgttcttgtctgaatttgattggtcaaaatcatttaatttggattattaatgacaaaatctacccatttagattgatacttgtataaaagttataacctttgagggtcttagatctgaaatttaaaaccaaattggtagatgataaacaaaatttctagggtttcattgtgtgttcttcttgttttgcagaatcaatagatttgtgggggtgaagtaaggaacatggaggaaacaatggcagctaggtattggtgtcacatgtgttcacaaatggtgaatccagtaatggaatctgagatcaaatgtcccttttgccaaagcggattcatcgaagaaatgagcggtaatggcggtggaggtggtggcagaggcataagagatgttcaagattcagaaaccgattttggaacagaccgtgcattgtctctatgggcaccaatcttgcttggaatgatgagtagtcctcgaagacgaagaaggtttagaagatcagagtttggtgaagagaatgatgataatggtgatgacttgactactaatgctgatgggaatgggaatgatagtaacaacagtaataataacgtgtatcgtcatcatcgagctaggagacatggtggagagattgatttagatagagagtttgaatctatcttgaggagaagacgaagaagctcagggaatatattgcagttgcttcaagggattcgtgcagggattgcttctgagtatgaaagctctgataacaattgggataattctcgagagagggatagagttataatgattaatccgtataaccaatcgctagttgttccttcggatcagaatcagaatcatccttcattgacttcacttggagattacttcattggacctggtttagatcttttgcttcagcatttggctgagaatgatcctaataggcaagggactccacctgctcgtaaagaagctgttgaagctttaccaacggttaagataatggaacctttgcaatgttctgtttgtttggatgattttgagaaaggtacggaagctaaagagatgccttgtaagcataagtttcatgttcggtgtattgttccctggcttgagcttcatagttcttgtcctgtgtgtcgttttgagcttccttctagtgctgatgatgatgatgagactaagactgattccgagagagtgctgagaacaagaaatgttcgggaaacgagtaacggaaacgttgttgagaatgtgggaaatgcggatagaggaagagaggatgaggtgaggagtggaaatgggagacggttttcgtttccatggccgtttagtggattgttctcgtcttcttcttcttcgtcttcttcaacctctggatctcaatctggtgagaacaatttcttctcaagatcttctggttcttctcgctgagagcaaaacaatcaaaaactaaaacatcttggattttgttattgttcttcatcttttgttgttctctcatttttctagctattgaacttgttatttcctctgcatttcattctctgctttactgtacatagaaatgatgttctttcactcagactgttgaaaaacaaatatccattgttggtgtacagagatgatcaaatttcagtttccattgttttagttttcaagtatgaaattatctgtcaatcgagtccaaataatgacgaaatatatacaatgattcaatctttcatgtttttgtacagagatgatcaaattatgtgtgtccattatctttgtttttaaatatgaaaattatattttcagatgaatcccaaataatgatgggaattttacaaaaatggagataatgatgagtctttgtcggaatgatttttgtatgggacgattcatgcgctgtcttcttttttgtctttcatgtccctgtcattgtaagattataagaacatgaaacataaacatattttcaccattgtattggcgtatacataagaaatacttgagaaacaaaaagaaatcatgataattgatacgtgtatgaatgatccaataggtttcaatacaaccaaaatatcccaaaaggagctgttaagtggattcaccggtcacagtagttgtggtaataagcaaaaaatagaacttgagttttctatctcaagattttaatcacaatcttgaatagtttcataataaaacgtttaaagtagcgttccccaaacgccaaaaacgtgaatttttgagtggaatcatcacttgacggtcaagatcttgatcacggaagcattaccgactcggagtagagcaacaacggaatctccagtcttgcatagctctttctctttcccgtactgagtagcaaactcgatagcttcttctgttgattcatcgtgtgaggctcttgcggatccagcgtagagcactgggatcagaccacggaagataaggctgtgtctcgcgggggattcatcgctgcaagaccagtcaaagaagtcggttttgatctcaggaacaacgacggatagaataggcattcctggtctgtacttagccacaagtcttgctgtgcttcctcctctggttaggaccatgatgagagtggctctagctgagttagcagttctgacagctgaagatgcaagtgactcgagtggactcattggaactggagagtacagcatgatcctcttgaagacatcaccgtagtcaagggtgctctcggcttccacgcagatcttagccattgtacggacggctagttcagggtatgctccagctgcagtttcaccactgagcatgacacagtctgtaccatcaaggactgcgtttgctacatccgtagcttcggctcttgtgggtctaggagatttgatcatggactcgagcatctgagttgctgtgaccacaggttttccctggatgttgcatttgtagatcatcaccttctgagctaagaagatcttctcaatcgggatttccatgcccagatctcctctagcaatcatgaaagcgtctgaattgaccaaaatgtcatcaaaatttgccacaccttcttggttctcgacctaatcaatcaaaaagaagatagcacaaaaccatcacaacctaaagatttgatcctgtagtttccggaactaaaaagagagctttgatttaacataccttagacatgagaagaatgtttttggcgtgctttcctagaagtttccggacttgaaccaagtctgaacctttcctgacaaaagacagagcaatcatgtcgatttgattcgggactccccattgcatgatgtcttctttgtctttctcagttagagttgggagatccacaacaacacctgggagattaacgttctttctctcaccgagcatcgcagagttctcacaccggcaacggactgtaccgttctctttgtcacaagagagaaccagtaaggagattgtaccatcagcacaaagaatgaccattcctgggttcacatcaacagccaactttttgtagctcatgcaaatcgtgttctcgtcacccttcaagtcatagtcagtcgaaatagtgatctcttgtccttgtttcagctggattggtttcccatctttcaagaacccggttcggatttctggaccctttataacagaaaagaaacaacaacactccattagcaaaatcgaaaacaaacaaacaaatagatctgccacaattcacatacataagacaattcaagaacatcagctatcaccactctcaacaattataagtcttagtcatctatcaaatttgtattaacaacaaattcttcaccagtttccaagagctaacatcattttctacatttggtctccacaacaagaagatttcaactctttcttctcaactaatttggtctaacaactcagagttctaactggagaaagtctcacagatctagattcataattcataataaatttagtaattcccagatggtaaaacatcatgagagtgaggttggtaagcgttgttcataagcagagtaaacattaataaacagtctaacacaaaaatggcataaacagacaaaaaaacagaaaccatttaccaaagatagatgaaaatacaaaagaggcataaataaacatttcacacataggaaataaaatagacgcgtcaatgttacagatcaataaatagaatcaaataccaaaatccaaactaaataaaatatctagaaaccctagaattccaaatcacagtcgaatctaagtcaaaggagatgaaattggaaacaaaacaacataaactataaaaatggaagtcatgtaatcgaaccttggtgtcgagcatgacggcacagagaatcccagtgttaagcatagcttgatgaagattatcgagagtctcttgatggtattcatgagatccatgagagaaattgaaacgagcaacgttcataccagccctaagaagcttctcgaccatcggaacagatctggaagctggacctagagtacaaacgatcttcgtcttcggcctttgctctatcatcgccatcgctaagtgaagaaaaaaaacagacacggaattgagaatcgaggatcgcggatgtttggtggaaagagagagatgaagagagatttatggagagagatctggcttggagaacaaggaaaacagagagagagaatctgagaaagaatgagagatttatgagttaagagtcttcttctagagttttttttgacttttgaggtaaaaaatgagaaatgaaattgaaggttattggtttagatttggtcaacaaaagaccatatgtttactgattggttcacaccggtttaattttctttgaataattaaggagtgacgcacattgtttattaatattcgttttcgtttacctttttatgtcttctcgatctattgtcgggccacgtttttttccaaatataaaatatcttataatgatatctcatttaagtgtttatgttgattaaaaaatggtattaattgtattttggcattttggcaatagtgtttaaactaatttctgaagttgatctttgttctttgtcttctttcatggtgttaagtgttgaactgcagtaatttatttccggaaatattgtgttctagtttgtctctattggtaatggaatctgtaaaagaaagcattaaaactgaaccaaaccaaacctaccacttgtttagacattaaaaccattttctgacctaaaagtgaacttggagatgtttgataactgacatatgtaccttaatattgacgagctccaacaatctcgaataaattttaagactccaaaaaagttaaaaggttttagctcttcttcatgtttttatatagaagaattgttctttgtgcttaaccagagtttgaacattgtctaaatacttttgatatagaaaatctccattgaacccaaatgaggtaaacttgactctatcattcattctcttccggcccaaaacttctctgttctttttttaagtcctctcttgacgtttgcgactgagcaagattactagtctaaactgacataaatctaagcgcagtgcgcatatggtaagaattatttcaggtgaaaatgatcagagttcgtcgtgattctgaggtttgtcttggttcatcaacttctcgagcttctgttgtagttcctatacaaagacaaacaccaggttaaggaagtgttaactagtgtaggtctgttttgagatttgagatgacacaaaaacttactttaagtttgtcttccaaacaccgagctggagtagataagatggccgcatatctgcaacaagagagtaaaaatttaaggatataaaaagaaaaactggagataaaaggagatgatgacccgtgagatgtaggttacgataagaacttactcgcaacggcttggttcatcgacatccataagctcatttttcaacccacatcttagtttcacctgcatttagtgagacagtcaagctttgtatatctctgtgatctttgcaagcgcaaaaatcttctcagataattttttttatataaatataattggagaaaatattaattgaacaattagtttggatttaatgtaatcagacactaccttcaggcttctatcgggaccattccagcatttttctccgttggtatatgacatgaattggtaagagttctcaaatttgtcccactccctattttagcaaattccattaaacaaaataaggaagcgacaaaataagcacagataaaataatcactcatatttaattatcatctgcgaaccaattccttgttattagttatctgtatcatgaaagagatcagcatgcacagaaaagataaagtggcatgacacttaccctaaccgagttttcgaatagccctcctcttgtgttgcttctttatatgcgcagactttgtaagtatacctacagcattatttaggtaataacagtaaatgcatcagatatataattctaatagctgatagtaatgttaataaagaatggatgtgacattaaattgctaagattattcttacttgccctgtttgctctcaaaacaacgaccatggaatgaatagaactctttctctggtcctgttataaacaatatataaggactaacttaaagaaaggtaaacgtaagtgaaggcttaggatgtcttatcatacagaccaaagtcttgttttagcttcttttctaagctcgatatccttgactgtattttattcagtttggagcttgactcgtcgtattctttgcgtacccgatcagcctctgcacattccacaacaatatagatgaatcactaaagaatacgagtatcactaatactactgatgaaaatgctaaactatttttttacctgatttgtccactggggtggtttggaataaattcacagccagcaaaatgttcttgacagtcttttgtatcttctccaaccaagtaggatttgaggttgtctctatcagtaatgaaattcaatcaagtcaactaaatatgatagatgattaacatcgttcaagaatataaacatctgtggaaatagtgcagacctgaaaaatcgacatcatcatctgcatcagatttgtatgaagaactagaatcatggcgatactcctcttcataggaatcatcttcaggttcatggtcgctgtatttcccatcatcgctggtatcctcatcaccatctgaaacaaatccatcatcttcatctgcttcatgtgcagtgatgggcgtgtgctcatggttttcctgatcatcagctttggggatatcgtctgcctcagttggcttatcagatttctctcctgtccaacgagaggcaacaagacgccccaactcttcctttgacaactcttccttcttctcggttacaaaatcctcctatcgatagaatgtagagtactctaacgttaggaaaaagtcaggaattcaataatctccgagatataactcagaaggggtagagttattgaaaaaatgcaatagacaagtctcaaaaagaaagagttattctcatcacggaagttcagagaactatactcagatttgtaagcacttggccagaaattgaaagtaaattaccactttcttaacctcgtctgattcctccttttcagcactaccatcattttgagattcatctgtgggggaagaggaatcctcagatgaggtagattcctcttttctctccacaacatgctgcattgtaggcaaacctcgtatcatcatcccatttcaagtaacagattgcaccacttttggaaaagcatatgtgtgaaataatttttcaaacctcgtctgctggattagtgtgagtagcctcatccaatatacttgttggttcaccttcagctgctggctcctgaagtcaaattctaattcagtactcggttgaattacacaacccgaaagcaaaacaagaggactcaagaaatataaaaagcactgaatgtattgatgagggttcgtagtcatgtcaatgagttcaagatagccaagttttagatttcaacgatgatgaataaaagatagagtttcaagcatctcacatattgaaactctaatatgtttcatgacctcatgattcatgaatgagcaggaggtccaaagaggaccaaaatattgacaaatgttctgataagcttatctttcattgtttgactacttaacttgttgaataagtacaataaaaaaatacaaagatgaaaacgtgcaaatctatttcagtttacaagagaagaactaacctcatctgaaggataatccttgtaattaccaatctcatcatgatgtgtggtttcatcgtgttgtgaaactgcaggcgtcccttcatcatgtgagctttcttcaactttttcactgtcatctgtcttctcctcagcatccccttttccttgctgggctgctaattcggcctctttcttttccttttcctccttttctttctgtagacgctccttctcctctaccttctcaatttgttctttacgatctacagaagaaatgagccgagggaaatgtaaaacatgtcaacttggcaaaaagaattctttatcatctgtagtcatcatagaaagaagttaatgatcctatcagattccactacttcaactacaagtcatgtatttttttaactttcttcctatccttttggtggttagttgaactttaagggctgatcccgaagcatttcaagcatcgaactacacttatatgcagggttccgctttcacattccaataaactaattatctcatggtactaccatatgaaaaaactaaacctcaactctcatgccgcaaaatcagcaaacaaaaatattcaattatgcatcaaaaggaagaacggcaaacctttcagctgatcaacaaggcctttcagaatcttctgctcacttttcagcttcttcaattctgctgcatctttctccagacccactttcgcctgttcgatttcctgtctccttattacaagcccttgattatatgtttcaattttcttcttcagattttctcgagcagcttttccagcttcccagcatgtattttggcatgatacgtgaccatcatactcatcacttccatcacaacaatctgctcccataggtaaacaagccataagtacgaataagctaacacttcaacaacttcttcctctgccatgcatttgaaaacacaaatgcttgcaaagaagaggttcaacaaaatttaaaatgtaaataactacagaatttgagtaacataccacaaataccatcattaactctggaagaaaacaaaatcaccggagagtggccggcgttccggcaatagaattttccagttggacaagctgaggtacctggagtttttaccacataaagcaaagcaaagcaaaaagatgatcatccataacacatatactcccaaaaagcaaaaaaaaactttattccactaaacccaaagtataacttcaataatcaccgcttttgaattcaaatgaaaccaatcacaatcctaaaccaaagaaaagctacacaatttttgttcaacagagaagaatcaatccaatcgaaaaacacaaaatgcttatgagaagaagagaaattgagaaaatgaaaagaacctggctcgtcagttccatctgaacaatcacagaaatcgtcattaagctgagctttcgtgaatttctttgatccatccttacacttaatctctgaagatgacttgtaatacttctcatctaacacacataaacgagaaaaagaaatatcaaatcggagtgattatggtgaagatcttaagcaaaacgaagcagatctttcaatgagcagaaaacaaaccttgaggagaaatgccgagaaacggatcgttcggtggagacgagcttgatctaatggcagaagcaaggagaagaagaaaggatagttgcaaagagacggagacaaaggaagatattactactactctcatcttcttcgagatcggaaccggagaatgaacggagaatcaaaagatttggccacgagaaagatcaagtgcagtgtctgtgagacaaagtttggcagatttgataaaacgacacagtttggttatgcatcctattttgtataattaaaattaggtagcttgattcaacttagtaataaaataggcccattagctcagttggttagagcgtcgtgctaataacgcgaaggtcgcaggttcgaaacctgcatgggccatcaattttttaactctgtcctttgtcgaaacgtcgtcgctttctttctttattagccgtcactcaaactataaatttggttaaactaatgggcctataactagcccaaaccgaataaaatggcctttcgtcacgctttaagaactagggttttcgaaagtccaccactatcataattgcatatataaactcatcttctctgctcagttactttgtccgatcaaattttattctctccgccgcttatttgatgtgctatggtttagatatcttatgttgattcgatttttttcaaagaaagcctaatttgcaaatttcttaatctatacaatttatttgtaatggattgaggaatctatcgttaggcgaaagagatgatggatttgtaataatctccggtaagcttacgtgaacctccgtaagcttgctctgcttctgaaaactccgagttttctttttcttgaccgaaggatactcggtgaatagaggcagatacatctatcaatctctgaatcgaaattgctttgttgattttttttccattagatatatgtagtgtatgaaattgtgaaattctgtgttattgatagtggttgatggaatggtgagggtgatgaaaaaaatcattcggattcccaatgattcccttacgtacgggaaattatgtgattatttaccagctacttttgactcatcatccatcattatgttttttggttcttaagttttgtttgctatgtatttactaagttgttttggccggtgatgtaatcaaaatatttgctactcttgatgaagaatttcttcagttgatgatatttaccaccaagatctctgaggcctttttgaattgtttttaaaactaaatgtcccatacaatccttgtttttgtttgaactaaatggttttctttgtacatttttcatttccgtaagctaagttctttattgacatttttagacgagtcttttactattcttttgcattgattgcttataaccagataagaactaagatgtaaaaataaaatactaaagagaagaactttaataatgtgagtaaaattatttatcgtttgcttgaggttatcaaaatctgttgataactattgaaattattttcgtcgggctaactacttatcacctctttctataaactgattattaacaattcggacattccaaagacatttttgtcgaactagagtaagatggtgagattgattaatggatatgtttcttgcccaaaaaaggaaaaaatggtctgtgtcaggataaatttacccgatcactcccacacacgttacatagaacaaccacatcgataaatatgctggtggtgtatcgtatggcacgtgtgttggtacaaacaaatggtggatcgttgacacgtgaacaaaacttaattccaatggttatatcgttatgaactcccaaatgtttaaaagcatgcaccaccaataatcttattcttttttagccgattgttggatacgacatgcataagcccttgaattgatatcaacgtgaagccgaaagtgagatttaggtctgacatgcgcaataccactgaattgaattggtacccttattttttgtattccactaggcactagtagtagctatgatatataatcgatcaatgaactaatagtaatttcaagccatgcacgccgataaaacagtacaaacctcaaaatgatatgatattgtttggagttgttaactctttaattatcgttcttttcttcatataaaaaataggatttttagtaattaaaccccccaactaaagatatattgtgaaaaaacccctcaattatttatttaatgaaaaaacacctgaagtttaaaattatttgtgaaaaccacccgccgtctacagtaccgtcaaaataaaacgatgtgttttaaatataaaaaaatgacatgtttttttgcttaaaacaacacgaaataatcaaaaaacaacacgaagttcttataccttattataaacccctaaatccactttagctcttaaatcgacgacattgaatcgcgaaattttgtagactgaatgcggctggagcttgcaagatgttaaggtaactgttacaagacattcttattggttttagttttccttttcacgtactctaaaaacttttttttttgcttcgatccatactttgacttttaaactcaccttggggagttaatttctttggtgcactatagagccacgtctttgagtttatgtgatggcgttcatgcttagagatgctacatgtatactcgtgcccacttcttatatcttttgaattttgttggaaaatattcttgttttttcaattttttaaattggttttgagacgtatatcttattccttgcattacatgatacaatattaaaaacttaggagattgatcagaattttagagagtttttgataattgtatttgtcaggacacttttctttcgattgcatgtaggaggatattgggcagcagatggttcataccatggcggtgagacaagatgtttacagcttgattttgaagttcctagtttagcaatgttgacaaatatggttttgagtgctggttatacagaaaatatgagtaagttttcttacttcccatctggagaagtaggtcagaatcgtaaggatttgtgtggtgatagtgatgttgccgaaatgattacgtgtacacatgagttggaaagcaagaatttatatgttgttagggcagatgatccttatctagatgatgttcttattggagaaagggaggaagaagaggagcttgagagtgaacaacttgatttttaccgtgatgattatgtcgagagtgatgactcagatgatgatggtgctagaatagatttttatgtagggcaagagtttgtttctaaagagaagtgtaaggatacaattgagaagtatgctattagagagaaggtgaatatacattttaagagatccgaaaggaataaaatagaaggagtgtgtgttcaggattgttgcaagtggagaatatatgcatcaataaccagtcgttcagacaaaatggttgttcaatcttacaaaggaattcacagttgttatcctataggtgttgtggatctctatagtgcaccaaagatagctgctgattttataaatgagtttaggactaattcgaacttgtcagctggccaaataatgcagaggttgtatctaaatggtcttcgagtcacaaaaactaaatgtcagagtgcaaggcagattatgaaacacatcattagtgatgagtatgttgagcagtttacgagaatgtatgattatgttgaagagctgagaaagactaatccaggttcaacaattattttaggtacaaaagatagaatttttgagaaattctatacttgcttcgaagctcaaaaaacgggttggaagacagcatgtcgacgtgttattcatttgggtggaacatttctaaagggacgcatgaaaggacaattgttgactgctgtgggaagggatcctaatgatgcaatgtatatcatcgcatgggctattgtaccagtggagaacaaggtctattggcagtggtttatggagttattaggagaagacttacgtttggagcttggtaatggtcttgcattatcttcggatcagcaaaagggactgatatatgcaataaaaaacgtcctaccttacgcagagcatagaatgtgtgctagacacatttttgcgaacttgcagaaaagatacaagcagatgggacctttgcataaggttttttggaagtgtgcacgcgcatataatgaaacagtcttttggaaacagcttgagaagatgaagaccataaaatttgaagcttatgatgaagtgaagcgaagtgtcggttctaactggtctaggtgtgaaaaaattccgtctcttatttgtctatggttttggttggtttgactcttgttttgttctctgcaattgtcactctggttttggttgatctaatggatttattattttctccttttgcagagcattttttagtgatatcacaaagtcggctgcggtagaaaataatatcagtgaatcatacaatgctgttttgaaagatgctcgagaaaaaccagtggttgcattgctagaggatataagacgacatattatggctagtaacctagttaagctcaaagagatgcagaatgttacaggcctgatcacacccaaggcgattgctattatggagaaacgaaaaaagagtttgaagtggtgttatccattttcaaatggaagaggcatttatgaagtggatcatggaaaaaataagtatgtggttcatgttcgtgataagacttcttgcacttgcagagagtatgatgtgagtgggattccttgttgtcatattatgtctgcgatgtgggctgaatataaagagacaaagctgccagagactgcaattttagattggtattcagtggagaaatggaagctatgttacaactctcttttgtttcctgtgaatggcatggaactatgggaaacacatagtgatgttgttgttatgcctcctccagacaggataatgccaggaagaccaaaaaaaaatgaccgaatcaaagatccaagtgaagaagcttcttcggagaattctcaaaaagctttagtggtaagctagtcgtggtaatacgtctctctttcttatatatttgtaattttgggttaatattttatttacttttgtagacatgtagcaactgcggacaaacaggacataataaacgcacatgccaaatagagctagtgcctaagccacctaatccatctctagaatttccttcttatcatgcgaaagttattgtggtaaaattctaattttctatagtagtgtatgccaaatattgtttggaaataatcttgttatttatgcatttgtttttgcagacatgtagtaattgtcaacaaactggacacaacaaacgaaaatgtaagctcgatccagtgcctaagccacccaatctgcctcctggaagaccttcaaagaaacaaaagaccacccaatgaacaagcttgaagtatgaagtcttgctttttttagatttcgatgttgaaacatgtttgaactagtaatgttggctttagattttttttttgttctattagatttaatacacatggatctctaaaagaatttttggatcggttgaaaatttaatttttttttaacagcaaaaataaagcaatcaatatcatacatcaacaatatccaatgcaatggctgtaccagagtctcctcaatgatagatcgttgatcagaagtggcagcgtttaatttaataaagcaaaggaattttaataaaatgttttattgcagcaaaaaaatacatgtcgtttttcttcaatgtaaaatgcagcgtttaatttaactggatatttaacagtacagtagacggaatgaggttttcactaacaattttagagttcatgtgttttttcattaaatatatcgttgagggtttttttcacaattcatatttagttggggggttttattactaaaaaccctaaaaaatacaataacttaagaggtaagatattgataaaatttgggaatatcagaatatgttgaaggatatactgagaaagttacgaaatggctttttgatccataatctaacttagtcaatattgaatagattttagttcccacacgaaaatctcgctaaaacccaatgctatatttgtttgaattattcaaatttagacgactaaacacagttccaatggctaatgccacttctttcattgccctcgcttatcttcttgcatctggttcgaactctttcttcttccttaaaatcttatgttttctctgtgcatgtgtctgagcgattgataattaaatgtccatgattgttttatagatatttatatgtccatgattgtttgtttcagtttacattatattgtttgcatatacattttagtgtttacctttaccacttccaaatgaaaactgaatttttttttattttttttttaatttcaaatgatttttttttcttttgctattgttgaatctcatataatcgcaaacacatatatcgtagttaaaacaattgagatttaggcttctctatcatttattattcaactagacgcctttcaaatcttaaaactgacgtcaaacacttttttgttttgtttctttctttggcaaatgggagagaagcgttaatgactacggtggtgcttgggaatcggcaatgtgtacaagccatggattgcacaaacgtttgttcacacggtggtctctgcaccaaaaacggtaagtgtgtttgttggtcgccaaacgtagtgatcaacagcggacctccgtgctggtcggatgaaatgtgctttagtacatgtggtggaaatggtggttattgtaactatgatattggaggatgtttctgccaatgatatcttaggaagtgttctattttgtttcggatgaatagaatagttgtaaacttgtagtcgactagtttatgccttacatttaaatacataaataagggcttctcgttgacctaatgtaagtgtttctgattggttctacatccagaccgaaacttgtgtttttcttctaatagtttgctcataatctagcctattcttcagcccaaaaggccataacctaacctatttctcaagtctcaaccaaatcttgtttctgtcctactcttttgcatgttcctatatatttcaacttactgatttgtcgtttacctagttttaatatggccatatttcccaaaattaaaaccactgtgatttgatttgtggaaaaagttttccggaaaatatgaaaaaccatatctaaggtggagaatataatctatatgtatgtgatgagtaaagttgtttatatttctttttttgggataaaattacacctgtttagttttcttatatttagattatgacaactagatatgtttgaataggtgtcagattgttaattctaatatatacaaattttaagataagaaatacacactaaaatgttattttagaatatctcttaaaaggttagaatttatttctttagatatcgtgtcctttaagatgctagattcataaaagacaattcgtttccttaaagttttgttagaaagttacacatcttggcctatataaataagttaaccaaattgacaacaaaaatatagcaaagacgaacccaaaaatacaatctagttaaacaacaaacagtacacatgacaaagatcggtttctacttagctacatatgcaaccatctacatcatattatcacctggtctgttttaatttttccacttcaactatctatctttgtatgatcaaagtatctttgtaatcttgtactcaagttttttaaaatatggtcacacagggctactagccacggcggcgcgtgagaatctgcatcaccaatgcttttgcgagtcaccaagcaagtgtgattgcttcccaacgacaccaacaccgccaacatctgtgaataagtcacggaaaggcggaccactatgtacgacagacggtgattgcaaacatttttgtcgtcctaaaaaaggtgtttgtaacatcgatttcgaaacgtgtatttgtcaatgaaatttgtttcagattagaaaaatctaacgacgtgtgtgttctagtgatctatagatcctcaaataaagactttaaccttgatataacacaaatatggctatttttccgtgattttcatttcgtcttcaaaataaatatcaagtaaattctatatttttcgactcaacttcataaatcttcattccttttaaaaaggttttaaccactcttactacaataacatacaagtcattagaaataacagaatggccatatttctataaatccaatctccaaactcctgtaagatcgttgagggactgagagagatagagagtccacaccagcatttaaccaaactcatgttctattaccttctctttatacaaaagcttacttaaccaaacacaagctcacactctgctgaaccccttggcaaacgcgccaattccatgagtatacgatatttcattccaactgtcgtacgtaattcgattctcacttgtttgcagtctgctggcgaaaaggttgcaatcttcagacgtcttgaatgtttcaagagaaaacttgcgagttcgttttccatcttcaaccctctgtagtttctccactccaaagtctcaagaacaaacatcaaagtttcaggaaccgagcttggttcctcccaatgaaacataggatcactttgagaaacaatagtgtagccgtgggtctgagttcattattagaccattaaagaacatttagtcaagataacacgcaaagtttttcatagtttcaaaagggcacacttacctcgttaagcttgagagatcgaagtttcggggaatgtttgagcataaacataagtatatcccattctgtgcaacaagaacaaaactccaagtgttcaagctggtggaagatggtaccagtaggtaactcaggctgcagtacaaaaaaaaaacaaataagcgtaaagacttcaagtttgatttaatcacaaacataattcttacctctgtgggtaaacatagcaagaggcgtttgactgatgcaagagatgtaaggatatcatcagtggaacatgcaacctcaacatgtgcttccacaatctcaggcaaattcccaatcatacactcgtaaccacaacctgaaagctttaagtacttcaaagaaggcgtattcatcacaagctcagcaccagatcctccacaatagataaatctttgtaacgaaggcaccataacagagaaactcataacattatcaacgtcgtcgtcatctcgagtcaaatcaaagacttcaagaatagggcagcttgataaaagcttctgaggagtttccttgtctaggaaaatcacatactccaggtgcagcgttttgagcaacttaaaacataccgggaattgtacatccttgagcgatacgttttttagttttagcaccgtgagtgttccgcatgtgaacaagctctgaggcaatctgcaaggctcagtcttataatgctcataatcgaaatctagctcacacaaacctttttccactgcaattctaacccaaaacccgatatctacttcgctgcattgtcgacctaactttaaatgtaaactctctaaaaccggagccatgctaagtagcaacgatctgtccacaaaccgcacaaatgtcccatgatcagcattcttatcgataaggctgtactgaagttttggcaccaacttccaaagataccgccatcgtttagacaaaacactagtgttcaacacgtcttttgtaggaagcaatgacagtatgcgcaagaggaaatcatcgggcaacaaacttatactgtccatatagctctccaatcttttaatctaatggttttgctgccaacacaggtagaagaaaaccaaaccctaaatcagagacaaaacgatggtatatcaaaaatgcaaaagttaactggaatgaatcaaatcgaaccaattccactaaagagagaatgaaatcaacccaagaaaatttatgcaattgtatattcacattcagaaagttttatagaagtttaaaataagtgagaaatggctttacctgttgcttctcaacactcgcaaaatgaactcctggggcactgaagaaccctaatttgacattttgccctaaattcgatcagttctttttgggttctaatatttttagtttctcggccgtaactttagtagtgcttttttagttgaataataattatatatcaatgggcttgggccatggtgggtcggtttagttagtttaaagccaaaactaacaaccgttatcaatcggtctctatgtctccaagaatatggttatttctgtctaccaaaaaaaaaagaatatggttatttcttgaggctcaagcgtcattagtttcttcttccgttctttatatttttcttccatttttttttggttcttatcgttttataattgttcttctgatattcggttgatctagtttaagtttgttgaattgatctattagttgttcaatgttttggtattaataagcttattcactgttgcagtttttctctttttcataaaaatgggaggcaatcatgatgatgacgacaagattcacgaacatatagatatgaaagattaataagctgataaaagcacttgaaactgctagggaagcacttgaaaatactcaaaaatcatcattcagaagagagtaagaaaatagctaaccttaggaaccctaattagtaattataccgtcatttattttgtacctagttcaagttccatcagattattttgggttatatataattttttacaaaagggtatgtacggaaagagtaattaagatatattttaccgcagagacataagtaaatcttgcaatttagcaaatttaggtttattgggttaatattttaaccattcctatatagacacaatccataaatcaaagagttaagaacactgcagactttaacatcaaactccaaaagaggaaataaaactcaaaacgaaaagacaatcggaagatgtttggtctgagtgaacagcatgaaattttcaattaaatacaagctcacaagtgggtgaaacccttggcgacaaggctaactcctgaagcatctgcagtttcttgttggcatcaccaccactccatttagcggtaaaactcgcctttttaaaacaaactgcggttttaaagagatatgtcgaaagttctttctcttcatgcgttcctccatactctacccactccaaagtttcaagacttgaggataaacatcttggaacagagcccggttgattccattgaggtcggggatttgtaacaggatgacactgagaatccataaggttgcaatgcatcagaatcaacaaagagctgaaacacaacgctaaagcaaatagagatcaaggatagtaatgattaaacacacctgattgattttgatatcctgtaagctaggcgaatcttcgagcagatggatgaatagatcgagccactcagatttgcatgtacaaacctccaaccgtttgagtttatggaaggagctaccaagtccaacaggatacacaacctgtataaaaaggataagcgacagcataaacatacgaataattttcaaagaccgagatttaaagctgaaagaacaataaataagagaccaacaaagttacctctgtagcagataaacataaacgaatatgctcaacggaaacaagagaatacagaagcttctcgggtcggctggcattaacctcaagagtggctttcactacagcattgatgttgataatctcgctaaccgaaaaaagacccgagcgatctacaatgtgcaagtatttcaaagaaggagcatctaacacaagtcctgaaattccaccagaaacttcagatcggtcaatcccagaatactttttttttctttttgggagataagataacttcttcaagcaaggcagtataatcttgaaactcaacgcgcaggaatcatagtaaccttgttgtatgaacaactcttcaagaacaggacaactggctaaaagtctaaggagacaactggcgttggagtaattcatatctctgagcgataaagttttcagagacctaagacaaacgagatcaggaacatccaaataacctttcttcaatttcaagaccacaagtgtttcacaagtgtaaagacttcttggaagagaactacgctttggataatagctgtcagtgtatttgagtttcagctccattagaccacgtttcactgcgattccaacccaaatcgcaatatcatcatatgaacattgtcgacctaacttgagaaacagagtttgtagaacacgaccttcacgtgacagcaacgatctgtccacaaaccgtcgaaaattcccataatcaggctcttgatatccccaagtttcaggcaagtgagtgctatcatcgaactcaagttttggcaccaacaaccactgagacttaaagcgtttagacaagagcatagtttgcataacatcttttgtcccaagaaaagacaaaatcttcgataagatttcgtcagctaagtgactgattctatccatagaaaccgaggaatcaagaggcgaaaaagggatttttctttcacttctcgttatgagaattcaaaagtaaatgggcataaaaacctacacatgaaaaaggaaccaacctttactatagcaacaaattagtaacaaagttgagatttttcgaagtgattcgtttcaaaagcatagaatcagaagagataacaactacaatggagggggatgacttactctgcttcttagtctcagacctctcatatgaaccctaatgaccaattgctagtttgctacaagggatggtctttggtatatagtcctttcaaaattgcttctttcaagtcctatcaaaaccaaatttacaagataatatgaaatcaggaaagtgaaaagcttatacaagtgatattgaattcgacacagaagcgtaatcactaaaatctaactaaaggatccagaaatctgaagtgagagtaaatacgccttattgtaaacagattggagatagaccatcactagaatactgcttaagtactaaaatatgttcgaaatccaaagaactagattcagtttggtcgttgaagatagaacataacagagacggagcacgtgggagaaatatagagaaagagagctagagagagaggaatcggcgagaggaagaagaagatgaaagggagtgaaaaccccttaaaatctctcttcgtttgtcgagagaattagaggggaaggggtgacctcccggaaagtcctcgtgttggctccctctttttaaccactcataggtgggccagtggtaggaaggatttcgggctgagggtgaaattcccaataatcccgggttcgaatccccacggctgcaaacaccttaagtggccaccgcagacaatttaaaatcgggttatgcggcctccaggaactactcttgccgccttcgggacgtatgcagtgggctagtctgggtccattgggcttgggatacctgggttatccaaaaaaaaaaaaaaaaaaaaaaagaattagaggggaagaagaaatggttcattgtaattcttcaagtttttgaggggcaatttagtcatttgcatttttgactgaactaatttcatctgaaaagaatgcaccaatcaaactctttttttttttttttttattgtttttggatggctttgtaaaactctaatacttttcaaatccaaatccatccaatctgtatctagatggagaattttagaacagaaattgcatatatgccattaaataaggttataataagaagaaaccaacaatggcaacaagtctatcagcgaaacaaccaatctttacttataccgccgctatactgtggaagttcagccatatctttgaatgcaatctcgcatgttgaactcctacgtaacattaatgacaactccatgagcatcgcaagtttctcttcaggattgaaggaaaaacttatctaagattcaaacatatccaaaggtattattttgtatattttttttctgattttatggtagcatttcattttttatttttttttcgtttactggtatctctttttttttttttttttttaaagtcagttgccaataacaacagcaaattttgcacttaaaaacaacaacgataaaattatgaattttacactctactgctttagcagattttgggtctaggtttaacattcaacccttctagtttctactaacgcagagactatccataaaacaaggacttaatataactgcaaactttaacatgaactccaaaagagaaaggaaagaaaaaacgaaagttgcatacaatgtcacttttaaagagtagaatcatataatttgtccaaaaaaaacacacaagaagttgacatgttgttgagaagtctgaagaggtttgatctgagagtgatcactgattagcatgaagatttcatttgaatgcaagctcacaagtggatgaaaccctttgcgacaacgataactccaagcttgtggaaagttaagtccaaccatacttaagaagaaaacaaaagacccatgataacataagatgatcacctaatctatagacactagacagaagaaaataagcaaaaaccataaaatgatatgctgtagctaaaccaaggaagttacgtttatgattctttctcatacagcacaaagaagcagagcgagaaaatagcaaactcaaagatctaaagtttctttagagcgcttgtaacatatctaagatttagatcacaaactgatcaaaaaaaatttacttggctattgaacatgtcttaccctctcaaggatgacagtaatcagtccttaagagaaaaccatatctttgctttatgattccttcttccggtaagtagagacacaaagcaagaagttacgaaattaaatgagctaaatataaaaaggataaacataacacgttctaatttcttatctaagattccgattaaagattccaggagaatgcaagcatacatgctggggaacgcctcgatgatacgggaaaatcattgagcatctcaagtttcttgtcatggtcaatgtatttaaaggagacaatagttgcctgctttaaacagcttgcaattctcaagatgaatgctacgacttgtttctctgtttttgttccttcataatctacccattcaaaggtttcaagactaggtaacagatattcaggcaccaagctcgtttcgttccagcacgggcgtgggtcttcatcccgaaggttatgatactgagatacaagtacatcgcatcatatcaatcgtactggtaaaaataaccatatctaaaacacttaatgcattaaagggaaatatatgtgcatacctgttcaattttgagtgtttttaaattaggggaatctctgagcacacgtataagtacattcaaccattctgtctcacatgtgcatatagttaaatgtataagagagccaaatatattaccaacaggatacgcatcctgcataatttagttttgatcataagagaactcgattagtgacagtttatttttatccttccaaaagagaaaacaaataatgtgtactaaacaacatgttacctttgaagttggtaagcagagaaaaagacgtttggttgaagttagagagcccaaaatctccttagtttggggagaaaaaacgtccatacttgcggtgataatcctattcatagtactcttaacgacacgagacccatacgtataatcaactatctttaagtgttccaaagaaggagtatctatcacaaaatcatgaggaacatcgatttcaagttcagctctttgtattaaggataaacgctttagagatggcactctaacggtcaaaatggtgacattgtcatctgaacattgcttcacaaccaagtcttcaagaacaggacaactcgatataagattgttgacaaattcattacctgggtacttcacggatttaagccttaacctttttaaggatgggaaagaaactggagtagaaacgtccaccagaaccacgttttgtagtttcaggtccgcaagcattatatgaaccccactacacaagctcatcggaagaatgacttgatcagttttactactacgagaagaagtgtcatcaatcttgataatcagtttacgcacacaacatttctctgcagctccaatcagagtatctccactaccacagatatgaccaagtttgaaatgcaaagtatctatgacgggagccttgtgcaaggccaaagacctgtctacaaaccgcgaaaaccttccataatcaatatcttgatagctatcatcgtacacaagacttggaaccatcatccaaagatatcgccaccgttttgacaaaaccattgtggccacaacatctttagcattaggaagtaacgacaatattcccaaaagaagctcatcatgcaactgacttatcttgtccataattaagagatttctgcatctggagaaatccaaatgcctgaaaacatcaaaaaagacgaacaagggatatgagattcttaggaaccaaacaaatagtcataagcgaaaacctagcgagatatatagaaacaaaatccaaactaactcctccgaataataagcaccgagaacctctcttttaattcataaaataatgataaatataaaaagggagatttagctaaatactgtattaattactaaattaaccctaattaaatattaaatccactgtctaatacagtacataagataaatcttaactctatcactcaccaaaaacaatttaaaaaatctcaagtaaatatgtgttttgttgttgaagttgacttgtaaaaccactggatatcattaattaccgatcagagcgtgatttttcacattaatatcaactagggttattcgatatttaatttctaaccgcaacgcaacaaaaaagtcacggtttcctttctaatttctgaaccaagataacccaattaaaccgatgtcaaaaaaaaaaagatttaccaaatttttaaactgaaccaatatcagaccaaaagaaactacacccactcctgcaacaaaaagtgtgtaaatcaccaaaaatagagcaattcctgtttaatagatatccatagagatcaaagaacctcttcctaatagaagatataataaaagagtaacaaagagaagatatatctttatgttttcttcttccagcaagcagagacgcatagcaagaagataaaacaatcaatagattagaattttgatccatatcctccaaatcaatagattagtccaaatacaccgtaagtataattaagaatcttacaatatttaatttttgtctagagaatgtgcaaagagaaacgaagttaagataaataatcgttgacatcgagtcatcgatgattcatgtaactaattggaagcctcttctcggagcagaaggtgtttaatcaccaacagagcagaccatgtataaggaagatcaatttccaagtaaaaacatatgaaattcagagaactaaatattggaaagaaagaacatctctaacaagttcaatagagcttatggagattgagatccaaaaaccaatcaacaaaatgttacttggctaataagcatcataattgaccaagacttcagctgaattcaagctgacagatgggtgaacgccgggatgacaaagacaactccatgagcatctcaagtttcgtgtcgctgtcaatagagttagggggaataatagttgccttctttaacaagctaccgtttctgaagataaatccaactagttctttttcttcttccattccttcgtagtgtacccatttgaaggtttcaagactgtataaaatacattcaggtactgagcttggttcattccagcgtgggcgcggttctttagcccgaaggggatggtactaagatacatggatgaaagtatggtggattagatcaatcatactgatataatactggaaaacaaaccggatagagaaaaaaagctaaataatttgttcatattatttactagtttttaagatacgccgtttatacaaattcattaaatataccgcataaatgttttttttgatataagtccaatagttaatcaaatacaagataaaactactctctttttttgattcaaatgtcatgaaatagttaattttccagtgtagtacagaaaaattcttctttgattgtttaaacgatgaaaaggaaacccaaagcaaaaacaaaaagctacctgtttatttctcagtcgaatttaagttcacaagaactcgagcccatgaacaaagatgccaagtcttctctgataatatgatgatcacaaatctctcctgaaatctttaatttgggggagataaccgtcttctttaagcaagtactattcttcaagatatacaccgcaacgtctctctctctgaatgttgctttatagtttcgccactcgaaaatttcaagacttttagtcaaacattccggaacataacttggttgctggttccaagtacaagagcagtacttgtcaacgaaatcatggttctgagaaaaaaagatcataaaacatggtcggtagttagatcatcaagtaaaaaaaactacagatcaagtgatgagccatgaactggaaaactaattaccttatcgttaagcttgagaactcgaagtttaggagaatctggaagcaacattgcgagtatattcaaccactttgaatcatcacatgtacatagctccaaatgatcaagctgagagaagataataccctcaggatactgagcctgcacatgacacacaaacttttctaagtacatgagaatttgttttaaaaacaatgatagggtttaagttactagactcacatttgatttcttcaagcataaggaaagtttcttgacagaggtaagagattcaaaaaaattctcagtatgggtgaaggcaacgtcgagattagcctcgtctaggtaaggcatatcttcaaaagagcatagatcagtgtaatgatccttaatgtttaagtacttcaaattaggtgtatttatcacatatgcatctgaatctgctacaccatgtagaggtgataaataaaccgtcaagctctgtaagtaacgcacaataatagcaaatctcttgacgttgtcttcattgtgtcgtttcacaacaagatttcgaagtgaaggacagcttgatatgagagtacgaacagattcatccccggaatacttcacatatcgaaggtgaagcgttttgagtgaaatgaaacatgttgggagccaaatagctccaagaattgcgttcttgagttttaaggaaactagggttttgctgtcgcatagtctcctagataacctgatgtgtccgtgatcgggataatgtttgattattagctcgcagatgttgcggtccagcgcgagtttaatccacaatccgatatcatcagcggtacattttggaccgacgctaagtctgaggcttactaaagtaggagccttatgtaatatcaaagatttctcaacaaagtgaaggaaactatcgtaccttttaccgtcgtagattctatcgttgaacctaagtttatgtaccttcgtccacagagattcccatcgtttcgatacaccacttgtggcaacaatatcgtttgtcgtcggaagtaaagacaatatgtgtacgagtagatcttcaggaagatcactgatcttgtccacattgaattgacgactctgacaattcaatttttttcttgattcgttcatctgaattttaccttgaaacacgaggagaaagcgaatgagattcataatcgaaattataaattaaccaggggaacaatattttcggattgaattataaatcgaatcaagatatttgcgacttgtgtgtaaagaaacaggaaaaaaactaggttaaattgaatcaagcgcaaaccctagcagagctggaagtgtaagttttggcgatatggtttatgaaacaaattcatctgataatcaaagaaattgatttcacctttcgttgttacttctccagaaggttttgcagttcgtcgcagtaatataaacgcaaactatattttcaaactatatatatgtgttacttttgacggctgcctaagcaatgtgtaaattagatacttaaagaaattcagaagaaatacaataaaacctaattcaaccaataatattttgacagataattaagtagttattaacaatatattaaccaacctaataaaaccctgacccctcatcattttttacgttttaatttactttttattgagaacgtaaaatgaaaactttcaaaattatactaatattttaatttataatataataaatactatatctaaaaaaaatagaaatactaatatttagatagctttgatttaattcttggatgtcaatcaatttcaaacttttcttttccagttttttatagctagcatatcttatattttcgtactaataatattttatattttataactataaaattgcattaatgtaaaataaaaaaatattaaaagtatcctgttgtttaggatatatgcaaccacctctatttcttcttatcttcataacttcattcataccctatccacttgaaagtttctagactcgtcacaaaagtcacattgaaacggtgcagtactaaacttgagagacaagctttctaagttggactctctatctatttgcaaaatcttttaacgaaacaccggaacctcttatgtgatgatttagacggtttagttttacactcagtatcatcgtactcaagttttagcacccgcttccgaagatacttccattgcttagacaaaacacttgtgcttacagcaactttcgttggacgaaacgatagaatctttactagcaatacatcatcggaaatcccactgatcttgtccatattctgatgcaacaaaagctttaatagatttattcataaaaaaacaaaaagctttaatagatcaaatcctaagatgtcatttgcaagattgttacagtctttaagatatatatctctttcaaacctagtgatttaaatcatcaactgaattttgaggtcgcatgtgggtgaaccacgtaaacaacatttcacctccttctctatctcaagcttgttttgtccttgtccgatcgaaattgttgcagtctttaactggcaagagtttctcaaaataaatgtcgccagatctttcccttctatggaatcaccgttacctaaccacttgaaagtttggagactcgacaacaaacattgaggaacactagtaatcatttgctcccagaaaaccagtgtatccataccatcacttgagaattgatccttggattaaaatataagagttagatgagaagggcatgatacattgaattaatgttactctatcgaagaaacttacattgaactccaagtttcgaagtttgggagaagctatgagcaaccagtaaagtaacttggaacaatatgcttcccagatgataaacgtcagatgttcaagctgattgaagacaatcacatcaccatatagagcagtgaaagcctgaacaaaggacgatttagtaatctaagagatatagtgagattgaagattattcaaatcacctctgcattgttgtctggtatgaacaatgaaagacgcttgacatatgtgacagattcaagaagcttcttgatattgtgaccagcagtggaaacaaatacctcctccagcttaggcatgttcaatatcaaacatgtggaacactcaccaaaatctctagctttgaaatacttcaaagaaggagtatgtatcacatactcttccgaagaacattgacccaaaatctcaaaggataaactaagcaatgacgggatgataacagcgaaatttctgacattgtcacctacacgtcgttccacaaccagatcttccaaaacaaagcaattagacaaaagccgttgaagagattcttcatctgcgtatgtcacatgtgaaaggtgcaaagttttcaaggatgggaggcaaaaaacatgaggaacatccacgagaatgttttctcttagtttcaatgtcacgagtgatttgcaagtatacaaggtagtcggcagtaatgcatcacgttttcccttgaaaggagaaaatctaacgcttagctccttaacacaacgagaaactgcaatttcaacccacaaattaatactttcaggttgaaatagttcgttgtatatcgtaagtcgcaaactctctattacgggagagctatgtaatggcagattcttatcaataaaacgccacatcctctggcttttttctaacagaatagaatcggttctacttctactcccaccccgcatatagagaatataaattttaatgtcatcgtggtactcaagttttggtagccgcatccaaagaaacttccactgcttcgacaaaatacttgttgttacagcagcttttgttggaagaaacgataaaatcttcactagcaattcatcatcagaaaatccagtaatcttgtccatacctctcaaacaaaaaccttcaccgtagtttaattaagttttgtcttacccacacagaagagcaacatcaaccaaaggcagaggcagagaataacaaatagagaggaataaaacaaagccctagaattcttcaatttgttaaaaaccctaggaacgtaagaaaaggaggaaaaaaaaccctatacttacttaggctccgaagtaggtctgaagcttgataaggcttgtggtttcgtaatatttcacatgtcattgcaactgtgtaaaatattattaaatatcagtgaagttttgtctcaagagcatattattaaatgtgtttcttaactttgagttctccgacaagtgaaattttgtcatttaataatatgctcttgttctgtattaatataagaagcacatgagaataaaccaaatgcagatgaggttctaacttttagatcaatagagaaaacaacccacaagatgttaactaaacatgtactaaaaagatctctcaggacaagttaagttcatttcttcttccttctctcagtcgaacaagagctcacatgtactggaaccacgcggtgaggatgacaaatccttgagcatttcatgtttctctagcagagtactggtgggttttggagagataatagctgtcttcaatcgaatagcgtgttttaagataaatgtcgctacttctttctgcttttgtgatccttcatatagttcccacttgaaggtctcaagatgaaataacaaacacttgggaagagcaggttgcttccaactagcacggggactaggggcacgtcgaatatgtttctgtgatcaaaattgggtaaagagctataagaactccaatgctctctctgtgcaatcaaaactgaaaacaaacaagaaactaacagaataacagaaagtaggtttgtattgatgtacctggcggagtttaagaactcgtagtttaggtgaatcttcaatcagtctggtaagtaaatcccaccatcgtggcgcacatgtgcatagttctagatgaacaagctgagagaagatagtaccagcgggataagcagcctgcatttaagaacatcaagtaaccaaaatcaaatcacaagaaaccgtcatttttttcttgttcaggtaatagaaagagagattacatctgaagtgatcagacatagcgcaaggcgcttgacagaggtgatagatcccagaagtttctccgtatttttataaataacatcgacatttgcctccaccacctcaggcatgttctcaatgtaacaaaatccaccccaatagtcttcaatgtctacacgcttcagtttaggagtatctatcaagaacccatcatcatctccttcaaaagcttgagacgatttatgcaaagataacgtttttaaactaggcgcagtcacagtaacgactttaacattgtcaccagggcatctttgcacaaccaaatcttcaagactagaacagctagatataatcctaggaagtgactggtcatctaaatacttcacatctaaaaggtgcaaagtcttgagcgactggaagcaaacataacaagaagcatcttcaagagttatgttttcgagtttcagaaccgcaagcgttgaacaagtaaacaaacacttaggcaatctaataggctcttcaccagaacaataactaacactcagttcacgcacaaagcggtctacacctattctaacccatacaccaacatctttctctgcagtaaaacatatcgaaccaatcttgatattcaaactctccaaagtcggagccttgtgcagcaacaaagacctatctacaaactgtgaaaaccttggacatgtattatcatgaagccttagatcatagttgagcctagggactaatgtccaaagaaaccgccatcgttttgacaaaagactcgtcactaaaacatcttttgttggaagccatgataatatctgtaaaaggaaatcatctggtaactgactaagcctatctctataactaaccatttaggttacacaattctttcacaaatggttctgattcctgcaaaataaatgaaaataaccataagcaaacattggatctgcaggaagaagaaacccacaaaaattagccatgtgatacagcgtatacaagttcaagaacagagaaaggaacgattttagaacagattagacttagaatcacaaagaaactggttccgttcgcttttgggttttaatcaatttacctagctagacgttaagaattcatagaataggggaaatttttggcgaataaaaagattgattgaaaaacccatgaagaaattagaagaaacttacgatttttatagccaaattgttgcttccgtgacgaaatttgtaggttttcgctatatctctctctctgtgaagttgtgagcgaagaagtaaagagaattcggttatgcagaggtgtttaattatgtttggtttcggttcaactaaaagccggtttgattttggaacaatatttttgaagcaagaaatcaaaccaaaatttatccaacaaaaaaagagagagagagagagcaagattactagattttaaaaatgtagagttgttagaatttaggaataaatcatttattatacattgtaattaaaattttggtatttttggtttaatttggttattgaaataataaatcagtttgatttttgttatgaaatagattgattcacatttacccttatttaataacaaaaacaccactatttacccttagatcacatccaatgtaaaaaaaactttaagagagaagagaagttatcataagattggcaatttaatatgagaagaaacgaatataatttttttatcaaacagtaactacttatgctactcaaatcttggctctcaatgtcaataatttgggtaaaactataagctttgagacaaaacagaagaaacaagactggaaacttaaaagagggaaaaaacatgttcaaataaaatcaaaacattacaatcttatagctttgagaatgaaagctgacatctgctggaattaatccttcccatgaactcaaactccattggtatgtggattctctcttccaacgtgactactgatgagaatcgaatactcatagtctttatgaagtttccattctttaacaaatacttcaccacatccttctcttcttgtgtccctttgtacaaaatccacttaacagtttcgagactcacaagtaagcattcaggaacagaattgggttgctcccatttagtacggacatgtttggaattcctgcagctccagtttctctctctctgagatcaaacagttcatgacaaagagttgcaatttaatatactgaagatgcaacaacatcatctagttttggatcaaaacttactgattggtagagtttgagagatcggagtttaggtgaacgtctgaggataagattcaaccaatctaaggagcacataacacatagctctagacacacgagctggtcaaagtctcctcccggatatgaaccctgcaaaagtgacagcatcatcagccgaaactaaatataataaacgcaaaagaatcttaaacacgagaaacatagagactttaccgtttgtggttttaaacacaaggaaagttttttagacgaggtaagactttccagaagcttctcagaatcaatatgtctaaggtggatttctgcatccaattgctcgggcatattcactaatgagcaaaacccactaaaatgatcaacaatatctaaatgctttaaagaaggagcattgatcacaaatccatgatcagtttttggattgtgataaccccctactgtgtagcggatgtttaagctctgcaacgatggcacacaaattgcgaaagtcttcacattgtcagcgccccatcggtgcacaaccaatgtttcaagaatagggaaacaagacaaaagcctctcaacggttttatcgcttgagaactttacatctagaagagataaattcttgacggaccggaaacaagttgtcgaatgaacatcctcaatggtcaatttcataaagcgtaaagccacaagggtgtgaaactttccgaaaaactctaaagctgcagcactatatgtaccgtcatagtcaagcgtcggaatcaatttccaaacagaaccccatcgtttggacaaaagacttgtagacgcagcaacttttatcggaattaatgacaaaatcttcaccagcaaatcgttaggcaaatcactgatatttctcatgttgaaacaacctttggttcttctattggaatttggaagacatagaaaacctaggagaacctcaaaatgacatagacattgatatcagaagaagaaaaagcaaagaaccgtaatcatatatatcaggtttcgccttgatattacgatgacctagaaaaaataaagtgcaaagagaaagttcgtactaacctttttgttatatacagtatctgttactgccaagaacgctcctctgaatgggtcgaaaccctagttttgttatatagctagtttcacatctttattggtaaaacagtattaatgaaaactctatgtgtgatcgggtaaatcttgtaaaaaagggacaaaactcaagcaatatttttatttagatcttttatataattatatatagattttatatatttgcattttaatgtactttatgcacatttgttaagaaataagaactaattaagctagaagtaataataagtttaccattataataaatagggaaaaatcatgcacctacaaatactgtattagtaaatatttaagaaacatttcccatcaagttttgtaaaatctctctaattaatatatcaagattttttggataatttgcaaacatctttttttaaagataatttttctgtgatgattttattagaattttggatagaaaatctttaatgatttcaaagaaggggattcaaacatttatatgattttttttctctgtagctacccgatttactctgctcgtaatcattgttcaacaggtaaaactaaccgtaattctgaattgagattccgttccgtgtctattaatcccagaggaaatggttcaacataaatctctacttttaaaaagtgttaaaaaactaatacccaaattatttgagaaaccttttattcatctaaaagtcaaaatctccctaactatatttaacttattacagagggaatcgtcaaaacacgaatgtattatatattcatctcaattctgaaaacaagcatgctttctcatgattaagaaaaaacagtagtgagaagtaatgtgaatcacttcgatcatattataacttatataaagttatcaaagcaacataattaagtaccaacgatgctccaacaatgaaaacgactatttctatacctctgagatatgatcgatggaaacttcaggtgaaggaaagcccacatttagtacaaatcctgtgtatggacgatagctcttgcagcatcttgagtttctcgttatcattggtcgatttcagggatctaatagccattgtcttaagctgtcgagagttttctagcaaatacatcaccacttttttctctacttctcttcctttgtaatcaatccactcaacagtttcaagactcgaaatcaaacacttaggaacagaactcggctgctcccattgagtttgaacatctacggaactgctgcaacatctcttaagaggatctagcaattgataaaattttgcttgtctttgttcgaatctgagaactcggagtttaggtgtatggttgagtataagacgacaccaacctaaagagcatgtacaaagacttagagacactagctgattgaagacgcctataggacatgaatcctgcaaatggcatcataagttatagaaattataatgaaatcaaaaatagaatatatatagtcacaaaatctcatagaccttaccagtggtggttgtagacataaggcaaggcgtttggttgaggtaagacaacccataaacatcttagaatcaccatgtcgaaccttgatagaagccttcacgaggtctggcatttttactaaagaacggaacccactatggggagaaaagttcaacaacgtcaacgactttaaagacggagctttgatcacaaacccaacatcatctccaggaacttgagagcgacagtctatggctattaatctctgcaatgaaggagccgcgattgtgaaatttttcacgttgtcatttcgacgaatcaatatcagtccttcaaggacagggcaaccggataaaagtctattaacaatctcatcacttgagaatttcgcaaataaaaggaccagaaccttgagtgaccggaaacaaaacatgaaaggagcatcatccacagtgaaatctagtaggaggtataaggacacaagggtttcacatgtatacaggctcctaggcaaccgtatgggccctgtactgggtatgtaccggtaaatatgaagattgcgcactcgacgagaaatcgcaacactaatccatgtttcaatatctgaaggaggacaatttcgactaagtgagagatgcagagtttccaagactggagcttcgtgaagtagcaaaaacttgtcaacaaatcgtgaagctctccaatgctcagtgtcaacaagagatggatcacgataatcaagctttggcacatgcttccagagataacgccatcgcttggacaaaaggttagtggatacaacaactttggttggaacgaatgacaatatcttaaaaactacatcatctggcaacaaactgatcctatccattgtaaacgaatccttcaaaatctcaaaagtttgcctcagtggtttttgttgccgataatagagtaagatttaaaaaggttaaaagcatcttcggtatcaatttcgcaagcaagaaggcaaaaaccaaaccctagcaatgatgacgatgcactcgttccagatcaaaccatcttcgactcttaggagaatatatatacgaaagaaaaattgagaatcaacgagaaagtttaacctctaactttgtcctcttttttttaaccacctaaattttaatcagaaaggaaaactctaaatgaagcaaaaaagaaaaaaaaaaaaaaaaaggaaaaagtaacgttttgatcgtacgacgccgtttgcacttgggacaaagttgtacaactttttacagcacacgtcaacagcacccatacggtaaaattctaaaatgttatatataaaaaaaattattcatctcaattctgaaaacaaagtatgttctcatgatggcaatgacaccaataactttggacacaaaaaaaaaaagaaaaaaaaaagattggtgtcgtgagaagtgatgagaattagacaagtccctttgaaaacataactgctcatgatgctccaagaataaaaacgactagttctatatctctgagatgatcaatggaacttcacgtgaaggaaagccgagatttagtagaaatcctcggtgtagacgatagctcttgcaacatcttgagttcctcgttatcactagtcgatttcaaagatataatagccattgtctttagctgtctagagttctctaataaatacatcaccacttagctgatcaagtagctttcaacctccttaggttttctctccaaccaaaccagtagacacaagcaacatagtagtaagttctgaacaaataaatttgccaaaagatttcgatactgcgtaaaaaagagtaaattttgaagtgattcgtttcagatactcagaataaattgccaaagtagggaagacatggaatctttgtggctttcagatattggtaatgggcagagtatttgacttggtgtcactgattcatcatggcagatgaatactaaatcatgaagctttatttcttctttacatatacaatcacctatcataaatcacccaacttcaaaaatgtaacaaagagatcacaatgaaaatgagaaagagataagatgactacgtcgtgtgtaaccgagtataaattccacattatccgggttaaaaagctaaaccatcgtactatgtcttggacagacccactttcttgtatccacagaacaagagtagatcaaagttcgaacctttgtaatcttatacataatgaaaacttagattgatgatgacaaaaattatcaaaaacgaatgcaatgcttgagcttagaccaatccatgtcttttatttacaaaatagattccttcttttttctttcctcatacacacaaagtctataacaaaaagaaaagaatcaagatgcatagtgtttcagccaaatcctcaaaactgaatacggtaaaacgaatattatcacctaaagctttctctctacatatgtccatgttaaggtgtagtaacaaaatgaaaaatcattcttcttctgtctctaatttggatagacaaggcttacctctcagcttgttaatcttagatccctccccaattcaagaacctcttcacttcatcataaaaaaccaagatagcagccgaaccggtgctcctaaacatattagagagtgctccacggtaaaacgaagccaacccttcactcctatatatcttcttccaacaatccaatgtgctacggtacatcggatgctccatcccggattgcatcattatccgtctacgaactgtatccaacgggtaagaagccaaaccagcagatgtagtcacagcttgagccaaaccccatctcttccacaatgccaactcaggtttagtatcctctgagaaaatctccttaactgtatcaaaccctccaaagtataagccacggtgaataatcacaccatgtagagacgcaggtaagcctctatagattcctctaaccccatctttcttatgaatcgttgacaagaaatgatggattcctctgaactgacgagcttcaggcttcccaatgtcagcagctaaacgagtatgcgcgatatcaagcggataaacaacaatcaaagcagtacaaccagcagcagaaccagccatgaaattagctaatgcaccagagaagatatgattctcttgagagctactgtttctaagaatgcttctatatagatccttaagagagaaattaagagcaacagaaggataataacggagcacactgcttccattgcctctccataaagataaaacaccttcttctctaacagtacggaagataaaatcaaacattcctttaaaccttctcttccctgcgtgaccttcgtctccaacgattgcgatattgctctcttgtgtctgcaataaaagcttggctctttcgattggtgccacgatcgtgtgaacaacacctcccattacagcaccagcaagcaaatctttttggaaatgtttcagagtttgaggaagcgataatggtgattgattccttcgatttcttgatggatcttcttcgtcttcttttgaaatacacatctttgaaaatgcagtcaataaacacaaagtttcgatctttgaatgaaaaacaacaaattgggaaatgggtttgattcgaatttctcaatctgacattatattgggaacgaaacaacttgtagattccaaagaaacagggaaaatttagaaacccctagaaattcccataaagagaaaaccaaaacctcaagcgacgattaaggatcagaaaaagaaagaaagagatatctttgctggagatgatttggttccttgcgtggattcgaactcaagccacaacgagataaaggaaggtgttagctttcaagagatgttgcgaaagatagatgaactgagactggataattctgatacatcaaatattgggcttgggctcaatgtctacaggcccaaatatacttactttaacaacataacatatcttcaaaaccaaaacccatctatattccattataaaaaacaaaccgcattgagaccaaaatgatattaaacaaacctttgtttttagaagaagcatcgagttgatcacaaaaaagtgttgataacttgagaagaggccaagtcctattattcaaatttaatcatggtttcatcttcttctaaacaaaatgtaagagcgacaacataagaagctataagagctttctcaacacatctaactttcagaccaaatgcctctagcgttcatgaaacgaactatatatattacaatctcttttcaatccaacataagtttacatgagcttgaagctctatgcagagaaacaacctccttatgtttctgaaatctctctttcatgggaaacactctttgaacagagaaagccgcagtctttagctgtcttgcattctttaggatgtacgccactattttcttctcctcatctcttccattgtaatatttccactcaaaagtagacagatgtaaccgcaaacattctggaactgaaattggtcctctccagtgactttcaatggacgatatgaaacaacgttctttgcactaacagaacaccaattatagtgtattagcccttgcagttataaggtaagacaatgataacaagtgaataactgaatgtaagtgttacctttccgagcttgagaacttgtagtttaggagaattatcaagcatccaagtaagcagaccccaccaccctggagagtcttgacatagctccaaatggacaagatgataaatccctatttggtgttgaagctgcataaacaatgactagaaacataagcaaaacagtatagatgtaataaattacaagataacagagattggtttttactaccactgaattagttagacataaatagagattcttgactgatggaagagatcccagtagcttcatgggacttttatgaacaactttaacaattgcctcaatcacctcaggcatattctcacacaaataagagtcaccattgaaatctactaagctcaagtacttcagagatgggacattaatcacaatcatattgccgtattttattgggttaaaaatatcaaatttcattatagaaccacgatgacatatagtcgtcgtcgtttctagcattgtccaacatcaactcctcaagaacaggacaaaccagataaaagccgacgatgagattggttgcttttgaacactacacgtacaaggtgtaatgatttcaaggacggaagacaaacatcgataggaacatccaaagtaactgcgtaagagagtttcaagacctagagcttttcatatgtgtaaagactgttaggtaatttgattaagctatgtttcttgtctttgaaatcagcattacagtggcgaatgtcgagttcacgcacaccgcgaaccattccaatagtgatccatgttgttatatcttcatagctgcaacaaggaccaactttaaacttcaaagtttctagaaccggagctttatgaaacaccattgatctgttcacacacttgagaaaactcccgtaattagaaggctcgagttcgaaattatcatcaaaatcaaacttttgaaccatcgtccaaagattcttccatcgtttcgacaaaatagttgaggcaactacatatttggtaggaagttctgacaaaatcttcaagagcaagtcatcggacagagtactaataatatccatatctaaaccctaattaaaccccttaagtaatttcttcgaaaacaacacgaacaccagatgggttatgcgatccaaagttccagcatccgaaatctctaaagtatattactcaggaaatcagcaaatatcccttgaatcaagtaaaaccctatcaaagtcacgaaagagagagaggagacgagaagaaaactgacaagaataatgattactgttgggccaagatgggcctcgttatctgtttaagtgggctgctattatgttagcatgttaagtccttaatctctctctattcctcaattcttcatctccaacctctatgtcttctatttctcacctcctttctgttacttccttgatataccccaaaacgggttctatcaaaaaccgaaaacctagatgatgaagcagaatcagaatcagaaagacagatacttttaaatgagattgaaaggaaacgattagggaatatttggtccatctgaaagtttgacgagagattgacagtgactcgtgtaattgaaatgaacaaacaaaaaaagagaaattgggcctaatttaatatttaaggcccaaacatttttgcttggtttttctttttcagatcaaagactttaaatttggatgtttctctcaaattcaaaatgtccattaatttaattgttttttttaggttgatatttggactaatctgatcaattcttgcttgccgccctgaaacgaaacattctatgcactcaacaagtcaacatgacgtcaattggttgaaacataatattatctttatctaggaaattctaagcttttgttcattattttcagtattattactattataacattgaccgttgacaatgcaagctgtaattctttctaaaagactcaatgttttatcataactcataatattataactttgttctcatagctaagtttagtagagttcaccgcctcaccggctaaggaaggggtcgaacaaatgagattgacagattgttaataattgaaaatatttgaaatgttttcttgatacatattctttggctggtattatgcaaaatccacggaaaatcttcatctttttaatccttaatatacgagaaaataaaccgtaagatgcaagttaagtttttcttcttacccggcaagaatgtcctttcttggtctacaattaacaaatctaaaatgatataattttttaaaagtaattggatatatacatcttttgtttattttctaattctagttttttttatatatcatggtatttttaaaataaacttatagctgaatttctttttatgctcaatcagtttatacatatatggatgggtatttggtcctctctttttttttggacaaagatttttagtcctaagtggcgttccgtgattcaaatgtaaagacatagtttcttttaccaaaagagtgtaagacagatattgtttagcaatatcttaaggagacttcttagtgagggaaaaaaatagaaaggataaaagaacaagtgggtgtggaatgatctatagcaacaactttacatcaacgaatcagagaaccttttttacttctctaacgtctaacctaaagaatttagaaatttgctattagtcgggaagaaaacaaacaacaaattttaagcttatttaacccaaaaactgagaaaagaaaaaggagaagaaatttcaagcctaacacctggagaatgagataaaaagggatccaagaaacaaactagtgggtgttgaattatatctcttgttgaagcaactttctaccacttattattacccgcacacgtttgatttattgtattcacacacattttaatttcgtgcatttgaatgagtaaacttaaatacaataatattactatatctgaataaaaaagaacctcctaacttcagcttcacttgttcaaaatattcaatcatattgtcttctttttttgacagcacatacaatcatactaacaataacatacaaaaattaagaaatactaaagagtaaatgtgcgtgatgactgatgacataaggaatacataaataagtcggactttaagtggaacattaatcttgaagattcttctgcgttttgtaatgttaggtatggtttttataggatatttacatataattatatccaagttgatgctcattgatccactaattttccgattctacggggtaatatatttttttttttgatgaacattgtttgtataaatcattataaccatacatacatgactaagatgaataaacattcataaatacgacaaataattataaaatttattatgacaaaaaatttcttataaaattttcaaaatatatatttttcctcacgtataagatttatacaataactaggtttccaaacttacatatttacaaaaataataattaatatacctctacttagagaaagaggaataattaaaaaaaaatttggaaagcctaatgcataaaaagtcttgctttaataatggattggatcctttttattctttgtttaaggaaaaataggttcgtcgacagctctacttgtgagtaatgactaatgagcacatccgtttttggagaaattagccgatataaaatattgagccactttctgagattatgcactaacatagtatcgattaaaatgaaatgtgaatgacgccaataatgagagaaatgtgaacacacaattttatcgataacaaaaaacaaacagaaaaagagcaataagaaagaattgagaaaggcaaaggcgcacgcttagacaaaaagaaagcaatcgagaaaaaggaaaaataaaaatagaaataacaagaaaaataaagagacttgtggtctgaaaatgcgtttcatacatgcgcactattaagcagaaaacaccaaaaaaacaaatcccaaaaatgaaaataaaaacaactttttttgggtagagagaatggttcttggtttaatttggatttgaattttgcatggttcaatatttcaattattaagttaatcaaattatattaaattttttttttatatacaataaccattcgactaccaaaatgaattgaccaatcgaaagggattagaattcggtttaaagcaatcggaaactaaaccagagagaattgtaacaagaccggaccggaccaaaacaaaacagaccagagtggactgatgtcttaatcgtttttgttctttattttctctgagaaagagtctctgttctgatttgtcagtggaaaaagagaaagagaagtgggacccatctccgccatagccaaagacctctttctctcccacctcatacctctctactctctgcccatcattgcccccgacgaaactctctctctctcgctctctctctaaaaagagaaacaaacatttctttagtgtctctctctttcatcatctctttaccttttgcttcttcgaaaaaaaaagagaaataaattctaagaagagaaattgagagcttggtttttctttattggcatgaatttgtaacttaccagagataataaagttagggttcttttttttcgttcttataaatatagtaatctttctatttttaagtgtgtgtgtgagtgttgtttgggaataatgggtaactgttggtgtagatttgagcccttaaaccacagagtttctgcaaacgctaaatcaggttctcttttttcctcttcttcttcttcttcttcttactcttaatttggatcttctttcttttttctgctgcaaattttctgttactattatggcacttttttaggcctgaaattacgagatttactaatgggttttatcccaaaaaccttgcgcaaacttggaaatatctgtcggttaaccgttatcaccaaattactttcttggtttgttctgattatgttctgttttctctggttttttgggttctaaatttgttccattagttagttagagttttctatttggataagctatagattcgtttttgtataagtttggactcatttattgagaatcttgacttaccaattctttgttctatagagtctccttccttttcatctctctctctctcctttctctttgtggtttctgcttttgttttcttctagattagtcaaagtcacattttttattatatattctatgttcttggattttagaccccctagaagaatatttctaaaatcaatccatctctctagaatcttcaattcacatacaaagaatctaaaccaattaaacattggtttctttgtctgaaacttttgcagagtcaccaaaagaacagagtccaacagtagaagataaacatattaaggaagttcaaaagctgccatcaaatccaaaagaagtagaagatctaagacgtgactcagcagcgaatcctcttatagctttcacatacgaagagcttaagaacattacaagtaattttagacaagacagagttcttggtggtggtggatttggaagtgtctacaaagggtttataaaagaggatttgggtgatcaagaagttcctgaaccacttcctgttgccgttaaagttcatgatggtgataatagctttcagggtcacagagaatggctggttagtctctctgtcttttgcttgtcttccaagtttctcaaccgattataaatctttgcaacggagagatatgagaaatgtggataattctgatcatgtggattaaagtagttctcttgattaagctttattcatagctcgataacgatttgagatcgaatggggtccttatttcttgatattgtgtaggcagaggtgatattcttggggcagctttcacatccaaacttagtgaaattgatcggttattgctgtgaggataatcaccgagtgctaatctatgagtacatggctcgtggtagcgtggagaacaatcttttctcaagtgagttttagagttctttacactcattagtcttctcgctggacattactcttgaatggattaagaatgctgagctatgtttaacctctggtaggagtgttgcttcctctttcatgggcaataagaatgaagattgctttcggagctgcgaaaggacttgcctttcttcatgaagcaaagaaacccgtcatttatcgcgatttcaaaacttcgaacattcttctagatatggttagtagtagtagtatagtagtattacatcaaagctcttctcttttcctgtggtggaggtttcatatggctgttgtaacaggattacaacgccaaattatctgattttggacttgctaaagacggtcctgtaggagataaatcccatgtttccactcgtataatgggaacttatggctatgcagctcctgaatacatcatgacaggtaagaaatccagtctactaactcacaagttacacatttgtagaatgtactatgctctttgaaatctaatcttctaaaagcatgacacttttagctatttaaagctaaaaggacaacacaatgagtttgttgtatttggattctttctgattagatatgtattggtgacagggcatttgacaccggggagtgatgtgtatagtttcggtgtagttctgttagagcttcttacgggaagaaaatcattagacaaatcacggccaacacgtgagcaaaacctcatagattgggctcttccattgttgaaggagaagaagaaagtcttgaacattgtagacccaaaaatgaactgtgagtatccggttaaagcggttcaaaaggctgcaatgttagcttaccattgcctgaaccgtaacccgaaggctcggcctttaatgcgtgacattgttgattctttggagcctcttcaggccacagaagaggaggctttactagtccctcctgttcagaaagcagtaattactattatcgacgaaatgcctaagaatggattgaagaaagttgaagaattgaagaaggttgaagaagtgaagaaggttattgaagatgcatgctaattcacattgtaattgatcacttttttttttttttttaatcttcttaatatacagtttgaaaaagtgataactagattgtgttattttgtattttgaaatacagattaagaaacagatacaaaggtttgtgaattttcttcttctattaaaatacaaagatttgaaccacagattccactgttgactattgagtaaaacttgtttgtttggttaaacttgcttccaaatttaaatcaagttttcaatttggttatagtaaaaaaaaatcttacttggacaccaagataccaatgagccacgtatctcgtgatcattattaaacggcatcgtttacatagatattggatggttttttaatattatgtttatggatgtttgtttctctgtggttaactgaattagtaagcatatgatcatttgttcatggatttttttttaagatgatttttttttttttaaatgatttgctttgtggttgttgatagtaaactctgcttaattatctgaccaaacaaacaacatagtataaatgtataatgtccatgtcaaaagaacaaaaaaagaattctgttcggtctacgtagtaaatattggatcaaaccaatagccagaaaagctaataaaagcctaattaatgtagctatggatcaacataccgtccttaactgatttatttttcatttgctaatgtgaactggtgatgagctgagaaatttatggtacaaatgtttaaatcagttttagaatattttaggctttgtagccaaaggagaatgcagaacccttcttatttgttgtagccataaaaccccacataattggatagaggtctacaaaaggctctaatcgagttagatgaggtatcagaatatgttattatgtattaaccaatagaaaccagaataattaatagaggtctacaaaaggatcaaaattatcaaaaaaaaaaaaaaaaaaaatgttgtttaaggcttagatgaaatatttatggtaagtcaaattcatatcattttctaaagagaaaaccttaataatgtagctagctaggtccagtgtacacataagttgttccctgaattccttttaatgatttgatctcttttgtatttgtaaaattattttgagaatgtgatgttatataacatataccacataagatcaaattatttactttttcaacatgtacatataaaatgaagaggagcatgaggagtcatctggcgaagcaaacaagaagtgtgtgagagcaaagcgatcgactagcatcttttttgtttggaatctcatacggtgtgaccaataatggtatttcttgaatgtttccatgtaacatttttttcagttatatcactgtaacagtgtaattcctactgcaggcgttatattcacaggctatccggtaatcggaagccaagaccgtataatgtcgtctggtgcgtgtctagacagtcatcagaacggattgattacatcttgtccttgggatccacgcattaaaggcgagttcttttaccaaacagcattaagtgttcctctcacacatgtcaaagatttcatcaacgacattaaagcacttgtgaagattgaaccaaaatctctctgtggccttgaactcaactatggtgttctagtccgttatgtcacatcctctccggcttatctaaggaaagaagaaaaagctttagactttgacctaacttactacagaagcaaagatgatccttggacaccacgtctctacgaggattacatggaagagattgagcaaatggcgatattaaagtacaacgcgttgcctcattggggaaaaaataggaacctagcttttgatggtgccattaaaaagtacaagaacgcaaacacgtttttgaaagtcaaggagagattagatccgtgggggttgttttctacagaatggaccgatcagattctagggttaaaaggaaacgtgacgattgtgaagcaaggatgtgcaccggaagggctgtgtatttgttcggatgattctcattgtgctccgaacaaaggttatatgtgtcgaccaggtaaagtttacaaagaagctagggtttgtactcttgtaaccgcttaagatttatgagtgattctaaactgatgaaataaaaatcctacgaaattaattggtgccaatagcttcacgatgctactgcatcaaatacgattgatctaatttgaagtatatatacctaataataatttgtaacatgcagatatttttctccattaatattttaaaatctaatttaattggccaaatacgtgtttttgaaaacttatcgtagcaatattgaatttgaattattgatactactataagccatacaaactaggcaaagtaccaatcaacaataagatagaaaatagggggcggtcttcaatttttttttgttttaggcgtaattcaaattacttcatgtagacaacttagtcatgatgtctcaatgtctaatcatgccaccgggaactaggtaacctgcgaaaaaatcacaaacatatgaaatgtataatctataagataccacaacctaataactttaaacttatatactaatgaaatgaatgtattaaatttgcaaaccaaattacattgaccgaaaaaaaaaacaagagaattgggacttacttccgcattgtgagccaggagcaagtggacggccacaagcagccgcgacattgactagcttttgcatatcaatggcggcttcgatttccttattgatgacttcgcatacacattccatcccgatgattcggacaagagtgcaacaaccttgggatggtcttggcggagttggcagctccttgtcgatagaatctggacatcccctcagaacttcgatgcctgaatcattacatctctccccctgaatttgagatgatgacaacaacatcattacgactaaaaactgacaaaatatctgttctttcatttttctttatttttattcttctattgtcttctttcttttacgcattatatgtataaaagattgtacggtatattaagtacagaattgagaacacgatcacattttgcttattatggcagtagatcaatctagaatcctttgatataacatagtaagtagtaacaatattgactatatatatactgtatcagtatgagtgaaaattagataacgttattctttttttggtcaacaacaatataggtgaaaattagatacgttactttttatatataaaaaatatttgatctctttttggttaaaagatatttttccgtattttgaagacttagattaaatgtttacagtaagtcaaatctcatattttttatagagatcaagtcagtaagacagtaactatgtgatgtaatgacattccctacatgcccccaataatactgcaatgttttctatccacataagttgtcctctgaaatttcatttaatatattgttttttttttggggtcaaacaatttgatttaatttcttcttcgttatttggtaaaattacaggtcgctattaatatccttctaataaaagccatatggatcacatgatgttatgatatattgaaacttatcataaatacatagatgagtgaatgaatgcttcaaacattgtcaattattttcttgtaaagttacaaaatgtccttttggctaagtttgatcttttgctttttcacatttgcttcctcatctccaccggatgatcctgtcaactgtgaattcggaaacacaatgtgcacggtgacgaactcgtacggcgcctttcctgaccgctctatatgcaaagcagcaaaggtggagtacccaaggacggaggctgagctggtctctatagtggctgcagccactagagccggccaaaaaatgcgggtcgtgactaggtactctcacagcttccccaagctggtttgtactgatggtaaagacgggactctcataagcaccaagtttctaaaccatgtggtgaccaccaacccggaggccaagactttgacggttgagagcggcgtgactctaaggcaactgatcgaagaagcagctaagtttgatctggctttgccatacgcaccgtattggtggggacttacggttggaggaatgatggggacaggtgctcacggaagttctttatggggtaaaggaagtgcggttcatgattacgtgaccgagataagattggtgagtcccggtttggcttctgatgggtatgtaaaggttcaggttcttagcgagactatagatccggaggaatttcgcgcagccaaagtttctctaggtgttcttggtgttatctctcaagtaactttcgaattgcaaccaatgttcaaaagatcgttaaattatgttatgagaaacgattcggatttcggagatcaagcagtgagttttggcgaaagacacgagtttgcggatttcttatggttaccgagccaaggaaaagtggtgtatcgcatggatggccgagttccgcttaatacttcgggagatggcttgttcgaatttttcccattccgttcacaactctctttagtgttagccatagatagatccttaggtaaatctttatttctcaagataattaataccaatatttttgatttgcatagctataatgtttcttatatatatacttttgcttcatgtcatgcagaggagagtgaagagtcacttgaagatgcaaacatgaagtgtgtgagggcaaagctagtatcgtcgtctatgtttttaatgtcatacggtgtgactaataacggtatttcttttacttgcttatacatttgttgattgtttcgatataagattatacaaaactttcactagtaatttccatggacaggcctaatattcacaggctatccggtcatcggaatgcaaaaccatatgatgtcgtcaggttcatgtctagacagtcgtcaagacggactaatcacggcttgtccatgggatccacggataaaaggccaattctttcaccaaacaacattcagtgtttctctcacaaatgtcaaaagtttcatcaacgacatcaaagcacttgtgaagatcgaaccgaaatctttatgcgtacttgaaggcagcaacggtattctcatccgctatgtcacatcctctctagcatttctcggaaaagaagaaaaagctttagattttgacctaacttactacagaagcaaaaatgatccattggcaccgcgtctatacgaggattacattgaagaaatcgagcaaatggcgatattcaaatacaatgcgttaccacattgggggaagaataggaacctagcgtttgatggtgccattagaaaatacaagaacgcaaacgcgtttttaaaagtaaaagagaaatttgattctttaggattgttttccactgaatggactgatcagattctaggtttaaaaggaaacgtgacgattgtgaaacaaggatgtgcattggagggactatgtatttgttcagaggattctcattgtgctcctaccaaaggttatttatgtagaccaggtaaagtttatagagaagctagagtttgtactcgtgtaagttcctaaatcctaatcaaagttttggtcctcagttctgttatatatcaaaaacctcattcctctctctgctttaagagaacagagcagtctctgttcataattgacaagcgaaaacgacgttgtattgaattcgtgacacgtgtcaaacaatgagtagttaatcaaagtgtcactcgcacgtgaagagagtagagtaggtgggtttagggtttaagtgttccagattcttccaaattcagttgatccaacggctcagacttaacctgaaacctttgaagacgcgatcctcgaacttcaccagtccgtttgcactatgcaaccaaacacactttgtatcgaataaattaaacaaaaatcataactttacaatcgcataaatcgactttcatcttcttcacaagaaaacctctctcagtcgctaaaacccttgaaccatctcttgatcgctagcttctaagtaagtgtatagttgaatcatttcgatcaaagtttaggtaaaaagttgtttgctttcagatacccttgttttgatttgtgtcgatgattacaaagttttactttgatttgtgtctttagggtttattagattcattcaagctataaagttttgattttgatctgtttttgcagagagtgaaaaaccatggcatcaacctttagcgcaacgtcgtcaatgggttcatctttggctcctccttcgaatcgattgtcatcttttgtttcgatctcatcaagctcttttggaaggactcagagtattgctcagaggaaagcaaggtttcctaaaatatatgcggctaagcaattgcatttcaataaggacgggactgcgattaagaagcttcaagtgagtctattctatttcggtgattttgtgacttctagttctttattgaataacttatatcatttcattatgtaggctggtgtgaataaacttgcggatttagttggggttactttaggtcctaaaggcaggaatgttgttctagagagcaaatacggttcccctagaatcgttaatgatggtgttacggtcgctagagaggtaacggtgttatctcttgttgtgtctaatgtgtaatcaggtgtgaaatcgatttgtagattttgaaaagcttttgctgtttgtttaggttgagcttgaggatc

SEQ ID NO: 912 - DNA, 27229 bp, Arabidopsis thaliana
cagttgagaacattggtgctaagctagtgagacaagctgcttccaagactaatgacttagctggtgatggaacaacgacttctgttgttcttgctcaaggtcttattgctgaaggtgtaaaggtttgtaatttattgtctttcttttgtgaatttgaaacaaccagtgttttttgttgttgttgtgatatgatgtggattgaattgtgtaggtggtagctgctggtgcaaatcctgttttgattaccagaggtattgagaaaaccaccaaagctcttgtggctgagttgaagaaaatgtcaaaggaggtattgttgacttaattagattcttaatctagctcttttcatgtgctttagaggattcttgatcatgtagctcttttctggattgcaggttgaagacagtgaactagcagatgttgcagcagttagtgcaggaaacaattacgaagtaggcaatatgattgcagaagcaatggcaaaagttggtcgtaaaggtgttgtcactctagaggaaggcaaaagcgctgagaacagcctttacgttgttgaaggaatgcaatttgatcgtggttatatctctccttactttgtcaccgacagtgagaaaatgtgtgcagaatatgagaactgcaaggtattattattgtttatacagttaaatcttaatagctgataaaaaaccgcagtattttttgactatatgtctcttcttgcttttgtagttgtttcttgttgacaaaaagataacaaatgctagagatattattagcattctggaagatgcgattaaaggtggatacccgcttttgatcattgctgaagatattgagcaagagccattagcgactcttgttgttaacaagcttcgtgggacaataaaagttgctgctttgaaagctcctggatttggagagaggaaaagccagtaccttgatgacattgctgcgcttacaggaggttagaccaatatactaagtgttctttacattattgcttctatattaaaaaaaagcatgtttagtttctcaagttgctgtgtttgtttttctctttgtagctactgtgattagggaagaagttggacttcagttggagaaagttggaccagaagttttgggtaatgctggtaaagtggttctcacaaaagatactacaacgatagttggtgatggaagtactgaagaagttgtgaagaagagagttgaacagatcaagaatcttatcgaggtacatctcaaaaaacattgaaatgtcccaataaattggttttatgttacggtgattaagtctttgggtttgtgtaggctgctgaacaagactatgaaaaggaaaagcttaatgagagaattgctaaattatcaggcggtgttgctgtaattcaggtgagatactaagaaacaaatcacatgatgcaaaaagcgtagcttaaggtaataagaagaataatctaaacgttttatattctttaggttggagcacaaactgagacagagcttaaggagaagaaattaagagttgaagatgctcttaatgctacaaaggtaacatcatctctaagcaaagagccttgaaatgtttccatccatatggtagagactaagttgttggaccttttaattaggctgctgtggaagaaggtattgttgttggcggaggatgtactctgctaagacttgcatcgaaagtggacgctattaaagagactctagcaaacgatgaagaaaaggttagtccagaagagttgcacagcagagaaagataacatgaatgaggagtttgccgtctgcgggttataacgccattttacaattcatcttaacctccaggttggagctgacattgttaagaaagcattgagctacccactgaagttaatcgccaagaacgctggtgtcaatggcagcgttgtcagtgagaaggtaatcaatctccttaaaagaatgcaagtttgagtcttttgatatagaaactaagtcaatggcttttttcggttgacaggttctttctagtgacaaccctaaacatggttacaatgctgcaactggcaaatacgaagatctcatggctgcaggaatcattgatccaaccaaagtgagcaaagttccttactttttcacatattgaaatctgctgtttcgggtgctaaccgagttttcttcttttcaaggttgtgagatgttgcctagagcatgcttcatctgtggcaaagacattcttgatgtctgattgtgttgttgtggagatcaaggagcctgaatcagcagctcctgctggtaaccctatggacaattcaggtatctcttagttcttcttcttgaatcctctgaatcattaacaaaatctgcaactttattcttacaaaatttctctgtcggttttcaggttacggcttctaagttggcaattgagaacagagtagtccctgatgaagcaaaagccacgaccaagttcttcacttcctgatctgaaacttctttaagccaatgtaaattatatgtttttccagtgacctgaagaaacatataatttggttctgtgttctccgattcaagatcaagtttttcaatatgacaacttcactaaagagacacagtttgcagtgctcaatagacttgatttagttagtatcattttctttatttcaaattaaaacgaacgaggatatgcacaaaatcatgagcagcaacaagccaacaaccaagcacaatactaaattactactttgtttgtggttttttgtggcctccatagccaatatcttgatactttaaaattgtaatctatttaattagttcaacaattctctttacctgagcatagactatgacataatgtggagtatattgtctattactttaaaactttaaaatgttccccaaacattaattaaaaagactaccaagtaaacatctgtaaagctgagaagtttttttcattttgtatgatctatactaaatttaacagaactattattgatgatatgtttttatatatatgaaatttggagaatttgtaaaaatcaaccatttctagtgcttatactaacaatccacatcataatctttatttcttgttcgttcatcgatcttttttttttataaaaccacattagttgagtttcagagttgtcagcaaactgaagaaagatagtaaagtaagtgatcttcctagtaatttctttacaactttttggtttattcttcaatatatacaaagtaataatcgaggagagaaattttctaagagcattttcaaagtcaatcttactttaaaagcttcgagtgggttccactataactctgagtctctgacacacactctttcgtaaccttttgttgttttttcgggtttgttcataactttttttttgtaaaccaaatttagagttttaaagttgatgatgaacctacgcaaacgcaagagatagctacttagttgtcttccttgaaatttccttactaacttttgttttcttgttcaacctaccaaaaagatttgatgggaaaaaaaattatacacttttaagagcattttcaaagttaatcatactttaaaaactgcaagtaaagttatactagttttgcaaagacatgaaacgattctagccacatattttcttctatttaaacgaatttaatcgttagtgtgaattataggacatatctattgcagatcctagagcaacccatttcagttctcttagttttagttataatcatactaccatagcttcaagaggcaaaagccaccactaaagttttcgatgtccgatttaaacacacatatttatcaatgtaaattatatgtttttacttctggtgacttgacgatgagagttaaaatctggttggcttgagaaaattatagttcggtcgtgttatccagatcgaaacaagtgatatttgagctgagaattgcattgaacgttttaagcttgtagatcacgtgtgaatggagaagatgtttgattggaataaattgatagactgtgagctatgcaaattagggttccagttgtgcttgtcaccattcgctatctctatttttcttttcgtcttcaagaagaataatatattaataaaataaaaaaaattgacggccgaatgatttgattgatttttatatatttatattttatttgaagtataaaagcttaacctacttcaaaggaatctgttagttcgaatttactcacgatactgttattcaaaaagattaaaaatttgaaaagaatccgtcaggtagtttcctaaatcctaagttattttctcatgcaattaacaaaaacaaaaggttttctcaagactttactcttctatttttagagatgtttacgatttttatttattcctctcagaacttacaaattcgtataaattatattctttactatttactcaaaagagtgaaacactacaaataaagatgctccaactagataatggatttaaggtaaaaggcaacaatttagtagtcttcctagaaacttcttttcaacatttgatttattagtgcgtagcaatttgttatgagtcattttatcgaaatcgagacattcaaaagtgaaacgtcaagagagagtttgaatggtggtaataaaaaaccgagtgagagaaagatttgttacatggagattaaagtttgaataacaattagcaaaactcattcattttcaactaattgtatgaaatgtttaaattatttgtctgaataacataatgattaccaaacaaataaataaataaactaattataaattaaaatatttaaattctaaaatgatatgttataaatataatttttataaattataaatgacatggtctaaatactttatttgttataaaaaaacaatatataaggtacatgcatactctcatctcctaggaacccttaatttttctacaggtttaattgagtcaaatctaaatatttaatgcatgttattgataagaaaaagattatatattaacctataagtgaacctgctaaaaaatgtgtgttctcacatctttcagtcattcttagattttttacaaatttaatcattataatcaaatccgatgcaatgcatgcatgtaatttttttttgtcaacagtttttatttagagtaaatacaaaattaaaaacaatatataataaaaaagtgacttaaagatgtgataacacgtactctctcttcaaaaaagaatgatgttttggtttttcacacaaattaaaaaaaaaatcatttttattatctcttaattagtttaaataaatatatttcacttctctcttctctatcgatcacaaaaaataaaaataaaacataatctttatcgaataaaaaaaactcaacacatcaatctattaacaaaaaagagagtattttttagctagttatcacatctttggataactattatttttttcattttaagagtgaaaaaatcatgttttgcatcttagtagtcaataaatatcaatcccatcttaaaaagtgtgtgatctttttatgttttttgataaagtgtttaatctttgaatcaacgcatatctttataaatctgtatcacatccataatagtcaagtaacaaatattggtggtgatgatacgaacaaaaaaaagtacgaatgacaaaaaaaatatgctcgtgggagatacaatacaaaggttaatgctataattcctaaattaatcacattagaaacctaattaattactaacatacgttataacacgtgtatacatacataaactacgcgtaaaacacataaatgtagagagagggagatatagaaaagaaaacagagagggcattaataaaacgaaagaaaaaaagggacagaaacgtacccaaagaagatagagagagacttcttagtttgtgaccaaatatcataaaagacctttccatttccatgcatccctatttcttttttttctttctctatctattttcttccaaattaattaaattctctgtttctcataacaatttttttttaaaagaatcaaagatccgttttttttttttctaataacacaaataaattaaatttgttactaaaataaagtttcagtagtatatgactatctctataattctccttcttcttcacgccgtctaccaaatataaacactctctctatatatctctctctcccattctctctctctcgcactctctttgcattttcctctgcatttttttcttcattaatctctctatctttttgtttcctctctcggaaaaaaaaaattgtcttcttttttattttctggtttttaaaatctctcttcttcttcttgttcttcttctttcttttgttttacccttttctctctttgcgtgtgtgagatatttttctaccattcatcatcatcatcatcaccttttttcagattggtgattttatatgttaatggtgcttccttcttcaacctcactggtattcttctctctctctgtctctcaacctcattgtcgtcactcagatttttcctttagtgggtttcgtctaaaaagcatgaagatttgatcggagacataaagatcggatttttcatcactcatcgtcgtacattgttatctgggtttttttctcctctcctcaaaaaaaaatctctttctctaagatttgttttgttttatatctctacgatcatataagattctggctctttttatcgtccgtactgtttgatctgatgaatatccaaaatttgtttctttcctttgtatatctaacatttgatcgctttgttttggcttaggactcatcgattcatgtgctagtgtttgatctcttaatgttcatgtaaattactgtttttgagtttatggttttgagtgattcagctttatagtgacagtaaaaaatcatctgtgttcttatgttttgttgcagtgatgagttgtttttttcttgatttgaagtaagagacaaatagtgatgttttgttgctgattagtggtggattcttataagaaacctaccaataagaattaagaataagaacaacaacttgtgacactacgatgttttatctgttttaagcttttaagtgttgttgttgctttgttgcagttgtcaagagtaatttggaggtgaaaggttgcatttttctctactagtgagtgtagatagtatcgagttcgagatggatcagagaagaggaaatgagcttgatgaatttgagaagcttctaggagagattccaaaagttacttcaggaaacgactataaccatttccctatatgtttgagctcaagcagatcacaatccatcaagaaggttgatcaatatcttcctgatgaccgtgcctttaccacttcattttccgaggctaacttacactttggaatcccaaatcacactccagagtctccccatcctttgttcattaacccttcttaccactcaccaagtaactcaccttgtgtatatgacaagtttgattcaagaaaactcgatccggtaatgttcaggaagctgcaacaagttggataccttccaaacttgtcttcagggatctcacctgctcagcggcagcattacctgccacattcgcagcctctgtctcactatcaatcacctatgacttggagggatatcgaagaagaaaattttcagaggcttaaacttcaagaagaacagtatttgtctattaaccctcatttcctccatcttcagagcatggatactgttccaagacaggaccatttcgattatcgccgagctgaacagtctaacagaaacttgttttggaatggagaagatggtaatgaaagtgtgaggaaaatgtgctatccggagaagattttaatgagatcacagatggatttgaacactgctaaagtcataaagtatggtgctggagatgagtcacaaaatggaagactttggttgcagaatcaactcaatgaagatctcacaatgagtctcaataatctgtcattgcagcctcaaaagtataactctattgcagaggcaagagggaagatatactacttggccaaggatcagcacggttgtcgcttcttgcagagaatattttctgagaaagatgggaatgatatagagatgatctttaatgagatcattgactatatcagtgagctaatgatggatccttttgggaactatttggttcaaaagctgctagaagtatgcaatgaggatcagaggatgcagattgttcattccataactagaaaaccaggactgcttatcaaaatctcttgtgatatgcacgggtaaaaaaccgtataaagttttctttcgatatgtaaattaatctgtgttgtgatctttacttgacctgacatttgttattttgaaacaggactagagctgttcaaaagatagttgaaacggctaagagagaggaggagatttcaatcatcatttctgctttgaagcatggcattgtgcatttgataaagaatgtaaacggtaatcacgttgtacaacgatgtttgcagtatctgttaccttactgcggaaaggtaacaactttctttaccgttttcatgaaacatcaactgttatgaaaatgggttttcatcttatttggttttctcttcagttccttttcgaagctgcgattactcattgtgttgagcttgcaactgatagacatggatgttgtgtacttcaaaaatgtcttggatattcagaaggcgaacaaaagcaacatttagtctctgaaattgcgtccaatgctctactcctctctcaagatccttttgggtattttttgtgatccctctctgtctctctttgagcttttatctagttattgtaataatacagaatagatgcaaactttttttgcaggaactatgtacttcaatatgtctttgagcttcaacttcaatgggcaacctttgaaatcctggagcaattagaaggaaactacaccgagttatcgatgcagaaatgtagcagcaatgtagttgaaaagtgtctgaaactagctgatgacaaacaccgagctcgcatcatcagagaattgattaactatggtcgtcttgatcaagtgatgttggatccttatggaaattatgtcattcaagcagctcttaaacaatccaaggtaaactaaaagaaacaaaaacacagattcatattgttttaagaatttagtttctaaaagatcatgttgttgcaggggaatgttcatgctcttttggttgatgccattaaactgaatatctcatctcttcgtaccaatccttacggtaaaaaagtcctctccgcacttagctcgaagaagtaaatcggcaggtaaaaaaatatatgaaaactcataactttgctttctctcttgaatctttctctcaattttaccattaatttcttgacaattgcagaattgtagcaaatgtggctgtttgttgttggtaaagttaccttgtacatgtaatgtaataagagcataatttcgcaggtttttggttttaaagattcaaagagacaaaatattcaaagatctaatctacaattcctctgtttcgactctcctttctttgaatcatatcttctaatttatgaaaatcataatataaaccaccatgaaataaatctgatgtttgtttaagaaatatacaaccataattatcttctgctccgacggttcatcttttttggtggaatggtttcttgtgacagaagtaaatggttttttgaaaaaagaggactaatgaataaaaatatgaatggtcaaatattcaaacgatagaattggcttctcataggaccaatcactagttttaaataaataaaaagtgtaacgatcgtgtccaacaggatgatattgattgtgtctagaatataataaagtgttaaaaatattgaaacactcttccacatcttatgggcgatgatgataaagacaactgtctagatcacagagggtgatgagtcaaaagtgtttttgttttaagtatgagagtgtctaataataatactagtttggttcggttggggtcttaaaccattcggtttatcaataataaacttgaaaatatattggtttgctatggtttagtttcttatttggattcgatttttgaccaaatatataatggtttatttcttcaaaaaatagactaaacaaaagaaaaaaaacaatttcgattttttattttagtagatatagtaaataactctattaccaagttggtttattttatatatttgtcaataatatttgtgtgttttgaatctatgtggtaaattagtaatttgataatgacaacacaactatatatgtctttgctattatttggttttagacttttactgtaaacaaagaataataactacaataaaaatgtttataaaaacaaactacaagagattaagtttaatatagatcggtttgatacaactttaaatttgtaatcgatttatcaacacaaatcatttggaaaaaaaaaccccaattttttggattctttttattcagttaaacgtttttaaaccaagttgactcgtattattcaactggaattaaatcgtatcggtttaaggaccgaaccgaataatgtgaaatggaaaaaatcccacctttttgttttcttaactcgctagtttacaacacacagagacaaatcaaagagatcgattgtgaaagaatcaaaatttgttgagataagacatggtgttccgtggcgacacggtggtgtccgtagctcatatatcggctgagatttttcagcgattacggtggattccgccgtcggatcgaatcagcagcggagagatgttacaactcgtttgttgttttccgcttcagcaactgggtcgattcgttttatggttctggaactatatctgtgttccacctccggagattttgtattttgatggtcgtcgtgatgatgacgatgatggttatggatcatcttcgtcgtcttcgaatgttactcatcatcataattactatcatcttcatttggagtgaccaaagttccggtttttctgatttgttgttgtaaagtttttatttttcccgtttttgtgcagagaaagatcatgttttgattttgggtttaattccttgggagtgttgaatataatcagagtctgttgttttaaatccttgcttatagaatcagagaagatgttgagcatttggtgatacatatatatttttagctttcattgtcttaaggagtcaaagaagcttgctttgatctattgcttgtccaaatctagctcttgatagattatgtagcaattcgagtttattatactgtttcttctggacatattggatagttggtttgacttaggaatgtttagttagtggagttaggagggtgaagattaaggatttggaattaggagatatttgatttcaattaggaggatgaagtttagctagagtttcagtctttttgtcgataaattgtattcgtgaagtataaggttacagggcataatccttagatgtgatctatggtatgcatacttttatgtcatcagaaactattgtggatgatcaagttcaaggactttcttcttcttgtgagatcatttgttgcaatactgtggatagtttgatgtgagctctaccgaaacgacgaatggtctcgggataaagcaaggtacgtttatcaagtctatgaaactctctttagactgttatttggaattgaatctcattttgggtgtgtatgaaattatgatgatgatgtgttcttgtcaaagatcaaacatcaaagtttgagttctcctgttgattacttcttggtggtcttcttcctgcaggttggagaattattctggaatccaaattcaagattttgtagtcatttttctaggaggaagtattcgtactgaaatgtaaaagtttaagaggattccgaatcttctgagctgtatcttacagtggaatcaactttcaaaatcttaagaggattcaatatttgtctctaattatataatcctttatttattttcattaatcaaggtgtttttaagaattttattgtgagtttcataattgaatcatgttgatagataacatatataatttgggccagcccgataaagaatggaaaaccccaaaagtaattttaccaaaaaaaaaaatcaaatttgggccagcaggccaggtctctgccaatggggtccaattagtatataccataatctaaaactagatgtgcattcttcagaagttctcatgcttacgaaaaccaaactcatgaaatgatgaaaacacataacaatatctagtataagattccacaatgacgaatcacgaaatattgataaattctcaaaagatccacaaaatctatctgatgtaagaagaacactgcatttatagatatggccagtcatgctacacagtttggactgactgttttttttttttttttttttactttcccttgaaatattattatattagaattactgttctcaggatccacttggacatttctccaaaatagtcatgtaaccgttgatttgggttaattaatcacttggttgtttagtgcacgcacgttataatcttttactagtaatcatacaaattaaaaaagtagaaaagacaagggtggtgattaacgaggatgatggccaaattagttaagacttctatttcttaaaaataataatcagaaagaaacatgaaaaaagctcatcttttctactacctaacctactcaaagctatctaaccaaacaagtattaagatgttaatcacatctcataaatcttattcttcatactattaattttctgttgacttttacaagagaaaatacagtatacatttttagcatttaaattgattaatgttttggttttaaactttgaaagataaataaaaagaattaaaattgcatattaccaagtaaaaaactctttcttgtgggaatctcataatgatgctctctgctacacacagtttgactgactcattggattccccaccgttcgttagatcctttcttccgtctttacctgaccttcttcattgggaacatagacgctccgcaccgtacacgtgtcatcgatcaaaatgaattaaacgccatcaaaactataaacggcaataccatttcacttgttaacggcgagcaaaccgaaacagaagaaggaaagaccaacagcttcatcgggagacagaatcttgtgtctgcttccccatcataatgctactattttacttactactactccattgattgaaactatttgtaaccaaactaaagacaaacattatcattacgaggcaaccaactctcgtatcaacaacaatatctctttgtaatttctcatataacaacaaaatatgattccatttttttgtaaatttgtaatctagtatcattttttaccactgcaaattaaatctgttggggtagaaaaatgtgttaaaaagaactttgattcttaacctagactcaataaaaacgatgatcattaatactccttttatgacccaaccacactattaatgatcaaataacttttacgtataagctgccttgaattatatttattgatttctttagtattttggaacatccatcttaactatagcctataggtgataaacaaaagctaagcattagtttttttttaataatctgagtagctaacaaaaagcaataagctattcgaccagtagtatgatgggtcaaaacccaaaacaatattttttacaaaagactcttctgaaaaagttgatactttttgcagagaactttgttcttgtttctttatcttatctttaatttaataacatcgttcgatacgatgtttcagaatttattcgtttcaagattataaatttaacagaaagaaacactgatttaaagaggaatatatgcttgaaaagtacgcaaaacatttaaattttgaaaacataatgtttctccatcgttagtaataaggtccactaaattaccaaaattgagtgatattattagtttgatgcaattaaatgcaaggaccatttcatataaaggggtaaatttggaatcttacgtattttggttagtcgctcttcggagcggaggctcgtgaattttttcacaagaagttgcatcggcattctcgccatgactcatgggctccactcgcatcttcttttagattatgttttttttgggtcagaatttggattttgttatttcaactatttagtaagtttaattataagaaaattatgttctaatgcatttttttagttaagttaagctattttcttccttaatgattcaaatgtatctaccaatttttgatgtattttgttcaaaaaaatatcgtagtattattatgaaataattcatctgaatacccattatctaaaaaaatcattattaatcaagccaaggctgacactttttttagaaaaaggggtttcgaataatcattttatgtagcaaaaaaattattttcaacataaataaaaaagttgatctttaattgtcttttaattacctagaaaaggtttatttagtgataattaaaagtagagagagaatatttgacaaataaaagagagagagagtgacaaaaagtggagacctttcatcatcaaaggagagacccacttcaaatgtcactgcagaatcactggtgttagtggtggtgggttacatagtaagagctctctgctactagtagaagaagaagaagaagattgattataaaggtgttagctttttcaatacttcacaccaaataaagcctttctcgttagataagtaacaagcatttactcaaaagcttcttcctttctcactctctctctctctctgtctcttcttgtttgctttagacttaagatggctgcggcgcattttagtaaggagagggtcttcagagggtttctggtttggttctgcttttggggactgatgtctctaacatgcgctgggagactcagtgtttcaaggcagaattttgaagtgcacaaacacttgaatcgattgaataaaccagccgttaagagcattcaggtttttgaatcttttttctcttaacctccattttcgattttttgccttttgtgtatttgtttgtatgtttggctgttaccaacctaattgattcagtcttagtattatagctttctgagattttatgagttggagatgattacttattgttggctttagtcctttagtaagaaaatgtaggaaagttagaaacttgtgacaactatgtgaaaattttgaactccagattgatttacaatgttctcttgtgttgtgtgtgtacagagtccagatggtgacataatagactgtgttcacatatcgaagcaaccagcttttgatcaccctttcctcaaagatcacaagattcaggtaaaaaaaaatcagcatttgcctcaagttcacactcattgtgcctatgtcttaacatgttatggggttttaaacagatgggacctagttacactccagaatcgctgtttggtgagagcaaagtgtctgagaaaccaaaagagagtgtcaatcctattacacagttatggcaccagaacggagtttgttctgaagggacaataccagtgaggaggacaaagaaagaggatgtcttgagggcgagttctgttaaacggtatggtaagaagaagcacctttctgttcctctgcctcgatctgctgatcctgatctcattaaccaaagtggtcatcaggtagactttagtgatctttatctatatacctatgtattatgtgaattctttatctaagggttctgttttgtatatctagcacgctatagcttatgtggaaggaggcaagttttacggggcaaaggcgacaataaatgtatgggaacccaaagtgcaaagctctaatgagtttagcttgtctcagttatggattcttggaggttcttttggtcaagatctcaacagcattgaagctggttggcaggtaaagcacctagataatgtcatagcagtttagcttaatctcaattacacttgtgttcttagcttcactgacatatatatcgatacaggttagtccagatttatatggcgataacaacacaaggcttttcacatactggacggtaagctcagaaaaaaaactgaaaaactttcttcactgagagtatagtatataccctttgagctaacatattttgttggatatgtcttcttggaacataaaagagcgatgcttatcaagctacgggctgctacaatctcctttgttcgggtttcatacaaatcaacagtcaaatagcaatgggagcaagtatctctccggtatctggcttccataacccgcaatacgatataagtattaccatttggaaggtaaaaagtctcaacctttatggatgaatcaacctggtatccatttcttgagcttctctaaagaaccatctttttcatgaaattcttgaacctcaacattttgccctcaatgatgttatctttatggatatgtgagtgtgtctgattaataaaaactgataactcggggacattgttcttgtaggatccaaaagaagggcactggtggatgcagtttggagacgggtatgtgttgggatactggccaagctttctattctcttacttagcagatagtgcatcaatagtagagtggggtggagaagtagtgaacatggaagaagatggtcaccacacaaccacgcaaatgggaagcggtcaatttccggatgaagggttcacgaaagcgagttacttcaggaacattcaagtcgttgatagctctaataatctgaaagaaccaaaagggctcaacactttcactgagaaatcgaattgctatgatgttgaggttggtaagaatgatgattggggacattatttttactatggaggtcctggaagaaaccctaattgtcagtagaagttaaagaaagaagatgattgaagttgtagaggaacacttgtgctggattttttcttattatgtgaagtgtgaaaatatcgtttttgttgatttttccttacacttactctgtttttttattttacctggacggctggacactgttttgtttttttttggggtttttaggttttgattaggtttagttgaaggttttttaaatgttacttgggttgaaaggtttgtctttagtttgtaagtgtggaagagagaagttgatagtctcttttcttgtaggagtaacctttaagataagaagattaaagatctttggattgtcttagagtatttcctttgttgccttttgcttatgatgaaggtttgattcattttaccaactaattatcctgttaatcaatgaaatgtcatttcaactttgaagtggttaatgatgaattcaaaaaacaattatcatttttttttacagttcagaaatttgaataatgataatttagcagttaaattttagaattagtcaatccaccgactaacctgaccgaaaattagaagccagcaatttaagaagacgtgtaaatatatttatttttttttgacagcaagacgtgtaaataaattaagagatggaaaacaagtagtactattaaattttagtaaattctaaaatatgatgcatattatatatttagatataaataaaatttctgttaatctgatgacaaaaaaaaataaaaaatatgttgattgtaaaattaatttggatttgtaatagtttacgaatttacgatgaaaatacatatgataatatcataatatacataattaaaatttacaataattacttcataatgatggaattaaatattgatacgccgaaaatattgatacgccaaatcaagtatcaaattcacaaataataacaaattgaaaaatgggaaataagagagaaagagaaaagagaacaataatttggagaaaaatgggtttaggccaaatcatgttacttggagcacatggaaccatcatccagtttccatcttctttacctataagaaacaactaaaacagctcattgcttgcttctctcatacctactcatttcatcacacacacatacaccaaattaactctattaatcattttcttatggacaaatctcatacagatgaagtgtaccaagagaggaaagaagatcattcggagaaagaaataaacattcattgaatgagctcattggaaaatttgaaacgaaacctaacacttgcacaaaataataaatgacgatacatattatttgcagatttttgagtatgagagttcgacttcatcttttcgcaaaagtttgatgaacattaacaaacaaatttaatttgccgttattgataaacaattataccgtccaaaatagtgcgaaatgctctttccaactttttcttccttttttctaactatttatttacatggttgatgaacttataaaaccttaacgtgtcataaatcaattccatagtacaacattacacatttattatataactttctaacgattaaattaaaaaaattagtgcgatatataatataggaaataatataatacaagtattaacaacattagaattaaattattcaatgcgttggtgtaaagtgacatgtacacacttggccttacatgcgtactcgcgtatataagcactactaccaaatgtaattcacaagccacacatcaaaaacaacaacacaacaataagcaccaaaacctcttttcttctcttcatttgagtctcaaatcgaaaaatactaacaatggaggcaatgaagatgaagctttacgtggtggttttggtggcagtgatagcgttctctacagttcaccagacggttgcagcggttgacgctcccgcgcctagccctacctccgatgcttcctcatttatccctactttcttcgcctccgtagcggtgatggcctttggattcttcttttaagaagtttcttctttgctttttatgtttaaatgaatttaaagtaaaatcaactaattgatgatgtttaagtctggtcttgttttgagttctagttgatttcatgttggttatgtttgatgtcttttatctctctattatgtatcgctgttgaatttgactcattcgaatatcaataataatataatcaataataatataatattattattatttgtctattttctttatttctttgatagtaatagaattgatttatttaaaacttcagaaatctataaatgcagatatgatgcaaacagaaaccgagaaaattggataccgttacgctggatctatctggatgtaataatctattaatattcatcatatttgtttagttgaacaatggtttggttatcgacctttagtcgtatacaaaaagaaaacaagattatattaatcggaatcttaatctaaaagcaatttaaagctgctaatatgttttcttttttggagtgaagagagaccaaaaagcaaataccttttaagatttcacatggcatatttttgaagcaaatgtatttatttttgagacatgggcacaactcctaaacatttcaatctaagaacacttgctcgatctactggagagagttagcatttatgagagttataaaacacataatcaggccaaatatctctcaaagtctcataacatgaaagattttaacttttaactcagaaagtattgcaagtttaagttacaacttggaaaacataggaaataaaagagaaagagaaaagtgaaataggtgctgatatatagtgatatgtggatagaggtaaagcaacaagaacacaatcttttcgatggtagtttaactagactacctatagctattctttcgtttttttctgatttatataggaaacaacaagaccacaatcttttcaatgataagaggtcccaattaaaacaacaatggaaatactagaataattaagttgtgacaattcgatttggatttagattaaaaattgtaatgttttgtatttgactttttccagtaattcctaaaaacaaagaaaagttaaaaatggtcgcaaaagcgcagagtaatcggcccattaatttaattgggctaacttaaggccattatgataaatggaaaataagaagtaaagtttctttcagcaatcagaacctttggagtgaccaaacacagatgtagttatttgctagatgaggccaagaatcgaagtaaagatgttcttatagaacgcggtataatgccttggttactgtttacattttggtattcttgaatcattcacttgttaagttacgaatgtgaaaatattcaaccttgagattgactctgtgcaggtaagcacgaagagtggactcctaaggagcttgattaaacgggtgaagtaagtgtctgattctaaaaaatggttctgatagtgaggtttttatatggttatgttgacttaacccttctctttttaatctgctatgaaggtatgctgatttgatgaacaacagattgacagattatacattcaacgtcgatcatctgcttaatgacgaggttactcaaaccattagatctttacatgtaaagaaatgagatctaaaatgtgcttattgataagatgtcatgagcaggggaatacatagatgagctaaagaaggtgtttgttttggctgcataatctcaaatttacttggctcatatgaattctttgtgtttcacattgtcaacatcttgtttgctttgttgtagacaggaatgctagtgttgaatcatgcggatgaacgagtactaggacttcacttcacttgctacgatttgcatgatcgatcagtcgttaactctgtttttctttttgatgaaaaaaacttatacgattagatcaatgttgtgaacgttttttgcagactattgagaaagtatgtaccaatttgttaccaagcgtactaaaccaaattctagtcaaattgtcaggtattttttttaatactctatactaaagattgtcctgattcttttacttaaagattgggttgaatctttttgcataatcaaataaccaaatgttctgattcttaacttaaaacaatggtccattataaaactttgtcaggttattggttcggaacaagagacaagctgtctcttactatgtgaagcaacagccatagttatgtggaaatgcttccatcttctgtgaatcactcctgtttacaagctttgatacatacaaccaaatgacccaaacagccaaaaaaagagaggtataaacaagtctattctacacaattaagacagtggaatgctacgatgtttttttgttgttgtcatgttactgaaaccgattttggtgaatcgtaaaaagggttaaaacttgtaaaagaaactaatgtttgtctgagatctaatgtcttcttctggctagacaagagagaacagaggaaggtgttctgttgggtttcttggagattgtagctttaggactaaaaacccttttgtagctttgatctaaaatccctccagtactcctagatgactttctttttgctccatagtttctacttttaaaccctctcttcataagatcttcaaggcttttaacatttcctagtgatgtgaatgattgagattttccttcatagaactttgataatcccctcctgagataataataaacaaaacttttgttattacaagaaaacagagataaaccaaacaaaatgaaatgagaaacttttagatccattaggtattaaacccaaagatccaaaagcttcaaaaaagattgttctcttacttgatagggaggtgtgacatgaggtcagagagatcttcaagaggtccatttgaagaagatgaagaaacatcatcatcatcatcatcctctgtaaaatcagaacacatggaagaagataatgaacaagatgatgagttatcttcttcatcagagaatgttgttgaaacttcttgaacaatgtcttcttcttcttggatccttgttggatcttcatagatcatgttgcccatttgcttcagattcagattcatctctttgaacataagagaaaataaaggagtcttgaacaggagaaataaagttgtgtgttattctacaattggaaacaaagaaacgtgagttctatttgcagaatagatatctacacatatatatgggatatgtgaagagttttttgagttttttttcttctttattttaaattttaaaaaagcgtaaagagaaggaaaaaaaggataaatatatgtgtgggtattacttacgtgcaagccgtggataacgttgacccttttaaaataaataaatttcacttttcaagttttatctccaaattttttgttattgttgtttatctcatcgcatatgttaattgctattattgtgttcttttcccatatgcggttctcattctatggcccgtcattatcatatcacagctttttggtttttgtttttttggtttttcttaactcactttttccatttactttgttattttgagtcttattcgttttccataacattacaaaataatacacaatcaacaatataataccaaaaatttcatttctaaactaactataattagtatatttttgtagtttgataagataacatatgttttcttgtcatgtacagatgttccagtgaatagggatttactatatataaaaaaaagagattaggtctaaaggttttgcagagaagataaaaatattgataaaggtcggtttgtgtaattaaaatagtagtatctattgtttagatttgcttcttagggagttttttttttcaattccctatggtgctgttactaggcaaaagaggataagacccattctcttaaaacatatccgtatcatgtcctcgtcaccactatccatccgctcacctttttttaattctgattttgttaattggaccgaaaattgtagttcccatcactaataataacgacttttcctcaaaatcaatttaaatagaaatataacaacgtatatccttaagttattttatattgacattttatgcatagtaataattacgctatatccttaaaccaagaatcttgtccctctttaaacaactttttcccgacaaataaaaagactgcttttttctttgaaatatggaggataatatcaagttatcaagtttcagacgatttttttagcattgacacacactgaattcaattcaaagtaaaaatctatgatacttgaatatacagatttcaaattgaagtgcttaagttaggagaataatattcctattcatacatatttttcataattctttaaaatcaatattgacattactacatactaaaagtctcctttgagatttttctaagaggatatgcacaacggatgaaaaaaaaatgcacttttaattttgaaaaattaattatttcgaagttccaatcttgcatgaaattatcagagaaaagtgcaaaaagaacaaaagagcgttatcctcgttatggttgatctaagatggttaacaaaatatcacatgcgcagattttagccaataaagcgcgtgttcattgaatatctgggctttttaaaagcccatctaaaatggcccaatctagcaagagctcgtacgataaaaacgtcaccgcatttagtatatatatatatatatatattttttttttgtcgtagtaatttagagcaccattatttgtgaaaacagagttttgttcacatcatttgcttaaagttaacactacatttaagaaactaaataaagattcaattttatttcatgcattacaagaagaaaatcggaacaacgtgaatcattaaaaaaaattggatggggcattccaaaagctaaaaatcctttgcaaaacctacacaatgtatttggttagtttattaatccagatagaataatcatttgacttttattctaataaataaataattgaatgggtctttggagtaggacccatgagtgcccatgactcatctccaccatatgttattctccttagataggatctctcatgtcaagactatagtatattcttatcctttgatttggcctttatgaaaatgtcataatttcggagaaaataagttcttaatttgatctcaaaggtaaaaaactttctagctctaataatgtcaagatttctcttcttatgttttgttattctcacttcagtaaataatgtatacttcaattgcagactccatatcctagaggtagtttcttcaattctttcttgaacatctagagccatatgtacatgttctgtgggatggtgtaatctacttaactgtatactcaaagacgctgcaagacttcaatctctcaagcttacgttggtatgtcgtatactattgttttatttttcactttaggtacgtactttgactagtatgcatgtagatgaacaatacaataaaaacatctgtgtttccgcttttagtttaaacgatgtgtaacactaatacaggtaatatttatttcgttttatcgtcagaaacatgatccattccagtgatccagtgaacatctggaaagaaccaacaattgttcccgattgtttatcaaagaacctcgagatcttggaatggatagaaatatgaaggcacagagcaaatggctgcgtacatactagctagcaagcgttacttttctaaagatggcgacattctcgacaagatgtagaaacagacaatataatggcatgttaaagaagttaaagcctttggacagagtttcaaagacatgtcagcttgtgtttgactgaacttatgtgatggtgtgtgtctctagaagatacaacttagttttcttcttctttttccttgactttatttttggtgttttttgggttttgttttcacaaatgaaatggtagttgaattaactctttataaaaagaaaaggaaattaatcagttcggaaatggaatactgaaatagtaaaaggaatgattaaaatcaggaaattaattttattggattttattttttctaattataataactgtttgcttcaaaatttgataataatcgcatgagttaccccaccgtatctatatacgattaaatcaccaaaaaaaaaaactaaatttcaataattgctatttgctactacgtatttgtttcatatacatattaaaagtgattttattttattttttgtggcgaaaccctaactggactagggttcttttcttctttctttgcaaatttcggggcgagttttccaaagagcagaattcggcagaataaacaaaaatatggagaaacagaccaggctcagtgacttgccagatgaattgctcttgaagatattgtcagcacttcctatgtttaaagtgactttagccacacgtctcatatcaagacgttggaaaggtccttggaaactggtgccggatgtcacgtttgatgatgatgatataccatttaagagttttgaaacttttatgagttttgtttatggatctttcttgtctaacgatgctcaaattctagacagattgcatctcaagcttaaccaaaagtattctgcttcggacatcaatttttgggttcaagtcgcggttaaccgatctgtgagagagctgagaatcgacttgtttggcaaaaccctagaattgccgtgttgtttgtgttcttgtataacactaaaagaattgactctacatgatttatgtatcaaggttgtcccggcttggtttcgcttgccatcactcaaaacgttgcaccttttgtcggttaagttctcgagtgacggatttgttgcaagtattttaagaatttgccctgttcttgaacgtttggttgtagacggaaccaaaggtgtcaatgtgaagatacccaatatggatgtgcctaatttgaggagcttatcttttcgatctacgggagagctgagaattgagttgcttcgcaaaaccctaggattgccaacttgcttgagtagtttcagaaacctaacagaattgatactccatggattaggtatcaagggttttccgccttgttttcgttttgcatcactcaaaacgttgcgcctctcgtcggttaagttatctgttgcaagtcttttaaaaatttgccctgttcttgaatgtttgattgtagagaatgtgatgatacccaatatctatgtgccttctctgaggagcttatctattcgatcctcgagagagctgaggatcgacttgtctttgaaaactttcagaaccctaaaagaattgatacttcatgaattaagtatcaaggttgttcctccttcatttagtttgccatcactcgaagcgttgcaccttctatccgttaagttctttggcgatgaatctgttgcaagtcttttaaaaatctgccctgttcttgaacatttggttgtagaccaaatcaaaaatgagaacgtgatgataaccaatattgatgtgcctactttgaggaacttatctattaggaactcgaaaggaaaaggcacatacgttgagggaagtaaaggatttgtgatcaaagctccttcattgacagatttgaactttgaggatacattgagtaactttcttatgtttgaacctatgcctgaggtgatcaaagcggatattcaggttatttgtgaccaatctaagaacttcatagggtctcttacctcaatccaacatctttctctttgttctctaacttcaaaggtttttctttcttactctaataaatgtcaagatttctcctttattgttttgttattctctttacagtaaataatatatactctaatggcagactccatatcctgcatgcactgttttctcctctcttaaatatctagagctatgtacttgttctgcgagatgggcaaatctatttgcttgtatactcaacgccgctccagaacttcgatctctcaagcttaagtcggtatgtataatgcaactttctatccattacctatttaaggttttactagcatatgcatgtataataacggatatactcataatcaaatagcataaacactttattgatgatgtttttctttatttgctaaagatttgtttttacacgctcactagtagcaacataaaaactttaccaacacttttaaatgataaaaaagatttgtagaatcactatttcattctatcatctttttgtttctgcttttctttttgaacgaacgatgtttaagaactagtgcacgttacaatgatccgatgaacatagtgcctgtttaaactagtgatcgtttcattatttcgtttcagaaacataaattcaattacaatgatccgatgaccctctgggaagaaccagcagttgttgctaaatgtttatcggagcatctcga

SEQ ID NO: 913 - DNA, 84129 bp, Arabidopsis thaliana
gatctttgaatggagacaatatgaaggcacagagcaagagaggaatgtggcaggctacattctagcaaacgctacatgtctaaagatggcgacgttctcgacaagatgcagaaacagaaatcatcgcatgttaaagaagttaaagtccatggacagagtttcaaaggcatgtcggcttgtgtttgactaaactctgatgtgtgttgtgtgtttctacaagacacaagatgttttcttagttatctttcttccttttccctgacttttatatttggtgttcttgagttttgttttctaatctccaaatcttctttaacttgtgaaaacagagcagtttttgtttacatatttgaaaactttatagtatttaatatttatactaaaattcaatctattttaataatcaatatacttaagatttcaaagttattttcactattaaaaagttaaataattattttttagtaggattcggataatttcagatcggaccctagtccaagtaaaaatggaaatgtagttgaattagtctctataaaaaaaataaaaaaaatcaatgaatcaattagaaaattgaaaaggaaaaagaaaaactagtaataaaagtaagactttttcctcacgtcaaacaaaaattaagaaatatacttttgttgatttgtttttcaataataatattattttgcatcagataataatagcatgaattattctcatcgaatcacaaaaaaaaataaaaaaaaaataacaagactaaattttaataattccgtcttttctcttgtgataattatccagaatattctcacaattaaattgatttttttgtaaccgtgaaacctaatttacctaaggctctttttgttagttaaggatatatttctcatatatggttgttagaatattcactgtatatcctctgtataagttacgaccatatatgagaaaacttttcttcttcctttgcacacacgtcccaaaacagagagcaaaattcaccagaatcatggagagctgccagaagaaacaaaaattggagacaccaacagagctcagtgatatgcctgatgacttaatcttcaaaatattctcgttccttccgttttttaaagaggatttagcaacacgtttcatatcagaatatgggaagggtctttggaatccagacccgaatgccatatttgatgatgaatcactcgatatgacttgtatgagttttgtatatggatctttgatgtccaaggatgctcagattctagatagcttgcatctcaagcttaggaaatactatattgcttcagatatcaattttcttgttcaacttggggttaatcgatctatgagagagctgagaatcgacttctttggaaaaaccctagaattaccgtgttgcttgagtacctgcacaaccctaaaagttttggtactcgatcatttaaatatcatgtctgtcccgggttggtttcgtttgccatcagtcgaaactctccagctttcatcggttaccgggggcagcaactatgttccaagtcttataagattatgctctgttcatgaacgtttggttgtagaccaaaacagaaataaagatctggttaatatcaatgtgcctactttgaggagcttatctatcgataacaagagaaggggacatgtgccactcggtagcttttggataaatgttccttctttgatgtttttgaacattaaggatacattccaaacaatatttgaatctatgcctgcgatgatcaaagcgaatatcgaggttgctcatgaccaatcgcaatctgtgaagttcatagaatctcttacctcaacccgacatctttgtctttgttctccaacttcagaggtaaaaactttcttactccaataaataatgtctccatttatgttttgttattctcatcactgattataacataaaactttataactgcagaatccatatcctaatggcacaaagttctccaatcttgtacatctaaagctatgtacatgttctgcgggatggcagaatctacttgcgtgtatgctcaatgacgctcccaatcttcgttctcttactcttaagttggtaagtactatgtagaatgcaactttttactagtatgaaccgtatgataacatgttcttgtgatatttttcctacgcattcactactagcaagactaaaacttttatcaatgttttgaattgataaaaaaacactgcagaatcttgttctttaaacatagaaaagtagtataccatagcatcatctctgtgtgtccgtttcttttttgacgatctataacactaacacacgtaatgtttctttcattttttcgtgtcagagacaaaaatccgatgtcaatccgaagaaagtctgggaaaagccaacagtcgttcctgaatgtttatctacgcgtcttgagatcttgaaatggagagattatgaaggcactgagcatgagaaggatatggttgggtacatactagcaaacgctacttttctacagagggcaacattctcaacgaaagatagaaaccaatgtgattccaggttcagcgagttacagtctatggagagagtttcagagatatgtgagtttgtgtttgactaatgtgactctcttatgtgatggtgtgtgtctctctagaagacgcaaagacgttcttagctttcttcttcctttcccttagacttttatatttggtgtttttaggttttatatttggtgtttttgagtttaattcatgaaaacagagctgttcatgtttgagtttaattcatgaaaaaaattactctcatatgttattctccttatcttttgatttggccttaatgaaatgtcatagtttgggagaaataagttttttaacttgactaagtctatttaatcacataaaccaaaaccttgtacattacataaaaaaggaagaacacaatgaaaaataaaatctcattcaacttttatagtcaagtaatagtctttagagacacattacacaatatcatgtatcttatcatatcatataccaaatgcaaatgcagaagaagagggcttacttatctaaggtagttaacaggtggttccagagtgccaacaagtatcccgagatcgatatccttgtcctcaaacttttttatgaatggatgactctgagaacatgaacaaacaaatcttagaatgtttcatcagagatactaataaccaagactgaaagagggtggtgagtaggaattacttaccaagaggtccaaagatgatgctcttgctggaggatctttttgtatgctgttatgaatgtaaagaagaatcatttaaccattagttttaattctttgtgtgccaatgccaagtatatgaagatgaaaataatgagttgccacttaccaggctgatacaaaggagcagaattcaggtgagaattgatcagaaggagcagttggtggtggattctctactattgctgccaagagttcataaaagcttggcgggttttgctgatcttcagattctaaataaggaaatcttcctattgcacattctaacactgacatccccaaactccaaatgtcactgctgtagtcatatgtgcttccactaatcctctcaggctgtgaagtgaaaaaagagacaagtcatgattatgtatgtatacaatacagaaacatcaagaaatttgtaatgtagatgatttttggaatgctttcgtaccgacatatagttgtaggttccaacaaatgtgtccctctgtcccatggagctagcaagacttgcacttacaccaaaatctgagattttcacttcccctttatggtttacaagaaggtttgatggcttaatgtctctgtgtatgacatgtctttcgttgtgtaggtacacaagacctagcaaaacctgttcacaaggaataatataagtaagagtgaccgataaatcataagaatgctttgaataagctggtggtgtatttgacctgtttacagacaacagcaaggtaaggttcaagaatagtcttgacttgtctaatcacatccgcaagagatccacggtccatgtattcaagcacaagcgaaaaggctccattgtgatagaaagaatggtagcaaactactacatgtggacattgtgatgatgcttggtttattttaagctcctgaacaatttgcttacggatttcttcttgtatattcatctgtatgacctgtgattcataacataagcaaactcaaaccccaagtctactcaaaggccttagtcactagcataaaatcaaaagaaagaaaaacaagtagtttaccttcatagcaaagaatttgccaacccatttatgacgaactaattgaacaacaccaccactgccttttccgatgactttgacagtctctaagtcttcagcagtaatttcgaaatcaagctccttgctatcagattgctataaatggaagataaaacacatacacaagaaatctcctttaattctctggaacattgaggtctctcataaaacaagatttagggttgaaaaatttacccttgattgcttctcatctgacgtcaaccttagccccttttgattcagaagaaaatctccatcgtgaaatgttccactcgcagtcctgttttcaaattcaatgaaatttcacagaatcaattcaaacccagaaacaatggatcaaatctaatcgattcttgtttacaatctcgccaaacaaaacagatccaagtaaagaaaggagaaatcgcgaaacttacaggaaggaagagattggggattcttgagctggaacggagagcttaagctgcttcaagttcgatttgatcttcaccattttttttctttggtttcttccttgggattatcgctctctttctagggtttctatctaaataagcaatttcaagaaagtgttaggaagtggagagaagacgacgaagcaatcaataacggactaatttattttgaacgcgtaagaccgggaaaagaaaaaattatacattaagaaaaacaagaattaaatcatttgggctgtaagatttaaatgggcttgaattgataaatataagatggtacggcccattgcttatctctggtatatttgacagctggcgctaagaaaagtcttaattgattttctctttttttggtatcggaaaacgttttgtgtaaattggataaacgaattatattacttttttttttcgatttgtcggtttgaaattaatatttttcccacactttaaatgtataagcaaattaatgtatttgatatcgaatttattaagagcgtataaagctcacaaattcaattcaatgggaccagtttaatttaaattatattggggtagttttcgagaataggcataaataacgggggagtaatgaaaaagttggaaatggtcacaaagcttagcggaatccagacaagtctatcaaatcgaatttattgtactgcctgaggcccggtttgtttccgaccagtgttcaacttctgacaagaaaaaaacaatagccaagaaaaaaaaactaaattagtttcccactctcgctgtagagagagagagagagagctttaacgaagcttttgttttttgtagagagagaaaaagcttcaaacttttttcactaaaagagagaattaactcgaagaagaagaagagctgccagaagataataaagcttccttctttcgagtaaaggaagcaaaagcaaagtgtgtagttactcagcaatggcgagagacttcaagcttatcttctccatttcaattctgcttctgcttctaggtttgtctctctctgtctctactactcacttcaagagctgtctgagactttgttctgaaatagagcagcaaaattaagaacattcaatggtttccaatttcaattcttgttgaatagactccattaccttcttctaatttactgtagagctatcaaaagaaaatttcgtcagaaaaaaagtcaattgattctgtcttttttccccaaattttgtagactgttgttacggtggcaaggtcggagtttgttacggaagaagcgccgacgatcttccaacaccgtcaaaagttgttcaattgattcaacagcacaacatcaaatacgttagaatctacgattacaattctcaagtcctcaaagcatttggaaacacaagcattgagctaatgattggagttccaaactctgatcttaacgctttctctcaatcccaatcaaatgtggacacctggcttaagaacagcgtcttaccatactatccaacgaccaagatcacttacattaccgttggagctgaatctactgatgatccacacatcaatgcttcgtctttcgttgtccccgcgatgcagaatgtcttaaccgctctgagaaaagtcggtttgagtagaagaatcaaggtttcgactactctttccctcggaattctctctagatctttccctccttctgctggagcattcaacagcagctatgcttatttcttgagaccaatgttagagtttcttgcagagaataagtctcctttcatgatcgatctttatccgtactacgcttacagagactctccgaacaatgtgtctttggattatgtgttgtttgagtcttcctctgaagtgattgacccaaacacgggtttgctttacaagaacatgtttgatgctcaagttgatgctctttattacgctctcacggctttaaacttcaggacaatcaagattatggttactgagactggatggccaaccaaaggttcaccgaaggagaaagctgctgcgtcttctgacaacgcggagacatacaattcaaacataatccgtcatgtagttaccaaccaaggcacacctgcaaagccaggagaggcaatgaacgtttatatattctcattgttcaacgagaatcggaaagcgggtttggattcagagagaaactggggattgttctaccctgaccagacaagtgtttatcagttggatttcacgggaaagagcaacgggtttcactctaattcgagtggtacaaactcaagtgggagtagtaatagctggtgcattgcttcttctaaagcttcagagagagatctgaaaggtgctttggattgggcttgtggtcctggaaatgttgattgcacagctattcagccaagccagccttgttttcaaccagatactttggtttctcatgcttctttcgtgttcaatagctatttccaacagaacagagcaacagacgttgcttgcagctttggaggagctggtgttaaagtcaacaaggaccctagtaagtaaacaaaatctccagcttttgcttctccaaaatcacaaatcaacagtcttgatctttaccttaatctgattcaatgtcgttgttacaggttatgacaaatgcatatacattactgcaggagggtatgtcataaagatagttgattcatatgcaaattgaagaacagtaaatacatattcttactgttttgttaaaatctttctgcaggaacaaaaccaaggcgacgaatgcaactgcattgacctcctctgcttcaactccacgtggaaacgaactactccaatggattttgaaactctgtctcatgatctcgttgttcttcagtttgcaaactatgaattcacaggcactgtaaccgaaatctgaaagaaatgtagcaatagcaagaaaaagcaaaatttgttcctgaatagtttggtctagaaattgtgacaccgtctaacgattttgtctttcttcctgcagtggaatcgttgtacagacattctatctgaaaacttgtctgatatcaattgtgtaaccacagtcttgtgatcttaatcatcctcactataatacacaaaaatctcaatctgcataaccaataatgaactctaaagctatggtaccacactgccattcattaaatatttcaactcgacacaaatgtagacaatactatattgttttagaaataatcatacaaccccaagatccatcacaaggtaggtaatacacagtcggattatcgaatagtttttctctcacgacacaactagaagattacataaagcaatatgaatatagtagcagcttaagtttcagagccccgattcaatcaggtactcaccgagattctccacaaccatattgcattgtccaggagtcattggttcatcatagataccaaataccaaagctaaggtggtcttcttgatggtaacaccaccagctccctacaatggaagcaaaatcaacaacagttcatcaaaaatcaaacaatattcaaacagtctagttaccttctttcctcgaatgacggcattaggctctccttggattaccatgtacttgttaccaccaaggaacaatcctgttggggcaagtgttccaggtgtagtaaaatcgtctttgatgccctgaatttcctcaggcttcacctaaaacaacaacaatacaaaaactataagagaaacaaattcagtctctcttaaacatctcatgaaagcaacttaataacttatgaacaacataaccagtacaaagaacttgtctatttccaaaggtcaaaactttcttcttaaaagagctttaaacttgtgattcgaacttcttctaatgcatcttttgcactctataacctcaagaacatatgaatcagaaaatcaaaaccaaacattgaaaattgctgaattttggtggtttagtagctaaacaaaaccaaaggttgcagatttcaacatagaaccaaaccagaaacagcaagatgataagaattgagtagtcggtatagaaataaaccctaacctgaggaaaattgttgctctgagcccagacgctaccgtcttggccgagaattgcggcggcggtgaggcggttgcctgcaacatcgcacattaagtgatcgtcgacgtaagtctgccacgacatgtttgttttcttcttcttctttacttttgctctgcttcttctttgtggtttatcggaatgttctagagatagcgtcgaaactacgagtgagtgagtgtgtggcaatggcatttacgcaaatatattgttttatacatgattgacacgtgccagacacagctctttttaatagtttctaaagaggaaaattgtattagaaaatcaaccagttataatgaaaagggaggaaataaataaaaaaatagaaaacttatttaaggaaaaccaaaacatttaattaaatatggtcttttcctaaaaaaaaacaaatgtttcgattttcattataattgatttttgttatgaataaagatggatgtccattataaggccctcatctaaacccatcatctagatgtttttagggttttatcttttttttgtactcctatataaagaaccatttatctcaatggaataacacactcatttcttttatctctttctctggttataacacgttatcagcacgttctaaaaggtagatatagagattcttacattttttttaagaaccatgtttacttatcgactcatggttcatagtacttattttctattattgaaacaaaacaatatgagccgatcgatgattatagtatagatcggtaaaagcatgttttcaatgattcaataaagaagagaataatgcttatcatttgtttctataattactatcgcatgattcaatgattctacaaagaaaatcgttaaagaagagaatcatgcttgttaattgttaatttttgtgatttactattacaatattgaatatataaattaccaattttataattatataactaactttgtaactattcataacccggtggtgggtgatgcaagcatgtattaatgttttagcattccagttttgaatagttgcatctatattcaatatcattttataaatattatattgtctaaaatccatttatgattgatatgatatcccttatttaactcctttgattaaaacgttatacatatcttatcacttttagatattgacttttccatattaaatatttgattttcatatatttgattgtgttattattatttttactaaaaacatttcaagataatttttctttttataagattccatatatctaaatctttgtgttattattatctaaatctttttataagatttccatatatttgattgtgttattattatttttactaaaaacgttgcaagataatttttctttttataagattcttttctctaaatctttgtggtatctaaaaaaaaattgttcatggttttgtcgtaattttgcacgaaatcattttacccaaatcttgcacgaattcatattaccctaaataaaagttttgtcaagatatatgtaaaatccagattttgcacaaagtagttttattctgattggttttacaatattgcattaaaattatattaatatataatatttgattattttatgaaataaattgattgataaataacttaatttaaaggtataatcacttatagaaatttttatgaatgactattttaatgtatcttaaaaagatatcatatttttgatggtcaaagttttttcaagaacttaaattatcaccagaaattgagaaaataaatatggtaaaaaaaaaaaaaaataagaaaaatttctaacgatgaaataatctagtatatcaagtagtataaatcttattaaaagactctagaagagcatatacattgctttctatgggaatacaaaattaaaatcatcgatggggtataattctccaaatcttaaagttaatatgatgagatataaaatacattatgattctagagtggaattaaaaacgagatagatgaacttgaagtttcatcatttcgaggaggagaaataatgaatctcacatcgataataagtgacatatccagaagattatgttcaatctttgactactaaagatctaaaagttgtataaagcaattcttatacgaatgtgttatcagataaaataagatataattagttattactgaaacttcaagacttgaagtctctttgtgaatataactcacattgttaagagaatatctatgatgcagagatggtaaaacagacgcttaaacttttacgcaagtattgttgtcctgtagacacaatattttgaaagaaattttgagaactattataaacttaaatcgagtgtttttcaaaggctaagaaaatatatgagttatcgatgataggtaatactcatattctgaagtgaatataagatcttacatagttagtcaaatttaatatcgtttatactagaatataaaattttaattattatctcgttattgttttattaacatatgattgattattaaaatacatggacgtaattttgattataagatctcattaagggagtaactgataagcaatgaaaaataaattagaagttttgaaagaactagaagtttcaaatgaattaaaaatttcaaaagtatatttatcttaaccggattggtcatcctggtttaatgatgatgtgaaagtattgagaattatgtggacattaggtgaaaaaccataaaattctccctaatgatttatcaaatgttacttgctcaaaaagcaatatgataatgtgatttttaccagtgtaagtaatttggactttatctattcgtaagtatatacaaggagataattatgggttgatcacccactatatgacatttagatacctaatggttataaaagatgcatcgattcaatggacgcattgactcgattgttgcatcgacaaaaaggtcatatttatccttgttataaacccgcaacatagagtttgcgagattactttcttgattaaagtacaagagtatttcagtgtttatttataataaccattattggatattcgttgggataagtgtttaacattttgaaattcatgttcatacacaaaatggtttagtaacatcgatacgcatcaagccaatgaataattaatagttttccccattattattggttttgggtcagaaaccaaatagttttcatctaaaagctttgaatgtgaaaagtgctccaccacagcacgcagagatgaaccctcaaaggaggataagaatacatgttggatatgaatgataactaagccatcctagaaggatttatataccgctcgttttgaaaactatcatattatatagtcagctattccaacataagggggagaatgtatacagctggtgaaaaagataaatagaaatgaattatcaatgatcctcggaggaaagaatgtatattaagagtccaaaaaataattcaattacagaatttagcgttgtaattgccagacgcatttgctgacctaaataaagtgatgaagtcacctataccagttataaattaaatgctccagaatagaatgaatgtcctgtaaggaccaatttcaaactgctattgagtcttaagatcacattaaacataatagaccttggttccaaatagaaatatcctcgtaaaagagaaggagcacaaaattaaaaatgaccaaattgaggaaataaatattttgatgatctctcgaagagagtgaatgatctctagaagacacataaacatgacaaatgaaacattcaagtacttgacaatgaagagatctagctagctatgtcatgtcaaaatataatggaatcaaaagcaaatcgacgtcgtaatgtatttgcatgctatgagcagttgatattatggacaaaaaggaggatcatgaaagaaagtctattgaaaagtgtacacaaagtagtgattagccaaaaatggaaaagaagaaatagacatataattataatctctagtagagatatttggactagtagactatgcacatgatgtgtaaaaacagtggaagataaatgagtctttatgtgaaagaatagtgaaattaatgagattttcagaaacataagaaatgtattatgaagagatatattctcttgtggtggatgtaatatttttaagtatctaaagtctggcaataagagacggaacactggatatgacatttatatgaaattcttgaaagatataatctctgaaggattaattatatgagaattatgttctctagaactctactcgatcgaataaaaagaaatatgtaacatgacatataatcatataaatgtatatttacgttgagtttgtcaaaatatattgatcaaactaatatttattttgaaaatcattaaaactcctacagagttatcataagtaatacgatgccaataatctatgataaaatatcactagataatgatatttataagtctatatgaaacccatataattttgatcattaagattatggttattaattccaacgagatattgtatttgattgaaaatcatctcctgaagaagatgtttccgagggggagattgaatgatatgcgtggatgtaccctttttccttatcatagtttttatcccacacgatttttctatgacaaggtttttaacgagacattaaagaacacacaaataatacacttgatgaatattaagaaattctatcaatcatccaaatgaatattatacactaatgatatttagagaaataaataagatggtcaagatgaatcatctaaaagattcatgagcagaagaatgacgttgtactttatccagaaatttgttcaagagaagatttggcagacttattttcaaatactgtttattctctgccacatcttctaatcatgcagagattttactaattcatgaagctagccgcgagtgtgtatggctaagatccatagttcaccatatacaagaagactgtggtatgtatgcagggaaaaagactccaacaattatgtacgaagaaaatgcagcatacatcgcacaactcaaagacggatacatcaaaggcgatagaacaaagcacatcctaccaaaattcttctacacacacgatctacaaaagagcggcgatgtacgagttctacagatccgtttgaatgataatctggctgacttattcaccaaggcgctacctactgctactttcaagaagttagtctatcgtatcggattacgctgtctcaaaaatctcgacgaatatactcataagggagagtaattgtatgttgcactctttttctcttaaccatggtttttcccattgggttttcctggtaggatttttaatgaggcagcatttcaaatattttacgagttatggtactataatggtcatcagggggagtgttatgaataaagatggatgcccattataaggcccatcatctaagtccatcatctagatgtttatagggttttaccctttccttgtactcctatataaaatagcatttatctcaatggaataacacactcatttcttctatctctttctttgattataacaattttgtaattttgttgatttttttttactcttaacattaaataaatttgtataaatttaaacaataaaatgaatggatgttaataaatagttaagaaccatcaatctttctatattaattgaaagactgtttttactatgataatttttacaacataagtgtgaaagcacattattacatgaaatcttgggggatgtaggtgtaagaatctaaaaataacaacaatatccaaagttattgaataaaagttcatactaaatgtcattttagtacttaatttatttatttacaaagaaaacttcacactttttgtgaaacacaaatatgaagttgtttaatgagatttattatgaaatgatgaatattttagaaagaaaatgaaaaaagagaagattttgaaggtagaaaagaagaacacaaagatcttagtaggccttatgtaatgggccttaatatgtttttcctgtaatggagggtaattttgtaaatatgtctaatattgttgaagaaaacgttttttggtgaaattcgttgaccaacaactctcactctttgaagttgttttcttcccggcgatgaccgatgaaacggaggaagatgacacgacgcagcagcgatcatcacgaaacgacggcgtttcaaagaataagggtaagggttttaagggagataaagcaaagagggctctaatcggagctggtggtcggatccttttttacccaactcttttgtacaacctcgtccgctttaaactccagtctcaattccgatggtgggatcaaatcgatgaggtttcttacttatttgttatttattcctgttaacttagtgctaatgggatttaaaggagataactttttagcattaggaatctgaattttgactagaatgttttgatccgaaagtggaggcaatgtgatgtttaaagatcagttttttcagactctttaaagtcagaattttttctgtctgtatagttatgcagtagactatcgaaattttgagctctttactaaaatctctgagtatcaatttggtagtgattttgagtctatgcagaaagtctgatacagaaagtctctatcttttcagtatcttttgatgggagcggttccatttcgtaaggatgttccgagactaaaaaagttaggtgttggtggggtaatcactcttaatgaaccttatgagactttggtaccatcttctttgtacagtgtaggttcaatgccaccaaacttgtgtttctaattttgttgtctacttgtggagtagtttgatgattgtaagttgtttttaggcttacgaaatggagcatctagtgataccaacacgggattacttgtttgctccttcaattgtcgatataaccttagctgtaaacttcattcacagtgagtgatggtgtgcttgctttttaccttcatttgcatttactctttctgttacttattatgcagtccttttatgttacagagaatgctttacttggtaaaacaacatatgtccattgcaaagctggtcgaggaaggagtactactgttgttctctgttatctggtaagttcattgatcaaatcatatcggttaaattacatttgcagttggtcctttgttgaacttccttctcactaacgttttctctctctttgtttttcagattgaacataagagtatgactgtggctgcagctttcgaacacgtgcgctcgataagaccccgggttttgttgcatccttcgcagaggaaggtaagtcttgatcggtttatcgatatgcttcaccaaagagacaatcgtataacgaagatgaaaacatgatctttttgtgtgtttgattctttaatacagagtctagtttgtttctgaatgctttgtgatttcatttatatgtatttaggttgttgaggaatttagcagattacaatctcctttgagcgaatcaacattcatcgcaacctctggtgatattgtaagttaaatggcagagactagtcagtcatagctcagcatttccggcattgatcaacagctaagcaggagctttttgcaagatttctctgcttccttttggttctgttaaaatcttcggttttgatcatctgattcggcttggttcctgagtataacaaaatgacttgttgattaacaattgtgtataataaaaattctcttaatgatgtattttatttgattttttggtcctaccagaattgtggaaacgttaaccactctgcatttcgctgagggtttgcttctgaatgctcctgcgaatttaatcatttgtgattattcttttgttttacgcgaaagattgaccaataaccacataacttatgttagaacaatcataaatttcattaattaaatacacaaattcgttagaaacttacgtcttctgtacacgtagctgtggtacaacccataattaggtcttctaatcccgaaccagacgaccgaccccttaattgctgccgctgtcatttaaaagaaaatcaaaatgcgaatactaattgtttatgacaaatattgagaaggaattgaatttatgatatagtatgaattactttttttgcatgagcctgtagatccaaaatcattagtctttatttaaatgagtggttatgattaaatgtccaagtagacaagaaacataatatcactactatctagctagctatatccatgcatgcacgttcgcgtgcattgactttagatttgagcttgaatatatttgtttaagtgaaattaattaatgaaaacattacctgaaagggcatagtacttgtaacatggaagattgactcatgttgtgatgtgatagtaggggtcatgggatatgatgatgacatgtgaaattctcttctatctccgatttgatgatgttgattatgatgatcatgaatcatatgatgagatgacattgatgatgttatgatcccatcatgtacttcctcgcacgtgccagacacatgctggttctctcttccctttgaagcttcggctgtccccttgattacgtacaagttgattaccacacaaaaaaatgttggttaccaaaaaggaaaaatgtttgtaaaacaaactctcattgttgcaattagacgacaccacaatagtaagactttttcacgtaaaaattgagcaatagagaagaaatatatcgtaaaattagagaaaaagtattttatatccaccatttaaaatgaacgtatatacccacgataaaaacaaataattatatacatagagacaacaacaaaaaactatgaatgtaatagatagtaacactatcataaaatcagctgaaaagaaacttaattagctgacaaaaagcagaacaaaaaaagttgtagatttttaagaatgaaaatgaccaaaatagttatatgttttgaagatatttatactatattcataactatattttagttgtgaggaaaaataaagtgtatatacctcatcaaaggatcttgtatggggatgcatattaaccctagaaacgacgtcaccggagccaagactctgcaacgtggcagctacgctggaaatctcatctccgacaccaattccgatcacgtccttggaaccatggtgatcagaccaattagtattactaacacactgtcttggttgtgtctgataaaatatcttggagaccacaagttctccttctctctcttcctcattaatccctaaatgatattgatgcatcacccaatttgttttctccggtcgacgattcttgccgaagtttgtgtagagtactaatatcttcttgcatcctctttgttgaccgttgatcataaccggtcttgttttgcccgttttgtgccacctggtttctgatgatccggttaactcagagtcgtgatcggtttgaattattttacgtcgttttcttgttccggttgtgtaagctcttgatggtttgtggaagaagtgtttgctcaagccatctcttgtcaccccttaattgcaagataaagaaatataattttgaattgaatttctagaaatttagtctatgaggaacaagttattatttatgaggaaacttgtttttcaaagttgggtcaccaaacattatccaagatccgaatatcactatacttgcatgcacagtttggtacaatggtacatattcataaatatataataactaagaagagtttaagaggttattcaataaaaagaaattaagctgcagataatcgattaattaaaatgcatcgcattttttttttcgtagtaaatttcgttgaaaagttttttcatttttgttacactaaaatatcgattcaatgtaggatgttttaaaagaaatttctttctccttttaattgatgacttaagtattctatcaatatacgggagctagtggtgatttctaaattgcctatataaaaagtactgtacaaaatattttcatctccttaacttatatttggactatcgttccatgcagatgatatagatcaaactacaagagtttattgtacttgtatcaaaaaaaattgaaattaacctggaagcttctgaggatgagtgtaacatattccatcttctccatcaatggtgggaataaattcatctataagtggatgagacgacgaccatttcttattttcttcttttcccttcacttttgcttctaaatgttctataagttcttgatctgtcggatcgaatttcactcctgccggcaatccaacccaattcttaaaaagaaaaaagaagaaggctgattaacaatgaataataatttcaaagatataaagaaaaaagtgacaagatgatatctttaattatttttattcttgggggttgattagattatatatgtcaaggtgtataatggaatattactggtttagtagcagcttgaatcatgcgaccacatccaggacaatgttttgatccgcaaagatgatgatgttcttcgagctttgaatctatgaggttacatttactattcttcatagttttcttttgatctctaaatgatttgatgagaaattgatctgcagtttatgaacaacaaaaagtaattttttaaaagatattgatcgatgcatatatacacgattcaaagcatataataaaaaagaagacaaaaatagttagtaaatataaagattaccagatttgtatgacaatacgagatctaccaaaattaataaaaggtaaaagaatgaaattgataagatgagttgatgtcattaatatgcatatatgcgtgataaaagaacacatagacaatttcaaaacatgacaataataaagaagaagtacaaacaaatatcaagattaccagatctgcgtgagatcgattggatagggaaaatgtaagaggaagaagaatttgataaagacgggagtgatctcaatatatatagtagagaaaaataataacttgtgatttatgctttttaagtattataattattgttattaatatctctctttgtttccagaagagacacagaaacacatgtagatacgactttaagtactgaaaaatctatgtcaagtagataaagaaatgaagaagaaatgaggaagacgaagagtaaaggaaataaaaggagttgagactgaaaaggttaaaaaccctaattttactctctcttgtcttgtgcgactcatcttcagtctatcgaccaaaccttttatttatttcctttttgttttatctatctattttatttattattattagtgtattcgtattctaaggtggtatgtattaatattataataggctttgtacatacaaaattagtattactcagctaaatgagacatatcagaccatgtcaactttttttgagcaatataaggaaattacgaattgtgagatatttataagttttagttggagtcaagctgtaaaaaatgtaaggctttctttttatcaaaaagataaaaatctaattttaaagattttatttaataatcttgtgctttaattaactgttgaatctcgctcttttgtttgaaataaatatttgtttgtacatccattttaatagtataaaacctggtaccttctctgaccttctgaatgtttttgaacataattacggattaatttaggagaagattatcaatatttttaaaataaagaacgcaggaaaagaacataggaaacaaagcatttaaggataatctctttggattatagggcaaacacatgtttttaagaatctttttcttttttgctttctttcacattatttgaaatatgtaacatattcttgtgggatttgaacccaatggtcctacactggtgtgggtccaatgatgatgtcgggagatggggcctagccgcagatttgtttgaacaacagatcaaacggtcatcatttatttgatctaaatgattatattaggttttgcattttttcttctcctttgaaaagatgaaaaacgaaaaaaggtcagaaatctactggagataagagtaccgtctgagactagaataaacatagatatcagctgaaaaaattgataagagtatgataatgtgcttattcagttttattattaaaaaaataaaaaaattagtctgctacgaaaacacaagtatacatactatagttgataagagcattatccatggtgtgtagtaagtaagtaaacaaaccattatatttggattaatcgagtattcagcaaatattcatattgtcttgttaatgattaagagcctagaagtctttaaaatatccatcaagattcaaacattatgactcaaactagtgtggtgttgtccattatactcgaaacgaaatggtattttttcaacttttgcttgtaaaacttagccagtgcatggcctttattaaatcaactattgggtcactgcatgacccatttatcaacctgtaactgaatattgggctttggcaaagatccaattagcttcattcgtatttcagaaatttgattttatatccgactgagtaggtacgtatatgcaatacgttatgtcctattagccttatgggactcacgggtacttatgcaggagatggattaatttcatatccatctgcaaactaaatacatttattttcttatggcaaaaagccaaaaactatgtaacgtttaatttacgaaaaaaaaaatatttaatatttgggttatatggatttttttttattttttttttttttttcgggacattagcgagagtcatagtattaaagaaacagtaaaaacaacgaccagatttaatgcaactttattactactttaattcagattcgagaattgacaggcaaatacgcattattttagtacattatgaagaatcatacagttacatatttcacatatatattgttttaaagatgtaaaacgactaagcaagtatgtcatctgatagcattatgaactaataactttttgtcaactctgattttcatttttaaaattattatatcttgttacctctttgtaaccagcaatagtttcttgacaacaaaagaatcggcaaatcaatgaaaacttattaaactaacacacaaaacataaaaaatagtgattagccgacacaacaaaattggatttgtctttctctctttaaaagattttcacccgaatattcctaaagatctgaaatactgaaaatatcacacaaaaaaatccaaaaagaaaaaaaatcattttaaaatttagaacttgtttttcaaggcccaaaattaatcgttgtcaataattggaaacttaaaaataaagtcttgttctagaagaatgtgaatcatcttctccaagtttcaaacgttggtttttttccccactgtgatcgtcagctttatatattatatacacgagaatcttgtacccaattaacatatacatacatgtaaatgtgtgtatgtatataatataaaattattctccttttcactaatttttcttcaaatactttaatgcccaccacctgttcgatcaaattccccatctcgaaaagctagaactttcttcgtctctattggtctctcactctctctcttacctcttctcatttgttctttctccttctaaattgggttatcaagtatattggatcaacgggtttgattcacgatttgtcatttcatcttcgtggagagagtttgatctgatttgttgatcgtcagcgttatgtctagtccgagaagtaacaagccgaagattgtcaacggtcctggtggttatattctacaagacgttcctcatctcattgattaccttcctgatcttcctgtatgtttcacttgatctctgattggttctaaattgatttgaaaatttctcgatttgcacaaagagatcgaatctgatatcgtctagttaacaaaggaggaatctttagctttgggtttcaatgttctgatctgtttctggtttactcttaataaaatggtgataattcgtggttttgatgttattgcagacttatccaaatccattgcaagacaatccagcttactcagtggttaagtaagtatcttcacctatttcagacgtttccattgcttaaagttcatagtttttgttctcatttggatgttttttatcaggcaatactttgttcatgctgatgatagtgtccctgagaaggtaatttatcaagcataatccttttttacctgtaattgtctgaagaatggtgttagatgatcatgtcttgttgaaagtgagatttttaaaagtaaaaggctcactttttctatcctctgttttattttcgtgttatttaggttgttgttcacaaggatggtccaagaggagtccatttcaggcgtgctggtccacgtcaaaaggtttactttgagtctgacgaagtgcatgcttgtatagttacatgtggaggtctctgtcccggtctcaataccgtgattagagaagttgtgagcagcttatcatacatgtatggagtaaagagaattcttggaatcgatgtaagtttggtgaatcataattaatctcttcggtttcattttggatttcataactattgtccaaacgattctcatttgttgaaatcttatagggtggatacagaggattttacgccaagaatactatccccttaaactctaaagtcgtgaatgatatccataaacgcggaggaacaatcattgggacctcaagaggtggacatgataccaacaagatagttgatagcattcaagatcgaggaatcaatcaggttagggaataaacacagccactgctttttacgttgtatgtgaaaaagtttgtcaaccttttcttgatgtagtatctgttatcatttaggtttacattattggaggagatggaacccagcgaggtgcttcagtaatatttgaggtaattccattgtgatatttcagaataacagttgtaagttttaagttttaacaatcaacaactgaacttagattgtatataaccatgtaggaaattagaagacgtcgactaaaagttgctgtggttggaattccaaaaactattgataatgatattccggtgatagataaatcttttgggtttgacactgctgtggaggaagctcaacgagcgattaacgcagcacatgttgaagccgagagtaatgagaatggtatcggttttgtcaagcttatgggtcgttacagcggtaagtctttgttttgaaacatacaacttaaaagaccttttcgatttgttactgactaatgctaggcgggtgttgtactacagggtacatagcgatgtatgctacattagccagcagagatgttgactgttgcttgattcccgagtcaccattttacctcgaaggagaaggtggactctttgagttcatagagagacggctgaaggatcatggtcacatggtgattgttcttgctgagggtgcaggacaggatttgatgtgcaaaagcatggaatctactcctatggatgcttctgggaacaaacttcttaaagatgtcggcttgtggctatcacaaagcatcaaggtaagagttaaaaactttcaagatcatgagattcttatgccttttacagaaaatttcctcatagggtttatttcctcttgttgtaggatcattttaagaagaataagatggtgatgaatctcaaatacattgatcctacatacatgatccgggctgttccaagtaatgcatcagacaatgtttactgtacacttcttgctcagagcgcggttcatggtgcaatggctggttacactggctacaccagtggtcttgtcaatggaagacaaacatacatccctttctacgtaagttactaatacagatctaatgtgtgcgggatggtcctgaattgaatctgatcgtgtacttgtgagcaattctgaatcgtgtcattgtttttttgtttgtcttgcagaggataacagagacccagaacaatgtagtgattacggatagaatgtgggcgaggctattgtcttctacgaaccagccaagtttcttggggcctaaggatacatctgaagagaagaaagagttgccggaaacaccgcttcttgacgacggagctgtcgatattcctcctgtgactaaagaggtcactaagtgaagaagttgcagggcataataatggcatatgtatactcagagggttctgtaaccgatgccgtttcaggcgaaagtgaaataattgttattttaacgaatttgcccttttgtgtatgtgcatacacaacacaaacacaaattttagttttcttctagatgtttagttttgtaatcctttttgcattttccacaactgaataaatgaatgaagtaataatcttcgttactttgatcctatatttgttcttgtatatgttttttcacactcaaaatgaagagaataggatgcaagagagctaaattgttttcacacatagatacttcaaaaagtttctttttggtaactgatcttttaaagaatgagaaagctaaatctgaatgatttaatgcagtcaaaagtgttttttttttcttgaaggtttctattattgataattgagaatttgataacttgtttggatcaaatcttggtctaataatgatttgtctgatactgaatttgcaaaaaaatctcagtaatagtgtaatacttttttttggttaaaaaagtaatagtgtaatacgacagaccataataaataaattttttaaagcagaagatgaaagaagaaaatatcattttagtttataataggacagacgagatacaattaccgtttgtatcaacattagcattaacattagctaatgtaacaatacaactttattaactgggcaataatatgcttaaacgacaagtaatcaaacacacacaccattttatctttctaatagtagactttttttggacggcctcgatgccgttttcaccacctcagattttccgggaaatactgaaaaaaatcccaaacaaaaattatatcacaatgctgtaaaaattaagtacatatcctatttttcaaaagcagaatatggtaaagatcctcactttcttgataagagacatgtagtacggcttaaccttctcgacattgacgtgtactttgctcttgctgtataagtcatacttgctatataataaaacatacaatataagtattaaaaatctgatcatcgggaaaaaaaaatcgggtttaattaattaagaaagacttttatttagagaaataaattacttaaaaacatgaagccatttgagattctccttgtcttcctcgttcataaggtgagtgtaagctccagccttgtgcaatgctacaatacattaatgttaattcatcaatcaaattatgttactaattaagtgtttagttagttaatagttttattgtgcttacgataaaaggaatggtatcggatgatgaatagtcccggggatggtaaggtgcttccattctccttggccacctatttaaccatataataatcgttttgtgaatcatgtaatcataattaatgattatagttgataaactatagaaaggaattaaagaatttaccagatacatgtagtcatcatgtccccatgacataagaacattttcaagtccacagccttcagaataaattccagctttggtattgtacttagggttgttaaaatcagggttttccataaaatactacaatcatggttgaaaaggaaaaaaatatattatagaaatcacttgtttggtaaatattaatcaactaggttctaactatcaatattttgaggatgtcaaaaaaagaactatcaatactttgagtaactagcaaaatatattgagttatatgtaccttgtggtgtacgttagattcatcaaatgcacacccaacaggaaatgtgtcacctaaacggatagagaattcataaatcacttacttaaaattgataagtttactacttagtaaatcaggattaattaatgaaagaaatcaaagattaaacttaccaacaacagcccattgaggaagccctccaaactgtggtagggtaagaaccttcccaagatctggaagttcagtcatttttagtatttttaggattcttataatatgataattttgattcttataagcatgagtttttgtcataaataacaattaattaccatggataagcgcagtgagatgaagccaatcttcgttaggataatctttacggattgcttccgcagattgaagcaaatgttgaatttgtggttcgtcgaggtcgggatcactctcgtccaccacttcttttgaaagttcacaacattcccaaatgttcatcaccatcttgtccaattttccatactcacttctcattttctgtacctgcaaacgtatcataagttagtaacaatatattttataacagatgagaaacaacaatatgtatcgtatgttcatttcggctaacatcgttaggaaagatttttattttcattagtaattcataaatcacgtccatgcaaaaataataggactcaactataatgttgatcacacaatctaataaaccctaaaccatataagatatataagagatcttacaaagtctaaagtttggttagtgtgttgtgttgcatagaaatgttcgacgctcttttgcctctcgctgtttgtatccgtgtagtctctgcaataatttacatcaataaaatcttaaatgttttggaaaacattttagaaatcgtctaaattatttcttgagaaaaaaggaacctgaattgacgaccaaatgcgttcatctcaggagccaaaaacacttcatcatcggatgatatcttcgacattggtatgtcgctgtccaatcgtaactctccggtcttctgcgttgtcgagtcctcatgtacttaaacaaaacaaaaaagaaacaaaaaaacttctatttttacgaaatctcaagataaaatttatagaagaaaaaaaactacaaagaaaagaataacaaaggaagatagatagatgttttaccaaaaacagggttttcgacggagatattcatcttccaaaaaaaaacaaagtaaaaaagaagatgagttatgaaaactaaagatcgagagagaatgtctacgaaaagatgtaatttgatggagacacaaaaagggtatttgtagtggtgatggtttaggagacgataggtactttcctctatatttagagagaaatccaaatcttttgaccacgaaaaataaactttgtccaagaaaataaaaactgtggcatgataaagatctcttaacatttatatacaagagttaatttttttgttttcgttttttttagtttatttactctactgcgtttgtttatgttttgaaatataccaaacatcctaaatccttaaatttactctcttcttgattggtcaactttttggcatattttcttccttttaagatttaggaagacatgtgtcatgttctaaaatagatatagtagactattaacatctatgtgatattcttatgaattatcatagacacatatgtccaagagagttaattatacttagattctccattttcttattcaaaaaaaaaaagattctccattttcttacctttttatcagtgtttttcactttccccccatttttcatatttataacattcacacttattagtttctcccccatttatgctatttacagtatattctccttcaaattttggagtattgtggattttgaacatgtgtaaattgtaataaattggttgtctttttacgttttttttctttttcttttgattatgttcgtaactaattgactaactaactttagagccaagtggagaagacaattcgtgtgagtttccacggcccatgctttcgacttttgagtgaaaacaaatatttttgcattgttaaaagacaactcaaaaatatctcgttgttattagtttgttacaaatactacaatggcataacagttttcgtaatataagttttccttcgacatcattttcttatttcctttaaattatgatggaagaagattacgacatcaaaagctagagaaaaacattatgagatgatgaagtttgttgcaacggctaaaaacagaacattacaacttaggcctttcataaaacatatgggcttttatggcccattaaaaatcgggcttagtggacttatttcagtctcatatatatattttgagtggcgcatcagtctcatcttcctccatggctctaaacaactttttgactttccaactactccttcttctacttcgtgtttcatcggaatctccatggatcgtcgccggagatgtgtctcgaatcccgatcaatttcctcgaattagcaaagagcccggaggttttcgattcaatggtgagaatcagaaggaaaatccacgagaatcctgagctgggatacgaggaattcgaaactagtaagttcattaggtcggagcttgaccttatcggagttaagtataggtttccggtagctatcaccggtattatcggatatatcggtaccggagaaccaccattcgtcgctctaagagcagatatggatgctttgcctattcaggtctagtaccaattcacagaactctcatcgattagttacatttaggtctatggttcagaaatttggattaaggattagaacataatttgatttgataattgaattcaggaagctgttgagtgggagcacaagagcaaaaatcctggaaaaatgcatgcttgtggacatgatggtcatgttgctatgcttcttggtgctgctaagatacttcaacaacatcgccaacatttgcaggtctatgcatatttcccttttatactactttcatcagtaacattggtctaacacatttttttgtttttgtttagggaactgtggtgcttatctttcagccagctgaggaaggtttgagtggagcaaagatgatgagagaagaaggagcgttgaagaacgttgaagctatttttggtatacatctttccccccggactccctttgggaaagctgcttcacttgcaggttcatttatggctggagctggagctttcgaggctgtaatcactgggaaaggaggtcatgctgccatccctcagcatacaatagatcctgttgttgcagcttcaagcattgtcctcagtcttcaacacttggtttcacgtgaaactgacccttcggattcaaaggtttcattttttactctttgatgatttctctcctggtctatgcttaatttgtagtataacttattaaggtttcttctgtaggtggtcacagttactaaggttaatggaggcaacgcgttcaatgtcatccctgattcaatcaccataggaggaactcttcgagcctttaccgggtttactcagcttcaggagagaatcaaagaggtgatctgatcctttttgatttttttctctgtatgttattttaccatagaatcaacaaaccctggtttcaacttttgattctagattattacaaagcaagcagccgttcaccgatgcaatgcgtccgtgaatctagcacccaatggtaaccaaccgatgccaccaactgtgaacaacatggacttatacaagaaattcaagaaggtggttagggatttgttgggtcaagaagcttttgtggaagcagtgcctgaaatgggatccgaggacttctcatactttgcagaaacaatcccgggccatttctccctcttgggaatgcaagatgagacccaaggttatgcgtcgtctcattcaccacactatagaatcaacgaggatgttcttccttacggagctgctatccatgcaacgatggcagtacagtacctcaaagataaggcttctaaaggttctgtctcaggctttcatgacgaactctaatccctgtcaaccttggtacagtttcctcatcggtcattggttcgaattcagaagtaccaaatttacactccattgttgatagaattccatttaaatgatgaaaagccttaattcgtagaacaatttcaattgggaaattctcaacttttatgatatgtttgtgtaactgtaacatactggcataatcttagaacatgaattataattaataggctagtcttgttgtaatgcattggcaaaaccacaccttttatgtttatattgatcagaatcggagattttaagcatcaatttacattctttggaaggaaagaaactcaagattgcataatgcttcatcaagaccagcctctgctttaatactttaaatcatgaacttcattcggtgtcgccttgacccgctatcgagagaccaacgaattgtgcctccaaacgtctcctatctagctacttagtttggagtgttccaaccttaatgtgttctagttgtattctccttttgttgttgttgttatagttgtcctttgacgtcgtcatttgcttgtttcctttaatcttgatggaagaagattacgacatcaaagctagagaaacaaaaaaaaactcaaaagaaaacaaaacattatgtgatgatgaagtttgttgcaacggctaaacagagcatatactgtttagacctttcatcaacaatatgggctttttggcccattaaaaatcgggctttgtggacttgtttcagtctcatatatatatatgagttaaatcagaaattggttgtcatcttcctccatggctctaaacaagctcctcagtttgactttccaactactcctttttctacttagtgtttcatcggaatctccatggatcgccgaagatacgtctcaaatccagacgaagctcctcgaattcgcgaagagtccggaggtcttcgattggatggtgaaaatcagaaggaaaatccacgagaatccggagcttggttacgaagaactcgagaccagtaaactcattaggtcggagctggaacttatcggaatcaagtataggtatcctgtagctatcaccggtgttatcggatatatcggcaccggagaaccgccattcgtcgccctgagagctgatatggatgctttgcctattcaggtgtattaccaattcacataattctcatcgattagagacatttaggtattttttgtatgaaacttgatcataggtttaattatacataggccaatacaaatgtctcttaggtaatgacgataatggaattaaggattagaacataatttgactgattctaaaattcaggaaggtgttgagtgggagcacaagagcaaaatcgctggtaaaatgcatgcttgcggacatgatggtcatgttactatgcttcttggggctgcaaagatacttcatgaacatcgccaccatttgcaggtctatgcatttttcccttttgaactactttcatcagtaacatttggcctaacacattttgttttgttttgtttagggaactgtggtgcttatctttcaaccagctgaggaaggtttgagtggagcaaagaagatgagagaagaaggagcgttgaagaacgtcgaagctattttcgggatacatctttctgcccggattccctttgggaaagccgcttcacgtgcaggttcatttttggctggagctggagtcttcgaggctgtaatcactgggaaaggaggtcatgctgccatccctcagcatactatagatcctgttgttgcagcctcaagcatcgtcctcagtcttcaacaattggtttcacgtgaaactgaccctttggattcaaaggtttcgttttttactctttgatgatcttcacacctggtctatacattatagaacagaactcattgaggtttcttctgcaggtggtcacagtttctaaggttaatggaggcaatgcttttaatgtcatccctgattcaatcaccataggaggaactcttcgagcctttaccggatttactcagcttcaacagagagtcaaagaggtgatgcgacccaagattgcgcctataatatttcccggtattgttgctttacccatagaaccaatctccggtttcaacttttgattctaggtgattaccaagcaagcagccgttcaccgatgcaatgcgtccgttaatctaacaccaaacggtagagaaccaatgccaccaacagtgaacaacaaggacttgtacaagcaattcaagaaggtggttagagatttgttgggtcaagaagcttttgtggaagcagcacctgtaatgggatccgaagacttctcatactttgcagaaacaatcccgggccatttctctctactgggaatgcaagatgagaccaacgggtatgcatcgtctcattcaccactctatagaatcaacgaggatgtgcttccgtacggtgctgcaatccatgcatcgatggcagtacagtacctcaaagagaaggcttctaaaggttctgtctcaggctttcatgaagaactctaaaccttggttgtagacaggttgttcatcggttattggttcagattcagaagcacaaacctaacactccattgaattaatcaagtgttatcgtacaagatccttgcaagtgttatagaatgatgaaaatgtatttaatagctaattttcaattggcaaattatcaacttttaatagtctgtgtaaaagtattgacagaaacttagaacacgaattatgatcattggtcttgttgtaatgtattggcaaaaatcatatcttatgtttaattgaccaaaatcataagtgaaaaaacagtatttcatagcatagaatcaaaacataatagttcggtgccaaagaaaacaaaaagttacaaatgaccttgagaagtttcacgacaacatctttctctctaacttcttctatttctcagaagagttgggtcctctcttctttccgaaaccaacaactgcacaaatcaatgaaccattactaaccaataatagatacgcaacgtaataagcatttgagtcaaaaccaaatgataaattcagaagctctagtctaaaacatcgaaccacaagtgttccaatataacacatttctcgagtattcacaattcttattcaaattcacaatattattaaccacattcaacaatgcagtagtatcgctttataaaaatcgaattcaacaatgaacactaacacactgtaaaggaatcaacaaagaaactagatcggaaaaattacctgcggtgacaaaacgacggttgtgctgcagacgcttgtgagcacgacctctgggcttctttttcttatcttgcttcgcaacctttggagtttgtcctctaaccttaccggcacgagccaaagatccgtgaacctttcctgaaatcgttaaaacacacttaacgtcaacagatccacatcagaagaaaaatcaaaagctaatctataaatttcaagaagtttccaaggattttacccatgattgattagcttctctgctttttgttcctccgttccgccggctgcaagaagctgaaatgagttcgtgcgaaatctcagaattagggttttcgagatgatgatacgtatttaaacccgataccgaaatatattgggctttatgggcccatactaactacttaattactattgggctttattagctcgaatatggacatctgtaaaactggacctataagcaacacaagtttgacaatataggaatacaaaataattcgaattcagagaaaaattatctctactttaataggtctataacgtttgcataatctaaaacccaagatattttggaaacatatttctattttaataccattttccactaatacttttcaataacagtagttgtttccataaataacgtctccactaattgaataaaatgaaatatttaacgaattattaattgcgataattagatacgaatcaaaaagattccaccggcttcgttggaaactttaagatatttccgattttaccccatataaagggaagatccaacggttattcttacatctctcaatacgcagccaaatacactctctctgaaacctctcctcttttagggtttaatatcaacgcctccaaaatttccgtgcttttgttttcgtagataacgaacaatggctgatgagattgtgccgccggcgactcaattagccgccgtatccttagaaaacgatggatctacggtgcaaagagctcaattctctaaccgggttttgattcgaacgattttggatcgacctgacggcggagctggactcgccggtcaaacggttcgaatcggtggttgggtaaaatccggaagagatcaagggaaaagaacgttttctttccttgcggttaacgatggatcttgtccagcgaatcttcaggttatggtggatccgtctctctatgatgtctctaacttggttgctacgggaacttgtgtgactgttgatggagttttgaaggttccaccgaaaggtaaaggtacgcagcagcagattgagcttaacgttgtgaaggtgattgatgttggaacggtggatgcgtctaagtatccacttcctaagactaagttgactcttgagactttgagagatgtgcttcatcttcgttctagaactaactcggtattacttcttatctctttcactgagttgtgttttgattgttcctaggtttgaatcaaagaatagttgatttatggtgatatttgcctgtgatttcagatctcagctgttgcaagaattcgtaatgctcttgcttttgcgactcacagtttctttcaagagcatagtttcctttacattcacactcctatcatcacgacaagtgattgtgaaggtgctggtgaaatgttccaagcaacaactttgatcaattacactgagaggttggagcaggatctcattgataaccctccgcctactgaggctgatgttgaagctgcgaggctcattgtcattgagagaggtaatgttgtagcggaactgaaagctgccaaagcaagcaaggaagcgatcactgctgctgttgctgaacttaaaatagcaaaggagacttttgctcatattgatgagaggtcgaggcttagacctggactacctaagaaagatggaaacattgattattccaaggatttctttggtcgtcaagctttcttgacagtttccggtcaattacaagtggagacctatgcttgtgctcttagcaatgtgtatacatttggcccgactttccgggcagagaactctcacacttcaaggcatcttgctgaattctggatggttgagcctgagattgcttttgcagatctagaggtaataaacatacgatattctttggttttcttctttatcgttaatgtagactcagtatcttaaaaaccttcttttaaatttgtgcaggacgacatgaactgtgcagaggcgtatgtgaaatacatgtgcaactggttgcttgagaaatgttacgctgacatggaacttatggctaagaatttcgactcaggatgcattgacaggctaaaattggttgcctctactccgtttgggcgtataacatacactaaagcaatagagctacttgaggaagctgtggctaaaggaaaggaatttgataacaatgtggagtggggaatcgacttagcctcggagcatgaaaggtttgtgataacccttaagaaccattcctcagctttaaacagttttaagaaatggttgctaatgaaacatgtcttgcaattacagatacttgacagaggttctgtttcaaaagccacttattgtctataactacccgaaaggaatcaaagctttttacatgagacttaacgatgatgagaagacagttgctgccatggatgtcctcgttccaaaggtaatattaaaactcaaagttgaatgcatttcctttatttgtgtgtgattaatcatcgaagaaacacaacaacggcctctttccttacccttatctctgtataaattaggttggagaactcattggtggaagccaaagggaagaacgatatgatgtcatcaaaaagaggtgtgtgaaagtgaaaccaatattcaatttttggcttaatttttttttgttttggttcttttgtgaaccttatgaagcaaaatcttgtgtttgaacaggattgaggagatgggtcttccaatagagccatatgagtggtacctagacttgcgccgttatggaacagtgaagcattgtgggtttggacttggcttcgaacgtatgattctcttcgctactggacttgataacatcagagacgttattcctttccctcgctatcctggaaaagctgatctttgattcctcttctttacaccatttacatacacaatttcgcttttattagctggtctggtttccataaccgacttggtttagtttactttttaagttggttaaaggaaaattgtattgacttttgattttttatctctatggatctggttttgttcggttatcccgatttggctattgaatgataggagaaccaatttgagatataccacaaacatataggagaaccaatttgagatataccacaaacatataggagaaccaatttgaggtataccactaaccgttgttagttgttactgttcacatttttatccggatttggataaatctctttggcttgttggaagttctttttgaaaaatgcatattattacataccttcgaagttcgaaactgacttcaaaactgcagctagaactttagtatcccttgaaaccaaaatgcaatgaaaaaaaaaactgaagaacgctaagaatgtgtaatcgaaacatagagattaacaacaatgtaccttgagcccaaatagcagagccatgaagacgatgaagaatgttacgagaacaagcaagtgatctcagctgattcgttgaattctacaattttctctatcgatctccattgtagcaaattaattactttctccagagtaagtgttttaggaattaagcgtcttcttctctctctctatcttagcttcaaatctctaaagactaaaaccctgattcggctcggcctaatataaacgggtcgttaatttcaataatgggttgaactatttgaagtctgacttaggcccggcccactagagatattgatagttacttgcgttttaggatttgctagggttatttaggggtttgtctttgttgctctttttgaaagctatggctgaaatcagcgggctgcctgatgacttgctggtgaagatactagcgtttcttccaacaaaagttgctatatcaactagcgttttgtcaaaacaatggcggtttctttggatgtggttgcctaaacttaagtacgatgattacgatgacattactgatggtttcaattccgtgtctgcattccagacatatcgggattttattgccaagaatttgccattacacagagctcccatcatagaaagtttgagcctcggatttcgttgtggaacacttcaacctgaggatttgaaatcgtgggttgaagttgcagtttctcgtagtgtgcgtgagctaagtatccttgcatattataggaataattatgcattatcgtcgtctagtttgtatacctgcaaatcgctcgtgactttgaaaggctttaacattcgtgtggatgttcctccaacagtttgtctcctgccttccttgagaactttggaacttaaacgtgtgagatacttaaacgaagattctcttcgaatgctcctatccttttgccctgttctggaatatctaagtatagaacgacacgataatgacaatttgagagggttagttgttgatgtcccgtccttgcggcgtttatctttaacttcatatactggatgttcttctgacgattatgtaatagttacaccttctttgaagtatttcaaagcttttgattacagaagtgaaatttcctcctataagattgagaaaattccagagcttgaagaggcagatatcagtattgagcgaaatcccgagaagcttttcgtatatttcaaatctatcaaatgtctttcattacaagtagacttcaacagcaaggaagaggtaatctttttgcatctataaactatccagttttcaaatttgcattatatttacttataacactaaatttgttgcattttcacgtgtatagcccgggtatgattctggtattgtcttcaatcatcttgaagaactgacgccatatataaacgacgctaattggtccaagttacttttccggttgctcaatgattcacctaaactccgagtcctcgaaatcagcaactccaagtcatttgtaagtttttttttgcaagatctgatatatggtgtgatctcaactctgttttttcattttttttaatttaatttcagtataaagaaaaaattggggagtatctaccggttagctggagcaaaaatcagggatccgttcctaaatgtttcttgaatagtctagaaactttcagggttaaatggtactacagcgaggagcaagaagatagggatttcttgagtcttatcttcaaacatgctcgatgtctgaaatctacatcaatcctgcacagatgatgttatgttctccacaactgaaacttgaaaatgatctatgagtcgtcgtatttgttttgttatccaagaacacttgggtttttatttgaatgtggtacttgtttaagaactgaacttgcatgttttagatcattcgtctcctccatataatagacgacatcttgtatcatttaatactcagattcagcttgatcatcccaagattcaatcattaagaagaaaatggtctcttcaataaaatagggtttttagtccccatagccttccctgcaaacttcctgatcttagctccttaaaaggcatttggtgcattcttcttaaaggtgccattacaatttacaagttcattatgcataagtaggttcttttttttttccataagtaggttcttaatctcattgaaccaaacccacctgaaaatacattccaaaactgaacctaatcttaatttgtatttggagtttacaaaagtacactaattcagaagtttgctgtgtatggattttacaaaaaaatctcaactacaataaggaccttaaaatatacacatgcactcaaaaagagtttgacatgacgactggcccagtagcaggcccctcagatatttatgtttattaaaccatttgatgggcctataagtggaagccaaacggtctgatgagtggtggtgactggtgactggttcccgagcagaagtcgagattccacacgaaaaactcatcacctgaaatttctaggtttgttattctgttccttacttcattatcttcacttgttttgtaatttgttgagttggattcagacaaatcatttagtcttaggttttgtttcatgtgattctttttttccagggtcggaaaaccccaaatttgtcttgagtcttcgagtgatatggctaaaatcagtgacttgtctgatgaattactggtgaagatattatcgtttcttccaacaaaagaagcagtatcaactagtgtttgtcgaaacaatgggagtttctttggatgtggttgtccaaactcgagttctactttagtgatggttcagagtctgcatgcctgagggattttattgccaagaatctgccattacacaaagctccaatcatagaaagcctgcgtttttgctctttttttggatcacttcaacctaaggatttgaaatcgtgggttagaattgcagtttctcgctgtgtgcgtgagctaagcatcagtttacatgatacgacagctgctgtatcattgcccagtagtttgtatacctgcaaatcgctcgtgactttgaaactttacggtaagaaggttcttttggatgttcctcgaacggtattcctcccttccttgaaaactttgcaacttgaacgtttgagatactcagatgaagattctcttcgcctgcttctatcctactgccctgttctggaagatctgagtattgtacgagaagactatgacaatttgagagcgttagttgttattgtcccatccttgcagcgtttatccttagagatacctggtaattgttcttctgatgggtatgtgatagttactccttctttgaagtatttcaaagttgtggattatagagaaagtatgtcctatttgattgagcaaatgccagagctggaagaggcagatattgttgttctgcagtatcccgagaagcttctcgaatcagttacatttttcaaacgcctttctatacgcgtaatattcaacacttatacagaggtcatctgctttcatgtcatgtttcctacctcatattttttacttaaagacacaaaatcggatttcttgagcttgaatccttttttattgtgttgtcatgtgtgcagactgtgtatcgtgatggaatagtcttcaatcggcttgaaaatttgaagctatgtatatgcaatggtgattggtccaagttacttatccagtttctcaaagactcacctaacctgcgagtcctcaatctcctcgttgatgatgtaagtttcttcgtcgactattttgtagtctaaattcacactatagtgtagtattctaacctttactttttctttttaatcttagtatccgtcaagtttgggggattatgaaccggttcgctggaaaaataataagagctccgtcccgaaatgtttgttggagagtcttgaaacttttgagtttgcaggttacataggaacacctgaagagagggatttcttgagttatatcttcaaacatgctcgttgcttgaaatcttcatcaatcttaagcagaccagaacggtatcatggaatttgagttttatgagatatgcttcacaatagaaacttgaaaatgatctaagagtatggttttttgtatttcttcttcgaatgtgggaacttgttttcgaacaatctatcgtctggcttttatgtggtaaactacaatctgtatgtctctgccttatggccttgtaaactactagttcggaagctcagtcaaatagtctcatgcctgtttaagaagctacgattacacagatccgagcatgaaagtagcgaaggtgaacacagctgtacttctcagcgcaagacatcttatcaacagctcttgattcaaagttaaacctagttgatttattttttttgtcaaaaaaaagtaaaaaataaaaaataatttggacgacatctagcataattttatacacagatcattcctacgatctactttgtgtaaatgtgagattcgacaattaacaagcataaagaaaattccaaagcaaaacaagagtcaatcatgaagaagaaaatgggtctcttcaataaactgcataagtaaattcaagatgcactacaatgaagaaagtgaaaggtcaagacttttaattgaaacacagcaacaaaagtaaaaaaccaaacaaaacttgttctactgattctcttaatcctcctcttcgatgacctttgtgccaagaccactgagtccttctgcagggatttcagcaacagtgacaagggagaagaactcttccttcgcatcttcatcgtcgtttctcttacgtgcaacacgaaccctgatcctccttggtggacctctgattcccttgctccagatttgcttgttcaatttcacgtctaccctaacgtccttagtccccatagctttctctgcgaacttcctgatttccttgatggctttcggtgccttcttcttaaaggtgctgttacaaaccaataatacataagtagagatacttaatcacataaaaccaaacccaccaaaaaaccacattccacaaaccaaactctaatcttaattctcttttacaagatatatcaaatgaactataccctttcatttcaagactaatttcgatagtaaatccaaaaaacaatcagtacaaatttttactttaagtaacaaaacacacttgatacgatttttcaaaacaatagataccatttccccatgaattcaataacaccatgaatttcaaaagatcagattctctggactaaacgtctgattacatttagaaaaagattagctaacttaatttcattacaaccctatgatattaaccaacaagcagctcaaaacatgaacacaaagagtgaaatcttaccatttgtgaaggcgtctgtggaggttaatggtgtactctctggtaatcacttcctctttccttccctttttctcagacatcttctctttctctgtgacttacttcttcaaactctttacctgcgattacccattacaaaaaaccacttcaaaatcgattcttttcaccggaaatcaaacagatctgttcaaagctaggtcaaggacacagaattgagctagattgagaaagagagagagagagtagtacctttcgattgaagaacgccgagagacagaaaggggacgaaggaagagaactaagcatatatatgcggcactttgagttaaccctaaaataaataaatgattgggctttaatgggcctattttttgtgctattatgcttggcatttccctcttacgctttcttattttagtagcccatttacggcccaaatacatatgaagtaaatgttttactcgaatttaaactgattggttcgattaattaatcacccatgttaaccaacaaaaataaaagtttgaggatctttatttggctacatttctttttatagattccttgtttttgttgcatgacttagattttttgtaagacgaagttttgttaagtatcaggttatgtcctcttagaagcttttcatagattccttatgtcttcttgattattttttttggttttataaattgaactttggaatgcatgacattcattcgttgctttattatcttttttacttggaaaacaatggagttcgttggagaagaaattaattatacttttgtgattcagaaagttttggttctactgttttgtgttggtttgtcatggaaaatgataatatacatgtgtaatttgttaaacattgagaaagatcctataagggttttgattaccggtgcagcaggtaagaactcaaacaaaaaacgatccggtttatgttttgatttataattctatcaatttatttggtttggttcagtgtttttttattggagtcttttatctactactccctacctttatggtcgtttgttcttaatttaattgagaactttctattgaacaggaaacataggatatgcaattgctccaatgattgcaagaggtattatgctaggtccagatcaacccatgattctgcatttacttgatatagagccagcttcaagttcactagaagctgtgaaaatggagcttcaagattcagctttccctcttctcaaaggcgttatcgcgacaacaaatgttgttgaagcatgtaaagatgtgaatatcgtgataatgatcggcggattcccaaggatagcaggcatggaaagaaaagatgtgatgtcgaaaaatgttgtgatatataaagctcaagcttcggctttagagcgttatgcatcagatgattgcaaggttcttgttgtcgcaaaccctgcaaacactaatgctctgatcttaaaagagtttgcgccatcaatcccggaagaaaatatcacttgcctgacacgactcgaccataatcgagctctagctcagcttgcagataagctaagtgttcccgtgagcagtgtaaagaacgtgatcgtttggggtaaccattcttcaactcaatatcccgacaccaatcacgcaacagtctctacaaaaactggagacagaccgttaaaagaactagtcacagatcacaactggctgaagaacgagtttatcgtggaagttcagcaacgcggtgcagctgttttaagagcacggaaacagtcgagtgctttttccgctgctggtgcagcttgtgaccatatccgtgattggtttcttggaacccctaaaggaacttgggtttctatgggtgtttgttctgacggctcatatggtataccacctggtttggtttactcgtttccggttatctgtgagaaagggagttggaagatcgtacaaggactcagtatagacgagttttcgagggagaaaatggatgactctgcacgagagctagctgaagagaaggatttagcttattcctgtctcaatgtatagaccaaaagttgaaaactatgatagtcatggcacaaacaatgtagcaaacaaataagtttgtgtttctatattcatgaaaaataatgggaacttacataataaacgctgaggttcacagatacatttaaaaactctgaaatcttggggttaaataatcagaaaattgaaagaaagagagttcatacttctacttgcgagagtatctccagatgccaaaaacaacaacacccaatcccgcaatgccagccaaaatctagtaaccaaagatccaaattcatatcttagtgattgcaatgttacatttacggagacaagacaaagaacagatgaacactgaccttggtatcacggatataagggccctcggatcgtgaactaaagatagatgaaagaaatccaaaacgagatctctgcggcatgagaataacagcagtgtactgtttcttgcacgggtgaggaaggattcgctgtaatgcagcttgtgctgtttgtggtgcaagtgactctctcattcgcaaacgcccttcttctaaaatctaaaaaccacagagaagtttcttcccttttcgtaagactgtgtttataaaaaatgatcaaagtattgacaaaaaatgttttctaaactgaccttgcaagaggcgcccaaatcgccagcgtaaacccttgattgatatccacgtataatcctgtctaaccagtaatagttttcctgacaagaacaaaattaaatcagttttgtttctgcagcaaattatggttttttggctgtgatggatttgtgatgattatggcaataaaaaatacctgcatgccattttcatgagctctttgttcgatttcaaggatagctgaaatgtcttcctgtgaagggccttccttttgaagccgtacaatttcttctaaagctaaatcaacctgaaggacacagaggtggctttggtgaccaacaggcagccaaagatatagagaaacccgtcagatagtgttagaagatggacataccagtttagaggagatttctggatcacatgaaaaattaacactgatgtcaccacgtaaatccgcagttctagaaggtttattcccgccaagaaacacagagacttcagcagaataaatctgtttaataggaaagtaaggtcattaaaggtttggtatgatcatcatagaaactgacacaaagagcagaatatacctgcccgtgctcgaacctgagaaactggattatcttggtctctaggagtttgcctaaaaagccgatacagtggatttcttcgatctatcataagtttaatggtatgaagcaaattcatttagacatcttcgtagtaatgaaaagaagaaaatatcattagtctgtaagttatggttcagatgatgaagcagagtcacttaccattgttccatttgttaactggacaggaaagcataactggactgaacactgggcttccaccattggacttcgtacaaattctctgcaatattgcgcatttagagtcattatgtaataatcaagggaagtacacagtatcacagtctctgattggtcgctgtacgaacatttctatcagaattctgaaacttctaaccagggccaatattttcagaatttaacttttacatttggattttgatttaactgcaacagtttgccaaacttttactcaatagtttggaaaaccatataaatttatacagtgatgatactgaagccaaacgaaaatcaactatgttgttgaacttagataatgacaagatcagtatacagcttactttgttatctttgtagggaaagtgaatggtaagcccttgaggtcatcacggttgaagttgagaactggttgaggaggcttaggtattccgccctgcataaagcgaacgcaagaatgtagtcaattattccgagcttacttttttgtatcaccagtgatgtgatctaacttaccagatactgaagaattagaggaagcgcgatagtaggatcaaggttccctacaatcacaactgtgaaagttgatggatccctaaagcaactgttgaagtattcgcatgccttcaacgggtcaacttttctgagttcactaatccgaataggctacacatcagagactaggggttagaatcagctgggcgttcaccaagaaataattagtcattttgaagatagatatcattaccctaaagaaatatgaatttccataattcagttctttcactctgttagcaaagacagtataagggtctctttctcgagcacggactgattcttcagccatttgcatcactattccaacctcttcttcttgtggcatcacgtttgtagtgaaaagttgatatacaagctggaaagaacgtataataaggttcagttataaggacaggataatgaaagttccatctaaagagagtcaaaacattattagatgaaaaggagaaaaaatgcaaaacagtttatggatgcacacggaatgtttgtcaatacattcaatctccatcattaagatgttagcaaatacgttaatgaagtctactgcttggtttcagccaaatacactatggttaatgaaatgtactgaagaacaaaccagagaggttatgattaatgaagtctactgctaggtttcagctatatatgtcagaaaaagcccgagatcaacctagaagaacttaggaaatgaacgtgtaattgcagtaggaagaaggcgaacctgcaaagcagtttcaaggtctgtgggtgaacaatcacaagaaaacgttctcatataaggtccaagtcttgcactaacttcgactctcttaccagcaagcatatccataagtactgatggcttataaccaaacataccaatttcaccagcaattgttgatcccattgaacatgaaatgtaatcactctcggggagttcagatagtcctccatatgagaacccggtaaaaagaacctgtcagagaaaaaggacaatcatgaagtgacgagctttaatccattgccctatatagaagcttatacacaagcatatcaaattattgtagctctcagttaatattgcacctgatcgtccaagaagtctgtggacttgtagcaaacttgcattccatttgataatgtcaattctgtaactccaacttctggatattcaagctggtgcgtaatatcccttcattgaacattagtaacagatgagaaataagaaatgtaaaaacatacgcacgtcagttgagctctgcctacttttagtttttaaaaagagccattttagttcactaaaagacttcctaactagtcagtttctataagaaatagataataaaacaaaggtatttacttttgaagatctatactcggcccagagccccagacaatctctgaaacctaaagtcaatagaaccaatatctaaaagtaatgaggctattaagagtgggtgaccttggcctttgcttgtcagtgaacctatagttacagttcggggcttaccctggagttggcttctcactgacaatttcttctggaatgttttcctcatcccatggagcaatcatcttttcttcttccagactattaacctttgagacaacatttctcatatgatcaatagtagcagcagatttaggttccattgattttatcacacagccgcatgatgttcttaacttttcagagtatctggacacatctgacgccgatatttctgcatcagagagaacccaatataatttatacgagtttaatagtgaaaatggaactcgactacattataagaagcgtatgcatgttctcacggggtagaagagtcttctgaagttgtgcttcgtattcaatcccaataacaggttccttgtgaaggaaatgctgcaagatgaaacacatatataaacaagattttggtagagggggaagacaaaaagctggatattaaagttcatcacatattttacctgtatatattcatcccgcaagctagttgattggacctgatcgcgttccagataagcagattcaatctcggacatcatgagagcccgaacaacagatatttcacgctctgagaacccatgaaggcgtaccctagcaacctaaaacacgagaaccaatgaaggggcgggacaagggagtgacaaagacttggacaagagggaaaggagaagagacctcgagaagcatagactctagggatgcaagagttcctttctctttacaagacgaactcattatataggccttcaaagggctcaccaggacatcagcagcaacagaacacgcaaaaaatggagggtccttcctacgagatattttgaagagtctctggtttagagcatgtagaaacattgattctgcaagcatatccctataatctttcactgtcttcagatcacttacaggcatcttatagctgatcattactgcagactacaagaaaaaaaaacacaaaagaagcttaggagttgacatcgggataatacaggaagacgtttggagagttaaatttgacttaccccagctgcctctgactcaacaaagcaagaaaaccgcgtctcttcatgagaaggaacaggaaacactggtatctgtggaggctcgctacttgatcttttatcctcaaaatgtgtctttatcaaatcaactacagtctagaaacaaggattatcaacaaactctaacagtacaacataatcatagtcataaactaaaatagtagtacctttgtatctggaaaatctccaacagccacaactgccatattgcataaatgataccacttctggtaaaattgcttcacagttgcagcaggaacagatcgaatcactttctccaacccaatgggtaaacgttcagcatactgcagttaaatgaaagtcttttttaagaaaacattggcctctctcttaaactagacaactgattaacaaaagacctcacatacctttgaaccttccatcatcagctgccaatgtgaatcttgcatccttccagtagcattccgattccctcggtattcttccataacagcccctctttctttctctaaatcttcctttgagactcgaatctaaaaacaccgtgtaactaatttcttatggaaagaaaaaaataaagtaacaaaaaggaggagacagagtcacagagacattacctcggagctaaactctgctaaaatggaaatagcctgagataacaattcaggcttatcaacagggacaaacaattcataaatagtctcatccgctgtagtcattgcgttttgacagggcccaaactctgctccaatgctctctaagaacttgacaatatcatgatttgtatatctcgttgtagcactaaatgcaagatgctctactatatgagcaactccacgctgatcctcctcttccaaaactgaactgccaataaaccaaaaggtgtgtcagcatcatttatagcgcacaattctgtattatcgaatatatcaatgcatgtcacaaatctattcataaaagataacaagaagaatcattaatcaaatcaaagttggatcaacactgaagagtgaccaaataaatcaacattcgactcaatttccagtaatttcaattcataagttcaattcaattcaaattgaaaccaaatgtggccaaaataaaaaaagaagaagaagacatacccgactttaacggcgagagctagagcggctctcattcttggtttggagttccggcgaacatagtagatgagaccattatcgagtcttccataatcagccccgaatggctcaagctcgttaccgagttcttgttccatgtccacactcatcagtttcagcgacctgaaaccttgtttcctcaacaccttcgagctctctcccgctatcaaatccatctctcactctctctctctctctctctgcctcactctgtcaaaatcaaattcgtttatcaatagaacacgaaaacaaattcttctccctatagagacggcacaaaagtcccacccttcgagatttgttcttcttatgtttgtttttttgccttgactagtatctttctcggtttgcccggtatatttggttcaaccagcgtcggtttatatcaagtttttgctaaaattcaatcggaatattccaatttatggttctggatgtgacaacaaacatcataaccggaactacattagtttactcaacttccataacatagcgctacaaacagatttgtccttactccttacagaagatcaacaaagtttgagatttctagtttgatcattcaacaaaaaacttccgataaaagactcacaaagttttgattccaatcagacttttagcgtttgaccactcttggagactttctcagcaaccaacttgatctcacgaatcctttcctcaacaagttgcttcagctgctgctcttgatccggtttgttttcatcaacttgaacattggtattagcctcttctccgtttacagacttgaaaaccacaaacgatgcttctggctcgaaagagcttggaacatcaacgacttgtttctttggagtttctatatcttttcccagaatgtcggttctcacatggttcgtgatgactgatgtgtaatcttccatgtacttgtcaataggatcaagagcaaggtatatcaaaatctcccagcatttgaggaactgtttcttgttgatcttcagagattcgcggactttctcaatggcgttcagaggcggggtgaatcgaggtatctgagctttctttgatagctttccttttgtgagagtctgaacagctgaatcaatgtctggtttgattggatcgaaactgcgcaagcggtttatgtctatgcaagtgcggatgtgttggaacttttcagatggctcctcaactgtcaaatcgtaaacgttttctgttatggccacgttgtttactacctccataagatagcttccgagtccttttccttggaaggatggtaagaccaagatctgaaatcaaaacaacgaatcagcaaaaacagtcagatcaaaaagattgtaagtaggattgagatctctgaggaatatatttaatacctggctgagtcgcatccgcagcctgtcaggataacgatagaacttataaattgcggtaaagcccacaattcgatacaaaggatcttctttttcctctttcttctggattaagagatataaatgccagtcaggatcagtgacatcaatcggattgctgcctgatcaaaagaatgagccggcatctcgttagtactaagttactaacaagagaaataaaatattcaagatgacttaaagggtaggtgggttattaccatcgacaaaaagaagaacaaggggtaccaatcggctatagaggagtccagcatttggagaaccaatttccatccgtataacctgaggataatcaacctttataagttctatttgaagctgaaaacatctcaaactaatttgctcaaacttattaagactataggatacatgaatcatattaagcaaaaactacctggggatcagaaggaaccacttcagcattcttgctgcttccatctgttgctccagcatgcattacctctccattcgagaccatatttctagaacaacaatcaatgacaaagttcaacattatattcagagactacaaagagatctatcgtaattaagttgggaacaaatttgagatggtatgaaagcaaccagaaggtatgcagttatgcacctgataaaatctctctgtgtcgaaaaggtttgcagaaactcatccttggtatcaacaatggtctcagcaaatatgttctgggtgggtgaaatgaaacagacaatcagaataatataatgagagcaaaagaagcatgtgtccaagttgattggtacctgtaaagcagatttgaggtccgtgatgcctttgtctcccttcaaacacacaacagaaagtaacaggatagtgatgattagtccctttaaaagccgtataaaaccaatccaacgaatagcaaatacaatcaacacttacgttaatggtgctctggtatgtgatatcagcatatgaatgtaatgagatgctattgatccatacatttatctgacatcaataaattgtggacaagaatatgtcagaacagaaccacaacaatgcgaaaccagaaatttaagaaagagcaaaataatctaatggtaggaggccacattaccttcaaaccttggtaaccataaatcttgccatctccatcaaagaaatcattcaagtcaactggcttcacgctggaaatatcagaggaatcaacttcctctttgcttgaaactagaacatcacccatcacgattaccaaaacagaaaacaaaattatgtcacagcaacctaagacacttcacacagaaaatacttttacaactcattgaacaaatatcaattggaagaaagataaaacacataaatcaacagaaactcagtatacagatctgctctacatgttcaataactgaaaactaccttttgaaagcaataaagttcgccggaaaagccaaaaactagaaaaattgaagtaaggccaactaatttcaccaaaaaggtcgaaagcaggaaacgtaaccctaattttcgtacgaaactatatccccaaaatcaacttcaaatgatttaaatcaaatacgcaccgagataaattttgatgcactcgttagcctcgacaccagtatctgcacataagaaaaatcaacggattaaagaaaaatacgaaatcggagctgggaaagtggtaatcgcgagtaaaggaaaacaaacaagaagaagaaatgactcaccggcgggagaaaatccgacacggcgacgcttcttaggctcggtacccggaccggcggaggcttgctgcttctgaaccatggagtccccggcgagtgcaaggcgggaagagagtgagacaaaggcgggaaaattggagggttaatggaaatgcggagagagcgatacacaagagagtcagtaagcttgtggctctctttatgtaatttttactgagatcaatagcagatggagaaatacacaccacatatgacttagcaaggcctgttaacggcccaaatgcaagaccaattcaagtttgtattattaggtattatttatctaattaacgaaatatcaaatgagggcgtttggtctagtggtatgattctcgctttgggtgcgagaggtcccgagttcgattctcggaacgccccatttgtattttttatgttcacactctttttgccactctttttgccaaatagtccatttttcccaaaagatccataactttaagaacatgtaatcattaaccaaagttagttattcttggtgaatctagttgactttgggagaggagaaagaaccgattttagttattcttccccattattgaagtctagttctcggccaaatattcaacaacaaaaaattgactattgtgaaaattaggcttgttttgaaataggtctaacttaagatattaaccataaattcggttattgtattgttgtttggtacaatgtaaaccggttactaaaccggaacactctacatataaagagtgtttcatgtaacagaacaattaagaagaataacaaatttttctcatcttcttcatttctctgaattcgttcatcaactattatggtatcagagtgatggatctcgaagattcatccgattcaacctaaactctgagtatcttcgagctcttggatcttccaaactcgttgattctttgtttcttcaattttctacgttttctggaaaatttcagttgtttagagcttcgttgatcttgcgatggtttccgtagagaaattgcggcgtcgtactagaagatcgagcaaaacttcagctgagaaaactccagatcgtgttcaagcttcaccgattccaccgattccaccaatttcgaatccgtttcaacaaaatttcaattcaaaaccatcgatctatcctttaccacagttcgacttctcggatgctcattattcgccattcgcgctctcaaatggtgagtcctgggaatacacttgtttctgaggtacttgatggatctaatttctcttcttggaagattgcgatgtttgtttctttgaacgttaagaataagattgcttttgttgatggaactttaccaagacctcctgaatctgatcctagctttagagtgtggtcacgatgcaacagtatggttaaatctaggatccttaattctgttacaaagcagatctataagagtatacttcgtttcaatgatgctgcagagatctggaaagacttggatactagatttcacattacgaatttgccaaggtcttatcagctaactcagcagatttggtcacttcaaagttttgctttcaatgatatctctttctcaccttcgactttatggttactatgttctctaacgtcctctagacaagtgttatcacaaaatacatggatcatagatagtggtgttactcatcatgtttcttatgataggaatatgtttgaaagcctatctgatggtttaagattagtccatttctaattttctactaagatatattttttccaactcaaagtgaaaaaattgcgaatagtataaatatacaattgtttattaaatattgatgttcttaatattattacataaaaataattttttatatgtaatagtatttttagaaaatttggtttctctttttttttttaataataaaactaaacagtctctaaaaatttatattcggtttgcttaatgttaattttgttgttaaccaaaacttcgcacctcccttacttatccaattatcaacatttaatatttgtttacatttatacaattatccaatttatttacagcaatttttccgaattagtattcgactgttattggtgaaattcgagctggttaataatatttatcaaaaataagtttctataaataaatcaaattaaaaatgtttcttattttaagttttttgaccgttcgcgtgtcatgttacgactaccggcgtctatggagaaatcaccgcaaaatttatagagagagtaaaacgaaagagaagaaaaaaaggaaaacgaaaaaaaaacgtttctttttccagagaggtcttaagagagaggagagagaaaaggcatcgctttgtatataagctaaagaaaagccaaaaaacaatctagaggttgggagaagaagaagaagaaaagagaagaagctcttgttatcccggcgttcttaaaacaacgacggcgacggtgacggctaagcggaagagcttttgttgccaatgacggactcttacggcgccgtctccgtcgacgttggaacaatctatcttggtggcaaggtttcattctttaacctttgaactcggatccgaataaagctttgatttttgtttctgggtttatcttaaacttgcttaaatctaatctttctgttgatttggggaagaacagacatgtgggcattgttagattcatttgtttttgtaaaaaaaagactcatcttttgtttgaatcaaatgttcttggagaaattctttgcttgtggatttgtgaaacttcttttattattatgattcatttccagatgggattattcttgggatcttcttcttctctctattcaaagatatcttcttcttattattattttgtattccttattctttgtcttattgccttttgatttttttatcttatagaaaaaagaaaagaaaatgccagctgtttttgtctaccattaaccttttgtttaataagactaatgcttctttattatctcattaagactcatattagctcatcttttttaaactgtcattccctttttattaaaaaaaaaccacaatgattagaattaggccatttctctttggttgttgatgatcaagtttttggttttgtttttttgcccttaaaagtagtaaagctgcacatggaaaagctttaacagagatgttttcttttttgtgtgtgtgttaatcaaagcatttcttttccacctaaagtcagttgtcatattcctatctttagtatacatttactaacgagaaaatagattcattgtttacaaacacatgttttatgaatatggagtagacaaatggtatggttaaaagtttagtttttttctgttggtttcatgatccgttacttttgttataacttgttggtttcttgtgttcaggagcatcgtgttaaaactgctagtggtgttgtgtctgtcattgtctatggagacagagaaaagccagcattgattacttatcctgatttagccctaaaccgtaaggctaaagaatctctataggcactaatgtaatggctaaatttattaatgtttttgttgtttcttcttcagatatgtcatgcttccaagggttattcttctgtcctgaagcagcttcattgctgcttcataacttctgcatttaccatatcagtccacctgggcatgaggtccaatattttagtttctctttttttaacttgccgtatgctttgcttgacgtgattacttactcacatgacttctctgttttcttgcagttaggagctgctccaatttgtcctaatgattcagtcccttctgctgaaaacttggcagatcagatccttgaagttctcaactttttcgggtaacgatggaatcccttatttttggcttattgaagttctcaacttttgtttttcgggtaacaatgtataagctttttgttcagccttggtgttgtgatgtgtatgggagtgactgcaggtgcttatatcctcaccttattcgcggtatgttcctatttatttttctcttctcattgcccattgcttcagaagaatactgtgtttatcatctcttctatgttttaaaacttttcagatgaaacatagagaacgggttcttggtttgattcttgtctcaccgttatgcaaggcgccgtcttggtctgaatggttttacaacaaggttatcacaaacttgttatattattacggaatgtgtggagtggtaaaggaatttttgcttcagagatattttagtaaggtgtgttcactgcagttaccattgctctctctctgcacttgttgcatttccagacttctcttatttaaaccggttgcaactgcttgctacaggaagtccgtggtaacgttgagattccagagtcagatatagcacaagcttgcagaagagtcagtgtttatctcttctgttgtttttctgtttcatcaatagattgattttactgtatcagtgattcacaccttgcacttttggtgattgtctcagctgcttgatgaaagacaaggcataaacgttttgcgatttcttgacgccattgaccggtaacacaacaaacacctcgaaatcctttaccttagaagcattcattcattcatggtgtcaaatattgacttttctttaactttatgcaaaccaaacctttgctcttgcaggagacctgacatctcaagtggattgaagaaactaaaatgcaggacacttatcttcatcggagatcaatctcctttctactcagaagctgttcacatggcagcaactttggatagaggatactgtgctttggttgaggtttgagaaaacgaatcctcatcctttgtactttacatataaacacatgtttggttttcttgctactaatagatgttttcttggaaatattatcaggttcaggcttgtggttcaatggtaacagaggagcaaccacatgcaatgttgatcccaatggaatatttcttgatgggttacggattatacagaccatctcttttctccgagagccctagaagtccacttagcccttcttgtatttcacctgagcttctctctcctgaaagcatgggattaaagcttaagcctatcaaaaccagaatttcggcggcttaagtgtgtgtgcactactgattcattggttctaattttgctgaggagaagaaatcttagggcttttgtagatatagaacaatactagggagatttgagaagaagaagacgaagaagaaaaattcaagccaccatcatataacacattcttttgtagtcagccgacacgacagttctcttgttaagatgccacaaaatgttgtttattatttcatttttttatacatatgtaaaatgttctgttcttgtgacattgtaacaattgttttgtgacgaactctgcagaagcaagtaataaaattcattttgcattttgtttttggttctctaattggccttacaagcacattgatttcaccaagttagaatctggtttttgcttaatattgatatttaatggtttaacagtcttgatcctgaactatttggatcatcagattgaaactttttagtctgaattgaattgtaaatggaaatggagaccaatccttctttgcagaagccgtaagttatatactgatataagatacgcataaggattagttgcggttgacgaaaacatagtccctcatgaaccggggtaaaggcgaagaatgcttcacttagtctgaacaagttcaatgctcctcgatgtttgtcaagcccgtaaaatggatgcagacaagtgtaaatccgagccaaacccgaatacaaagtagaagaagtgtataaactcttggataactaatgattgaataataacatcaaattaaggccatttcttgtattgaacatcgtaagatgttttgtaaattacaaatacaacaaagctcacttacctcagcacctctctataagcgaatggtcagaaagtttttcactttcaaaaccacagaaacaattataacaacaactttatatgatgtaatctgaccattccgagatgaatgaagtatgatccatcgattctccaggacattcctcatcatgaatcgttggcttctctttccctccgacaagtctcgccggattcccaaccgcagtacctcgacaaggcacgtcaatcagcacaacagaaccagctcctactttagcacctgcaccaatcttcacatttccaagaatagtcgctccagctccaatcaaacaaccgtcaccgatcttcggatgtctatctccacaagctttacctgttccacctagtgtcacatggtgaaggattgaaacattgttcccaatcaccgctgtttctccgactacaactccggttgcgtggtctagaagtatcccttttccgatcttcgctgctggatggatatcaacagcgaatacatcggagattcttgagtgtagagctaatgctaatggcttccgtgattgtgtccatagcttgtgtgatacacgatgcgcctaattcaaattcaacaaagccaaatcatgatccgaaattcgcataactgaagaatcaacctaacctaacctaaaacaatattcataaatcaaatcgcaagatatagaaattgtggattcatcagatcaaatgatgaagatttcacctgaatagctaagaagcctttgtaattgaggagacaatgagagaacgagatacaagcaggatcacgaacacgagcagcgcgtagatctgcgacggtggcgttacgaagagaaggatcggaggaaaaagtgtttaagaacagatcgtataaaagtgtggataaaagcgttgaggaacaaagcttgtttcctagatgaaacgagatagatcgttcaagagacgaatgagaaagaatcgtcgaatatagatagctagctaaagctggctccgcctcagcatcacggcgagcttccgccttgatctgtgtccataatccggcagcttccgcatctgcagctgccgcagatatcgctgctgacgctgcttctgcttcatcggattgggtaacggaagatagtttctcctttgatggagattgatgtcggagttctccggccggtggcatattaacgcggcgataagattcgatttctatctcctcctacctataaaagttaattttcgagacgctctttaatcgtgcggaaatttttaaatccatagattaaagacaatgatagtccacctggtgcgtgattaacgtgatttttagaaaataaaatcggagccgtcagttttatgctttatcaataaccgttagattagatttatctttccgttaatcgacggtggtgattctgccgacattcttaccaaactttttccgtaacaaatttttgatcaaaaaaaaaaagaaactatacaaattaactactaacactacaaatttgaaacgtgaataagtgggttacaatccaattaatttaggagaaacaaaagccatatctttgacctagtcgatgtaggtttactccggttaaccaaatggtctcatcactttgagtgttgaagtgaggaaagtataattactcttctctactttgatggtaacaacttggtctcgaatagaaggaactagcacttgtgactttctcttgctcataaactcggggtcaccgagcttctgtaactcaagatggcgtcgttccccattactgcatgtgttccatgcataatcaaaagtgctcaaaagcatcccttctgttgcagcagcttcctacttaattagatcccatctgataaatcacggtaaagcagagaaacaatcacatgagttaggatcaaaggtgtatacgtagcagaccaactagagaagataagaagacatgtatttactggtgcccatctataaaaaactgagtatccttccgagaatatgtcctcatataaacccgagggcaaatgaccaccgcgtcttccataatcctggagtcttgattttacgtctacacattgtccgacatatacaccaagaacattattatcaggatcaaagttttggccttggtcttgaccgatgacgcctacaccgagctcatacagacccgtacaacgttgagggggtaagtcctcatgtctgtatctacggaccctttcttttctattattgaaatctttccaatcattgtgtcttataagattccgccatttggagaatgcgatgtcgtgtatagtcagcttgtagtcttctctcttgaacatagtggggacggcggaactgaattcctttccgatcaatctggtgatacattatgaccattaatttaaagcctgaaggaccaataatagtaagaaaaaaaacagaggataaaaatgcaacaacattgtgaatagatgagatgataagagacctattgttcaagagctgacttatccccggcataatggttgtgcttttttgcgtgctaatgattgtgtgtcgtatatggttaaacttcaacttcgccatcttcgataatagaacaaacgacattgtcaaacaaaataaaacagaacaaaacggttctgctacagaaaaataatgaaagaaggcagctctgatatattacgatcgtagatatatggaagaagcgaagggaagttgaaaaagaaatgggtcgtttacagtttttcgcatcatggacaagtaacaaagtggaggcatggcgggaaacgggtctatgtatttttaaatctaaaaacatctaatgtaatgcaaagatgcaagtcaacgatgttaatcaaaactgattttaaatttataaaaaatgagattgtgagtcatccagtacagatgattgttcagcaaaccaataccgaaaccaaaacggttttggtacaaacaattctggttaggtaacaaataacataaacaagtgatgcagaggttaggtgattctcattcccttatgctcttcacatctcttacgtccttttaccggagatctctcacagatcaatccattgcctaatttaactccacaagctacgttttttgctgcctctggctgaaaatataccggcgaagtatcgctggaagttttctccttatgttgccaacaccttttgcttcctttaggagaacttcttgtgcaaggtaacccattctttgttgtagcttcacagaagcgagtcaaagcttcttcttcgattgactcggtatgcgattcgggatcaggtttctcgtctttgacggttttctcacggtcagtttggttaagaagaaaaagaaaagcattgatcctcatgcctttatgatcctcacatcgttttcttccaggaacaggtctcttattgcaaggttccatgtcaggtaagatcactccacacacaacatcagagtctttatgattgtgatgatcttgtccagtgaaaatctcggactttggcggtgtctgtttttcgggtgaaacacggcaaactctctgtcctttatgctctatgcatctctttctccctttgactggacttctaatgcaacagccaccatcttcaagtaagactccacaaacaatatcagaacaagaaccatcaacctcatcaaatctgtctgaaaccggttgaggtctagaccgggtgagtttgagtattgaagtgaggaaattattactcttctcttcatcaacatcacaggttagcttcctctcttctttaagcacatgcttctctccttttattctgataccaacttggttccgaagaaaaggaaacagcattcgagatataccggactttctcttgctcataaactcgcgatcaccgagcttcttaagcaaatcaagctgccttcgctccccgttacttcctttgttccaagcatagtcaaatgtgctcaagagcatcccttctgttgcctcagcttctctcttagatcccatctgatacaatcacatgagttagatcaaagttgtatacttagcaaaccaatatagaagaaaagaagaaatgtatttactaaccggagcccatctgtataaaatcgagcctcctttcgaaaatatgtcttcaaataaacctccagtaacagccttaactggagattcaatagtttcacagtcgttaaggttgttaacattgcgcaaatgagcaccggatcttccataacgctgaagtctagacctaacactttcagcttgtcctagatatgaagcaagaacaatatctggttcaagctttcgacattgttcttgaccgatgaccgctacaccgagctcatacagacccggacaagatttacgaggtaagttctggactctgtatctacctacaccatcttttccgtttttgaaatcttcccaatcgttggatcctataagtacctgtgcagcatcaaactttacacaatcagataaaactaagatctaaaaccaaccacttcaagtagcaaatgaaacagaattaggctaattagatatacatatagttagcgaccaattctaacagaaatccagagaaaatgcatttgggacaaagcagacacactaggcattcaaaatgggatctttacactgaaatcctggaaatggaagatcagatttttcgattcaactgaaaatctgagaattccgaaatgggtttcagagaaaacacaagatcgagcgaaaattctcaatctacaaatcgagaaagagaaagacagaggacctgccacttggagaagacggtgtcgtgtttagttcgtttgtagtcttctcttttgaagacagtggggacgacggcgaaggaaacgccgtcgccgaattccatttcgataaaaccgatgatatagtgtgaccgttaaattaaagcggacttggtcttttttctcagtgctcgttaatttagagacaccaccgttaaaaatgagaaaagtttttctcccctccaaaaatggatgtttatccttccaaaatggatgatttttgttttattctgtccgaaggaaaagtttcaagttaccgttggaacggtgaagcttcttctgtacggtttattagttaccgttggattttttttttttaatctacattagtcaatgttgacaaccgtaattagcataagggagggaatctacattctttaatgagaatacttaacttttcaattggtcaaattttcttctatctttgggatttttttattacacttttacttgatttggcaaatgttattaccaaatatattgatgagaaccagaaattggtcatgtgatattcgttttcaaccaatcttgtctatcctttgttaatcattagtattttagaataaattgaatatttacaaaatatgcgtaaaataactcttttttaaaaaagtaatgtcaaagacacaaatacttatcaaattaatatttgtcatgttttataagaaaacacatttaatttatgttgttgaatatgtaaatctgttcatcgggtatttctacccaccggattgtggcatttggttgtcgacgatccgcgtcaaatttcactttggaagttctccaaccgttatatatagggagaactaatgttccacaacatctcacaaatgtggtcattatcttaacacttaactcatgagatatacttgttttaatttgatggcttgccctaaggatgctaaccgcgttgaagctataagccaatcaatgtgtctatggaatgtcgacaagcggctcacctatcccctaccatctaaggaccccgtttccgaagccgaaaaaaaaagtaaaacttaaagataacaattctgataccactttattaaaaaaagaaaaaaaaaaactgattagtgtcactttccatgctgccattaagtccaaaatgttgttttcacccttttcacttaagtaacagtatatatttactaaatcataagatctcaaaattgtttaatttctaagataacataagatatattcgattgcatcactagactttgatttattgaagcaccttttatgctttaataaagtacaaatcatcttttctcaacttttgtttttcactttctccactgaaatatataaaaagcaacatgaaaagcatgcaagtgcaacgttcaactccttcattataaccattctaagctaatttttactctttttcttttgaaatgaattatgagaaccaattctataatggttcttttgttataaaagaagaaagttggccataacttgtccatgaagaaagaaaacagtcttattctttcactaattctaaaaaattaaaatcaacaaatttgaaccaaaaaaagaatcaagtatcatcctttgacacaactctcttggtttctttttgctctctttagaataaagcagagtactttgtgaatatttctttattctttttattattcttggaatttatttaaaatacaaaaaaaaatacagagacaaatagagagaaagaagaagaagaaagaaactccaccaatcatataataataataacacaccattgtctcttccttcaaacagagctacaaatccaaaatacttcttatttgtcatctttctctgtttatattttaattgtttggatatttgcttttatcttctaccaaattcctctgattttgtcgaagaaattagtagctgaaaatccaaaaatcggacttacttcatcagctttttggccccactttacaaagtatgagcaagtttttcttgttttctacagcaaagcaatgctcacaccattttcgtggagcttaaagtcttcaaacccaaactaaaagctttgaaatttctctgcaagaaacagagagagagatctagggattggctattaagagagagagagtagagtactacactattggttcctgtgctgttgtgttttgtgcatctgttcttgtgtttctcagataaaatattagtttcagtctttcaaagacattgaatctcacacacttactaacacacactcacacacgcgttaatttctcaactttttttctatttatttcttttagcttctagggtcacttgagaaagcatcttggattgcgtgatacttccactttctcatttcagaagaaaaatgggtttagattgagtgaagtgttaaaagtatatgtaagcaagggttgaagaagaagttctttcaatttctgtatttgtgatttccttaatcttagctagagaatgaagcagaagggttttaaagagagaggtgttgtagtggggaagaaagtaatggttgctgttagagcttcaaaggagatcccaaaagcagctcttttatggactttaactcatgttgttcaacctggagatcgaattagacttcttgttgttgttccttctaattacacaagtacacatctttttcctcttctcttctttttcgatttggctacttattggtgttgagtggtgataaatttggtctctttggtgctgaatgatttagttagaatggtgtaaagatttaatctttatgtctttggtttctttcaggtaaaaagatttggggattttcgaggttcactagtgactgtgcatcaggttatggaagatttcttgctggaacgaattcggataggaaagatgatattcatgagtcatgttctcagatgatgtttcagttacacaatgtttatgatgcagagaaggtagagaaactcacttttattcatgtagatttaaaaagaaacagcttttttggttaatgagattataaagagttttgtttgctttgataataatgcagataaatgtcagaatcaaaattgtttttgcttcacttgatggagttattgctgctgaagctaagaaatccaactcaaactgggtgattttagacaggtaaatactatgcagatatacacgtgtgtgtgtgtgtgttttgaaaatgcatagtttagtgattcttgaccttttgataattttaaaacaggggactgaagtatgagaagaaatgctgtattgagcaattggagtgcaatcttgtagtaatcaagaagtcacagccaaaggttcttcgtctcaatttggtgaaaaatgcagatacagagcatccagaagctatatcaaggttagcttcaaagtctgtcgagtctcggagaagctcaagaactggaaaaaagttgagggaaccgtttgtgactccagctagcagtccagaccaagaagtttcttcacatactgatatagggacttcatcaatatctagctctgatgctggagcctcaccgtttttagcttctcgagtctttgagggtctcaagaaagagaatttgtgggtcaatgatggaagcaagagtttctttgaatccgattctgactcggatggtgaaaagtggagtcctttatcaatggcatcctcatcttctcatcctgtgacaacagctgatcttctgagtcctagtggggatttatcgaaagctcataccgaaactccgagaaaatcaagatttgcggttcttaggctcgctttatcgaggaaagaacctgaagcaggaaaggaaatacgtaaacctgattcatgcttaaacaaaagcgtgagggaagtggtttctttatctagaaagccagctcctggaccgcctccactatgtactatatgtcaacacaaggcacctaaatttggaaaccctccaagatggttcacttacagcgaactggagaccgcaacaaaaggtttttctaaagggagtttcttggctgaaggtggttttggttcggttcacctaggaactttaccagatggtcaaattattgctgtcaaacaatataaaattgctagtacacaaggagaccgagaattctgctctgaagttgaagtcttgagctgtgcacagcatcgaaatgttgttatgcttattgggctatgtgttgaggatgggaaaagattgcttgtttatgagtatatctgcaatggatcattgcattctcatctttatggtaaagtttctactaatggtatacaaagaagaacattcttgttttttgttgaaaaaatgttatagatataaaagtttccataggtatggggagagagccattgggatggtcagcacgacaaaagattgcggtaggagcagctcgtgggttgagataccttcatgaagaatgcagagtcggttgcatcgtgcatagggatatgcgtcctaacaatattctcctcactcatgattttgagcctttggtaaaaagaatgttaaatctttgctcaagctctctctctgtctttccggtttgtgctaagcttgaaacttttgaacattctaggttggagatttcggactagcgagatggcaaccagaaggagataaaggagtggaaacccgagtgattggaactttcgggtaatcttacgccatgatcttgagagatatattcttcttgatttacatgtagaacacaataaccaatttctgtttaacttcaggtacttggcacctgaatacgcacaaagcggacagattacagagaaagcagatgtttactcatttggggtagtcttagttgagcttatcacaggaagaaaagctatggacataaaacgtcctaaaggtcaacaatgtctcaccgaatgggtaaaaccaaaaccaactacagtataacaaagttttagtctttaaagctctgaatgctttactaagaagaaacatttttctgcaggcaagaccattgttgcagaaacaagccattaacgaacttcttgatccgcgtctaatgaattgctactgtgagcaagaagtttattgtatggcactatgtgcttacctctgcattcgccgtgaccctaactcaaggccacgaatgtctcaggtttgctcacatctcaaaaacacttacaagttaataacttacaatcgaaattttctgagtgttaatatttctttttgtctatggaatctgtgtcttctcattgaaggtgttgcggatgttagaaggagacgttgtcatgaatccaatatagaagaagcttcacaaggaaaattcttcttagggagtttgtacactatttagggttactattacagctttttaaatgagttttgcttttgtatatgtaaaaatttgttaatgagacaaagattcaactaaagtttgttgagatttttacatttcatagattcatggccggttaaagtctgaataattgaggttattggttgaaccgattggttgactggtcaaaattcaaacctttcagcggggcaagagggtttcagacagcattttgccccatccaccaaaaaatcttagaaaatatactatactatagagatgtcatgtctgttattttacaaatattatccctatctttgaaagaaatagaattggtaaacgcaagagctgatgggtctggttaatgggccagtttgagaaaaccagttcgtaattagggtttatatcaattctcaaatgacgaattggtgagagtgggacttgttcgaatgtgaagagacgttacaagggtatgtatgcctcagctttgatacaaagctgggaaaagtcaaaagcttaagagagttgatacgcaacacaacggtcacgtctttattccaacaacacacacatctcttagcataaaacacatattttccccaatttttctgccatatatatgattttagaccataataatttcatcaaaagttacagtttgacccacagctacagttgtcgcactccttgttgtagttcttctcgcaactataccacacacaaattaatcaaacaaacaaaaaaattagtaattaatatgatgagattaaagattagtcaaccacatgcatctgattctgatcagcatatatgcagaacaggccaaaatgtttttgtgtctactcactaacacaattgtaaacgtaagtcataagaagagtttattgaattttgtaccatgaagccattaaaggtaaagacgagagagaggatcaagggggttacctgcaagagtcaccacatttgcaggaggagccacatccacaattagaatcatcctggttagaatcagtcccatttctcttacttgtctttgattgattaacttctgtagtttcttcttcttcttatgatgcttttgtgatttcaaccaatgggaatggccactatttatagaagaagagagagattcggatcactttatacataatccaaataaatttacgaataacatcaacttgcccatcattttctttttatgttagatttgttccagcttcattcaagaaagtaatttaatgttagagttttagcaagacaacagagtatcaaacaaactaatagaaaacgtcaaattattggcgaatatgtaaaaaacaaaaaaagtcgtacacgcaagaagataactatcgcaattgccaatagtaaacggcagccgacccaaaaaagaggcaggaaaacttatttaatgagaaatattttcctctgttttgaaatcttcttgtggtcatttggacgacgacccaggacatggtctacgctcttctactacttattaatattatatatgagtttcttacgatccatatattacatcagatatccgttttaagatttttttaaaaatgttgacacaaaaaaaaagttttggacgactaagtgccgtcatcaatccattggattacatcatcaatccattggataacccttggtttgatctctctgaggtgagtatcgagtcgtgttatggatcccaaacattgccgcgtagcttgcgtagtaggcattggaatctcaaaacattgaaacttaaaaaactaagtttcgtggatactgatgcttatatgtggtttgaatcactcaaaacactgcatcttctctctgtgaggttctctgacgacaaatctgttcagaggcttttaagtgtttgtccgaaacttgaagatttagttgtgaaacgaacaacatatgtcaatgtgagaatattcagtatcaatgtgcctagtttgaggagtttatctatcgattattcgtgggcggtatctcgacccgcggatgtacatggatttgtgatagatgctccttctttgaggttcatgaacattaaagatcacttcagtaacttattacagttcgaaaatatgcctaagctagtcaaggcgaatgttgaggttgattgtgatctatctgagaagtttattggatctattacctcaatccaacatatctctttatgttctaaaaattcaaaggtaactaacccctctttaataatctgaaccaatgtcaaagattcaatcaaataaagtttttaattaccttgttttttgcttttattgcagattccttatcctagtggcacttccttcttctatcttgaacatcttgagctatgtacatgttctcaagattggtggaatttacttaaccgtatactcgaagacgctccaagacttcaagttctcaagctcaaattggtatgtatatggagtctccttactttgtctttccagtttttgaaccgccttacttctaagttgtaacaagcaatatgctttcttctatttcacagggaaactgtgttcaatgtagtactgagctgatggattactggaacgaaccgtgctctgttcccaaatgtttatcgtctcatctagagatattcgagtggagacattacaaggggacaaagcaagaaagaaaagtggcaaagtacatactagcaaaagcgagttgtctaaaggtggcaatattctcttcagtatgtatagagaagaatctgattttcaagaagttagaaaatgtggacagaggttcaaaagcatgtgagcttgtgtttcaataacatgttttcttttttgctatcttcaacaacatttttcattgttaacatcttctgaaacaatgatttgactatatatattaagttttcgatatgtctttacaaaaatattgtggctgtacaaccaatcaacaccgaagaaagaaatattcctcataataaatttaaacttatctttatgtaaaaaaaaaacataaaaaaaaatcagagtttcatatctctccttcttctaatctaatgagccgcctattcctcaactcttcagccaaaaattagggttttcatattcctccttcagatctaacgacttggcgatggaagctgcaagatctggaatcgaagatgttacatctcctgataggatcagccagttacctaacgatttactttttcgaatactctcattaatcccggtaagcgatgcaatgtccacaagtttattgtctaaacgttggaaatctgtgtggaagatgttgccaacgcttgtatacaatgaaaactcttgttccaatattggttctcttggatttgaccaattttgtggtaggtccttgcaattacatgaagctccacttctcaaaaccctaaccctagaacttaggaagcaaactgattccttagattcttccatatttccaaacattcattctactctccttgaattctcaatcaaatctactggttatcctgtttattacagtactatcagtttcccaaacaaccttgatgtcttccaaacactagttgtcttgaaactccaaggcaatatttgtcttgatgttgttgattctccggtttgtttccagtccttgaagagtttgtacctcacatgtgtgaatttcgagaatgaagaatctttttccaaacttttatctgcttgtcctgttcttgaagacctcttcctccaaagactttgtagtgtggggcgttttttgttttccatatcagtcccttctctacagagattaacctacactaaagaacaagcctattattctaacgatgaagcaatactcgagattaccgctccttctttgaagcacttaaacatcttcgatcgcgtaggtgttttcagttttattgaggatatgcctaaattggtggaagcaagtgttagagttaaactgtcaaagaatgagaagcttccgaaagttcttacttcagttgagcatctttcgctagatctatatccttcaatggtaacatctttcttctctcgcaagctaggttttgtttatctttgaagatagcatttgctttaaactttgagtttttgcgtgcaggtttttcaccttgatgatagattcatctccaagcagcttcttcatctgaaattagacatttacgacaactttcagtcgaatcttcttctgagtttgttgaaagatttacctaatctacaatctctcaagctcaaccatgtaaactcacaatttccattgatattaatctgttttgagagttatgaattgatctaacccaatgtcttttatgtttctcagtcacatcccagctataatgtcgaagatcaaccgtgttcagtctctgaaccaagctctgttcctgaatgcttgagcttccatctcgagacttttcaatggataggctacgcaggaacatttgaagagatagcagctgcggtttacgttctgaaaaacgctcgttgtttaaagaatgctacaatctctctgtattcaaggggcacagagaatggtttgatgatgattaaggagttggaatctatgtctaaaggttcaatcatgtgtcagcttttagttaaattttaaaattctctccatgaaatacatcttggatttgaaccttgataattaaagtctcaaacctttaggtgtttacagagaaacagagtcgatggaacagagttcttatgagtttcctttttaacatactgtttcctattttactctctctgttttctctattttattaattaaaatatcaagaaaatatttatattaatgttaactagcagatcttatataagagtcgaggattaaaggaaaagcaaaactagggttttacttctctgacgaagcttttctttttctactagtcagctgaaaaattagggtttttttcccctcctttcgtatcttacgattgggcgatgaaagctccaagattgggaagtgaagaggtttcatattcggataggattagttacttacctgatgatttgcttttacgaatactctcattcattcatacaagcgatgctatctccacaagcttattatctaaacgatggaagtttgtgtggaagatgatgccaacacttgatcttgatgaagattcttgtcgcaatattggcacccttcgatttgacgaaggttgttgcatgttcttgaaatcacatgaagctccggttcttacaagtttgaatctcaaacttatgacaccttctcatgatatagatcgtcttttatcaaatattaaacccattcttcatgagatcacaatcacttcttataggtacagtactatcagattcccaaggaatcttaacgtctgccaaacacttgtcgtgatgaaactccaagacaaggttcttgtggatgtttctttcccggtttgtttccggtccttgaaaagtttgcacctcacacgcgtgaaatactcttgccgagaatctttcaccacacttttatcagcttgtcctgttcttgaagatttagatctcttcattggcagagttcactatgactgtcttaactcgtttactatatgggtgccgtccttacagagattatctatatgtgacgagtcataccgctttcgtagcacgacgtttgaaataagtgttccttctttgaaatacttaaaaatcgcgtgtcaggacagttgctttaagtttgttgaggacatgcctaacttagttgaggcacatgttgaagctaatcaacatgaaactaagaacctcttgagatttctcacctcagttgaacgtcttaaggttcactctctttaatggtatactcttagtttttatctttctttcctaatcatttagttattctgtggctctgtttgatgatggtttttctttctccggcatgcaggatccagatcttaccgatagaatcttccaccagcttctttatcttgagctgcatttgcacaaaagactcaatggggatcgaattctgagtttgctcaaacattctcctaatctacaaactctcaagctcaacgaggtaaatcaaaatgtcgcggttttttatattagcttaaatagctctcttttgtatgttctttacctaactcagatgccttatgtttccagagaaacctttacgttctatcaaggatcaaccgaatatatctgttcgtaaaccgaattctgttcctgagtgcttaaccttccatcttgaaactcttgagtggcaaggctatgcaggaagaccggaagataaagaaatcgctgtttacattttgggaaacgctcttcgtctcaacacggctacgatctctcgatatttcagctccagccgcttccgtcaccaccagaagaaggatctaaaaattgtggaggagttaaaatctataactaaggcctcaacttcatgtcagcttgtacttcaacagttcattgaaattaaatattcaatgtagtttaacatgaatgtaaatcattattaggttgaatgtgttattagcataagcctattgaagttttattttactctgcatctgaaacagaggaatctctttgatgacaagaaataaacatagaagttaacttgatagatgtgtttgtaatagtagacgacgtaccttgctactcaagttttgttagttttagggtatgtgaaatccaagaaaatcaatatagaaataataaagagaacgagcaacaaaagtaaagtgatattttaaaatatcttttgttttattgggatatattttaaaataaagtgctaattataagtttaatattcattcttcttaaaatacgtaaaccaatcaaaacaaaatatatttctatgtataaatattattaggattaggataagaaccgttgcagctaccttcatcgacattttacttattcgatggaataagttatgatgcatcatctgctgcggccgcagaaaactatttgatatgggagaaacaatggctcgaatggaaagatgtgaatggctttctctaatccaaagtggattaagcactgagattttttcatggatagcttatgctacatcatcaaaagaagcatgggaaattttgatggtgagatcagtaggtggtcctatatttcaagctagaaagcttcttgatctcaagaaagagtacaacaacacgacaatgagcgatgcggaaacggttcatgagtttactggaaaattattggagctagtgtttcgtatgaagtcttgcgggtggaaggtcgaagaaaaaatattggtgaagaagattctttcctctttgcctccaagattcgataaagtcttagtggaggttgcagaaaaactttctgttaatgtcattatcgattgcttgttggttcatgaatacaatatgagaccggatcaagagtcttttcaagaatctgtcattcagagtgttaatgtggaagaaagttttgaagcagaagctgaaatattatactctttgaatgacattactcagagccaagtggcaatgatggagagacaaagtgaagtgttgtcgttggtgcaaaagaatcaaaagatgctaatgcagatgcaaaaacaaatgatgatgttaatgcagcagaaagatcatgtgttagcacactccgaatcttatgaggaggagatgacaaaagtgatcgagtctatggagaaacactacttgaagaaaaagtagttttgtttatttttgtttggttttggttttttctttgtttggtgttcctgaaagttgattaattactgatcatggattcattcataaaattcgtctttgcataaattgtggacttcaacttttggtaattgtgagacttcttactcgaaacagagacttattatattttgtcacctcttaaaacagagaaaaacagagaagtatcgatttagagatcaaaagaatgtgatgtgtgctgttattgtggatgaagagcatttgcataatgttctaatttggtagtttttttccttcaataatatatgatatagtgagcaacatctttagaatatgtttagtaaatttttgtaaaacaaattgacctacctcaccaaaaacaaacttcattggaccagaattaagtagccattaggatcaaatcaacaataatatactatttatgtgatgaaatatgaatccccatcattgtcctatatgaatcaacatttaatatattttaattagtcgaatcttaaaaatgaatcccagtcatattatctttatgtatgtagaagaagatataatcaacattaaatagattattatagtacatcaacatgaataccccatcttgtcatattatatgtatgtgggatagaatcaacatgaatccacattcagtattcaaattagaaatgatcgtaggctatgactctaaagttaattttaatttatatgatgaatgcgagtacccccattatagattcatactatacattattttatatgatcaaatatgaatcatcatcattgttctcctatacttgctcttcattccgaatgtagcaatagaatctccatattgctttttaccaattctaaccataaacaattcatagataaatgcatgttgggtagtgctttgtctactagtaattaataacattatcgattacaatatttgagcaaatcaggcaatctttaaataaaaatatgtatacgatgactcttccgtccaactaatatattgaaaatattataagatccaaattatttcattatttatatcaaacaaaaacaagaaataaataagacttgtctttgttcatgtaaacaagaccactttgttgtttgtttctctattttacaaatttgtaaattatatttttgttatgtttctttccacatttttattaggtcatccaactacccacctccccaaaactattggaggatccaagtcctctctctctcaaccatatatcttatatttcctttgcaaaaggatagcctttattatttaatacacatagattccattattgttatggctacctcattctattctataaagcatacatatgagaagaagaagcaaaatatagactatgtgaaagataaatgaatatttcatatttgtgagacaaattaattagattagaattaacattttgtagctagtccatattagtgataaatttccacttataaagacatattttcctcttttgttttttatacgtaagcttgtcttcttattggctaaaagtagaaaacaccaacttggacaacatcatttaaattataaaaccctccaataaataaaacttggtttatccaatcatcttatttctctgtgctctccaccattttacataaaccccaaaatctctcttcatcatcatcattcatcaacatcatctctctttctctatctcgctgtccctccttctctttctcattcattgcaatgggcagaagatgctcacactgtggaaacgtaggacataactcaagaacatgttcttcttaccaaacaagagtagttaggctctttggtgttcatctagacaccacaagctcttctccgccgcctcctcctcctccctcgattttggccgctgcaataaagaaaagtttcagcatggattgcttgccggcatgttcctcctcttcctcttcctttgctggttatctctccgatggtctcgcccataaaacacctgaccgcaaaaaaggttacaactttgacatattatgccactttccgagtttttttttacaataggatagtgacgtttttttattaatccaaaagttccgggtattaggcccataatcgatttgtatcggagatcaaaacatgttaaactggtcatcggtgggattggttttgccataaagattttgtacgtatatccaagtcggaccatttcctaaagcatgcaaccgctatatatataagagtagtcaagaaaatgatgtgtctataacgcgatctttagcctaggattttgttaaaagtttttccaaaaataataatttgtgtttccgtaattaggggttccatggacggcggaagagcaccggacgtttctaattggattagaaaagcttggaaaaggagattggagaggaatctctagaaacttcgtcgtcacaaaatccccgacacaagtggcaagtcatgctcaaaaatactttctccggcaaactaccactctccatcacaagagacgccgcaccagcctctttgatatggcaagtaattccaatcttttctctatacatgcatgacaaaagaatttaaactctttgtatcaaacttttatgtattaaatcaaaatgtttctgtatccaacaaaagtcacatcttcaaaagttcaaacagaatttttatgttgttttaaaagttttctttccaagtttttttttcccacttaaaatatcggaattttctaaaccaaaaattagtcaagattttaagtttaatctaagctttattttaataccaagtatatatgaacatataatttcttgtagaatccgaagaaaaaaatagaaaataatcttgaattgacaaatttttatattcaacaggtttcggccggcaatgttgaagaaaatagtactactaagaggatatgtaatgatcatattgggtcgagctcaaaggttgtttggaaacaaggattactcaatcctcgtcttggatatccagatccgaaagtatcagtatccggctcgggtaactccggtggactcgatcttgagctgaagcttgcgtccattcaatctcctgaatcgaatattagacctattagcgttacgtgaatctatataacacgttatgatcagtttcattagaataattcaaatgtttacatatataatatcttatcgatcctatctaatttgattttgatttaacgttagttactttgataatttcgtcgatattgtttttttggttttttcattgtgagattttttgtcttggaagttggatccatacatatttctgtaaaactttatatttaaggtatatatatctagcgctcataaaagtttcaatattcctattatacttttaataagaaagtttcttacgatagaattagaacggataagacaattttgtacatagtacaacttgtttgaagtttcttgttttctagttcattaaatatttcaagattcgtttttaaaaaaaatattcttttcgaaatgtgtttcaaaaatttagaatacttttaacatatctaaaaatttagaatacttttaaaatttcgtttttaacagaatactttcacattgttagttttctgttaataaaacaataaacacgagtttcaaacataatgtaaagataactttaagaactgatattgagtccacaagagctcaataatatttaacactgaatccactttaacacaaaaccaagggtctttctcagaattgttataattttgttgttggcgaaaaagaaaaaagaaacaaaaaggtcacattttttacatttctatatttagtgcaagttgtttaatagtgacactactattggaaatgacccaaagtgactggacgacaagatattatattatttatgattttgatatatacttcctcttttcacacaaaatttggtttaaaacattattttgtaagaaaatatgatcattttatatttccaatattttttatctaattttaattttaattctaatattttaatttattatttacgaagagaaatctatttaaaataacgaacgatatgtaatagagatttatatatttttaatatgtatgaaaaatgctagaataacatttttgtgaagagaatttaaaatagtcaaatagttttttttttttttgtcgattaaatagtcaaatagttaaatgacaaaattctgtgagagaaattaggtgaatggttattatgcccagacaaattaagcaaatgggcagtacggcaatcaaaatttatttattatgattttcaattaaactttgatctttgtgtaaatatattatgttacggaaaatatcattcctctcaatctctcataaatcaaattaatattttgttaggtctattttcacatcaaaaatgtggtataatacctaaaataaataagaaacatgaatattcactagggaagttcatttggtctaatggttaacgatcaaattatgcggcgtttcctcttgaagttcgacaacaataaattttgttacccgcacagtaaagattatgctatgagttttaaaaaaaaatgattatgctatgagtttagtcttgtcacaaatgatataagaacaaaaatctattcataactaattattttaaaattagaaacttatgatttcacaaatatcacccccaaaaaaatggaagttgaaaaatcctctcctaaaaccaccaaaatggcagtccaatatatgaacgtgaatcgcatgatcttaggtaaatatatcaatgtatttcgtagttactttaaaataggtatatttgtttctttatggggaaccattggctaatattgaagaaggattgggaacaaattagtaaatttttattggtgtgagtggtcccttgttatcatgtcaatacaccaataatcacttttaagttacaaagacatttcacccaacccttttggcgggtcctatgcttatcaatgactaaaatatatgaggcttcaaattatttcatttttactcaaaaataaaccaaaagtctattatatctttcaaagatccaaatcatgtggtcgataaaatgaatgtcaataaaatatcctatctagattttgtttcgacatatgtttggtttctattatacaagttatctaataaatcattttgtttatattataagctatttatttcctatatgtagtagttttgtagggaataattttctacacaaactgtttttactgtcgcacaaaaaatttgataagttgaagagctagatttttatagatttgtagattatatgaaatatttgttaagttataatatggtagaaaattgcgaatgagactttttgtaaattaaaaaaaaaatcgtggaatgagactccaacatgtgacgtagatcgagagagagaaggatgattatggttcctgtctcttaggagaatgtattaatttacctttcggacgagttagttgttgaattcatcattttcaagttatcatttctttagaaactatttctagcattgaatttttagttctaagttctaacaaccgccagatatgactaagttttattctctctgtgtatgtatcagtataaatgttattttcatatatacataaaagatagtattagactgcaagtaaacctgaacaaaattgatatatcctccttagcattatagtatttaatgtattagactatattctttggctcttttgctttgactgtttctttatgactcatagcataatatttatacactattgttttctgaatcttctctcatattaataaatttaataaattccacattgcaaaagctcaagagcatacttcataaaatgaaaataaaatttatgatatagatgaaataatgtacaaattatcccgacaagattaaaaaaatgatgtggatcagctaacccgtttatagcaaagttttaatgggcctatttagtagtatggaccaaccttatgtacggatttgggctcataaccagaccgattaaatttacttttttctaggactcctcttcaatggtactaattttgaaataacccctttatatatgcgtgtatctcacatttaaccaaatatttctgtttgatcaattggcacctgaagaattggaaacttgaaattttatttaacgcctgaaagcgtgttattgaaaactataaatatgtgcaataatacaagtataagtttaaaagaactgatccaatcctctcaaacgcagtattggctcatctgcagaaagcattatcgaaggaaggaaatatcagggaaagcttataacacaagaaccctactttactttaactttcgtccgtaacaagaaacaaaacagagttcaaaacggcttcatttttaagcggacagaaacctgtttaagttcattgtcgtgtcaaaaacaccaatcctgcaaaacccaccacgatcaacgcacgcatcacctgaaagttacaacaatatgatgaaaagattttggtttgtcaataagccctaaacatgtcggttgataaactcacttgcccaacaggtcgtcctgaactttctgactctgcagagttctcagacttttgtttctttgatcgctcaatgttcgtccacttgttgttgctatttattttcgcgatgtttatgcaacggcttcccctctgaaaatgtttcagataaacgcaaatttaagatatatcatacaaaagattgtaacaaccactaacgaccactgcttttgtacctcaccgatgttttccctagtagactcgtctatccttttttgtaacaaatttgcttctgctaaatccaaatccaaatgtcttgttcctaaatctgtttcgcaacacaaatcttttgcctcatctggaaatatccagagacgagatc

SEQ ID NO: 914 - DNA, 29605 bp, Arabidopsis thaliana
ctcgtgcattctcaagttgagaatctttcaaccacacagatttgttctgtttcttctcatcatcccttacttctaccaccaaacttcgtctttgcgtacttaacaagtcacttcttctagtgctatgctcaagactcttgtcctctatatccattgtcctttcatctcttgaaactattactaaatcatcacatctatctgtgttatcactacacactgacttctccatattattaaagcttattatcttcctttcttccgatttctctagattcacagtgctttccgctggtggttgcgccttagttttctcctccgcatctttacaagaatcagtttgaatcttcgctgtcctaatttttgtatcctgttaaaagatctagagattcttactccaaaacattttgaaaaccatcttgatcacagactgatatactcaaaacctttcgaaattacctgagtaactttgacctcaaagttgctaatcattttccgcacattgttcaaatttgaatctgacatactccgcctcattgacttccgtttaggctttctttccggtttgctcaaacccgtctcttcttgcttcactaacgatacactctcgggggttttagcctctgtaaacttctttctcggtttgctcaatcccttatcttcctgcttcactaacaatacactctcggcctctataagcttcttgcttggtttgttcaaacccttatcttcttgcttcactaacgatacactttcgagttttttaacctcgggaaccttcttgcttgaagaaacatctgaagaagatagttgaatattcgtcttctcgactgaatcttttacttcaggcttccacattataagatttgacgaaaccggatctctatctgcattagtctacatcaggtggaaaaatcagtgatctaagaaaaaatatttcgaatttttgtataaacaaaactgtatcaaaatgactactaatcattactttcagctttgtttcttgagacagaccaagatttgtctttgaactagcaacagccacgatgtctcgagattgcattgaacttaaagatgacaaatctctcatcacatcaagagcaagagcaaaaacaaacaaacatttagaaacacaacttaacaatgtaaaaaacaaaaaaaaaaggaaaattcttatttcttttcatagattaacctgaagcaatgcttttagatttggtaaaagaactgccattgacaagctcctcatgcttctttcgcaatgcagattgtctctttcaaaacaatcaaaacacagtaccaattggaatcatcaagattggaattttgcagagctcaatgaaacagaacataatgaatttgctttaccaagaaacgtatgcgatttcgatcttcctcactgagaacaaactgcattttcaattgaacatttccatagccattgaatgaaagtttctcttccaagaaaccactctctattatcattcttgtctctatctctacctccaaaaaccctcaaattcagaaaatctaataaaaccactaatttgatctctagagttgtaaaaagaacacacctttctgtaatatttggtttccattaacatctaacagagtaacaatcaaattctctcggagcctcgtaactggactgtgccacattgaatccaagaagaaacaataaactgtcaaaatttctcaaaaagttccaaactttagaaattcaaaaggatcagtagagaaattacaaaatgtagtctcctgaatctgaagtttgatactctagctttcccatagcaactgatacaagacgacaaattaaaaatttgaactttatcgagttaaaagcgatttgaggaacagatttcaagttaatacctttaatggaagtgtttgaagaacctggagaagatgtctgaacatcgataagaccaagaactgtggatttgaacaaggcaaagttcaattagtgcttaatgtggtaataggacaatgccccaaatcgaaagtttcttcctttaattctgttacctgaaacttgtattgttcctggcatttgtcagaggtatacacacgcagacttgaaaattcgattggttaaatttggtattcaaggattttttttagtggattttttttttgtatgtaagaagaaaaagagtgaggaaagaaaattttgtggattagatggaaaaatatgtttgtggttgaaattagattttgaatgtggagggaattgagagggaccccattactgtttctcttgatgaatttaattagttactctaaatgccaattatttgctttttgcctcatcccatgatacatcattagttatcagattaggtttttgttaattgtcgttttttgttaattttgttattttttatttatattataagtatgattcaatattaatattagttaacattctctaagtgcatgctttgtagctatgcttgcatctattggatcaatgttcatgtataaattatggtttgtaaaatgcttatttaacatcagtgtgtgtgtgcgtactatgtgtatatagttgatttaatttgctgtaacaaaaatagattagtcatagactagaccaaactgatgttttaaagtaaaagtagtttacatagtgattgttttttttggacagtgatattttgaagctaaagtatgtagattagtaattaatattgatcattataaaccaatgatacattcataaggatcttaatattaaaatagtgtatagtgaaaaaataattatatttcacattttacatttttgatatatttatgattggtgtgctgtactagctactcatgaccctaagtaataatgtagcagcgaaagaaaaaagtattttttgatgtgttgattcagacttaggtcaacctatatgtgttttttttaagtttgaaataaaattaattagatcattttttttggataaagggcttatattagttagataatctaatgaaaaaactagaagaaaatatgtgggcttgcaaatatgtcgtcgtcttaaaatgcaacacaaacgtattatcttcttcacacatgatctcttgtcttatatacgcattcatattatcccatatcaaccatctttaccctcatctttatattttgtgttcagtatattctcacaagcaattaaatccaaaatagtcaatttaaagcatttctaagaaaaattacactactattatgagcttcaaaaatatatttaaattttgaatgataccaaatactagacgtacaattttaaagctggtaatccatttatgattgagctaaattgtgatgatatgtatattgtataaagataaacacataaataaaagtacccttaattgattatattatttctccaacctcgttacacaatacagtactataaaacttgtaaatgaacaagaattacccacattatcgggtgactaatgttcgttccatcggaaaacaaaaacacaacaaactcaaaaccaaaatctccataaacatatatagagctattaattatcatattaaactctcacacactcttattataaaatgttttgactcctgatattagaccaactgcaaaaactaaactaatcactccaagatttaacaatcaatcattattatgattactataatctatatattactattaaaataaacctttttgtaatgaggatattgtgatgatctgatcaaccgtgaaccattccatacgacagagccatgagcaaaacagcagcctccttctcatcttgtgggaacacttgttgataagctgagcttttgctcaacattattgtcaaatcatcgaagcaaaatttgtttgacgaaatcgaagaattagaagaagttgtagatttgctgatctctgaatctccggcaaccgtttccgcttccatttccttctcctcttcctctttgatcttgcactttttggccttggccaccattggaggagagtgattgtatttttcccctccgtttgatctcttttttttattttgcaacttctttttcagcggtaattgttgcactcggggcgctaccgccacctcttggtcgccggctgcagcggccgcggccatagcggctcgccttgcctttctttgccgtataccacatgcgttacaaagagactgcaatgataaatgaaaattagtatgcgaactgtagatgacaaaaaaaaaatcatagaatgttggacttatgagtatcattgattaaagtattaatgtttaaaggatgtatcaggtttaaataaattaaatatctacattcttgaaatataactattaattttaaaaatgtgaactaaactaggtagatatagatagtatgacatatatcaagacaatttcgattgaagtaagtgtgattaatctaccttgggacctcgaggtccacttcgccaaagaggagtcttggtggtgttacaatccgaacaaaccctaatcacgccattgttattactataaccgttctcgttgattgtattgtagcgattctcggtggtcgcggccgtggtcttcctggtcaagacgttcttgaaattaagatcttcatggtgatcctcgtcgaaattagtcttatgattcaaagggtagtgatcactttctttatgattattattattagtctgatcaatgagctgtttattgttggtgattgttttcttgatcaaccgcatctttggggacatcaaccacttgtcggagtctgaatcgggttttgtcgggttttgatgaagaggatggggttggtcttcgtgatcttttttccttatcgttagtttcagtcttgtctccttctttggcaccatgtgatcgcatgctgatgatccaccgttagccacaaacatcttggcctggtatatatatatcaccgatcaaggtttataatcaacaacagatggaattgtacataataatataatgatatggcttcttaagatccctcctttttatttgataaattaaatttcgtctatatagaattctcgacatacaaattcagaaactaatattattgtatgaattttacatgatcaggcatgattttaactgctaaactaaaaagaacgatcgtacaagaataacatttatacacacacacttaaggttgatatgtaattgtaaatttaccttgaggggttgagaaagatggagatgatcagcgtgataagtgttgttgtaggcaacatgttgatcttcttgagagttgatcaagaaagggaggtaagaggagagcgatgaaatggacgaagaagaagatgaagaattagaagggacttgatgatgatgatgatgatgatgatgatgaagcgaggaagaggatccaagaggatagaaaaagggttgttcgtgatggttttgatcttcgttaagatctatcgagtaatgaaaatttgaatccattgatgagataaacaaatgaagacacaaagagagagagaaagaaagctaagatgagagattgagagagatcatagacggcaaaaagagtccaagctatactatgtttgatcctttttaaaggcaatgagatgagacacgagccaaacacacatggtctctattatattcatatataaaatatatcagtttaataaatggtttacgtgagtctagagttagggtacttatgtctctgtatacatcaacttgtacagtgaattttagaagacatggataaaatactgttttaaaatcctactttcggacaagtccggatgtcataccaatgattttaatttttttaatgtcctttttatatgtttttttctaatttagaaaaaaaagctctaaacttctagttttctcaaatgaccataaagtattatgagattcgaatccataattttatttgcatatgctataacggacatgcgatccagtaatccttgatgagctagtaaagaaagcttgttgtttttttcttggattgatttaagaaaatggatacaaataaataactgaaatgatcagtaatagtaaatggtcaatatttacattaagaaagttgaaaatatatgtatatgtatatatataattaattaatttagaggttcacgtgagtccatggcacccatacaaaccaaacacatgagacaaactgtgtgtatgtggaatggtactggacggccccattcaaaacaaaccctatctgtaatttccttaccccactagagagacacagaaaattaaaaataaaaccctaatttatataaatattggagagtgagagccacacaaatcatgataataattgaaacaaataagatccttttacttgttgtcttttcaaatctagggtttcctagatctcatcaaggctctattatagaaaaagaaaaaaaaaaaagtcaaaatttggatttctcatgttcttttcatatgtatatataccgttaaactaaaaatctactgtattcatgaagaatcactaaaaaggttagattttcagctctatgaatttttactagattttattaaatcgtatcagtcaaaacaaatttagaataaatattgattgataaattttagaaagtatattacattctcttattttctcaaccaaaaaaaaacaaacttctcttatttaaaatgaatatctaactagcgtctgtaaatatgtctattgacaaataaaaaattaaaaaaaaaaaatgagaaacaaaaaagagtcaattagcattacgtgaaaaaacgtcaaaaataaataaataaatagaaatgacaaatagttagtgtttatctttcagataagtcagtggatcttcttaaaattcccctacgagtagtgttagttagtacctaaaattatagactttgttgtgataagccatcaatcatataacatggattgttaaaagttcaaataagtccaacactgattcgttggtttatttcctgataatcaaagtttactcaattggcataacaaattcaagatctcttgaaaacgtagtatatatgctatatgtaactcgtgatcctttcaactgcatgtgatccatcaataatcctcccagaggatagagaacgaaatgatccatgattgagagataggaagcgaggcagagggagaagagatcagagatctagagagaggagatgaatagagagaagagataggtttagaatggtaaaggaagaaaacatcccaccttagtattgccaaacttattcaattccttctcatcagattatacagatcattgaggacccccacacacaaagagacaatccatctttatttttcaaaatttaaaattggcccatcaatttgtaacaattcttaagctaactaaatgatctaaggaaaaaataataattgatattaattttctgctatatttagtagctttttatatgggatcagattatgatctatatataactcccaattttctaacacatactataggatttggtcaatgcatcttatgatatcactattgttagaaacgttttttcaatatcacagtgtacaaagtcgaataagatgttatgcactgagagaaatgatttacgctttatagattatctactccctcgatcgaactgaaagagaccatatatatagacgatagaaacttcatagacaacaaagataacaattggtttgtgaccaaaacatatgtgttttccattagttacaccttgtttaaactacaacaatccaaaacaagcaaaacattgtatattagtgtgcacaaaagagcacaataatgaaaattgtatggatgtgaggataaatctcttctttttttgataaacgaggataaatctcatatgtctcatgtatattaagggccaaaaaaatctacacagacgggataaaatcaaatgaagaaaagtgattgttgaaatttgagtttccctttactgtactatcacatgccaaaaaagtcatttgttttcttttgagtaataataaaattagtaaataatattactattggtgtcgggataaaaatgaaatattactattggttactttaacggtaagtatctagatggggaaaaaaaaaactgtacacaaatgaattgtactcttcattttttacatgactttgcagttgcatcacttctcaatcttgggtttgcttttcaggctcaaaaaagtttttgccaactttttcatttcttaccaaatcgggtcagtccattaatcaaaacacgttataggaattttaacgcataaaacaaaaaacaaaaacaaaaaaccagaagaaaacatggaaattgatgatcacgaatgtatatgcaatctgttaccgttaatgcattaaaacgtaatgaaaaaacatggaaattatttaacagtacgtgacgtcaataatagtactgtattacttttgaaaaggtttaaatgtctttaacaaaaaaaagaaagggtttcaaagtaaagtagcactataaaatttaatcccattctacgattatcgttgtcttaattatcattagctctattaccattatcattaaaggttgaaaaaagaaaagaaaagagaacactgcaaatcagaggtagtttgaccactgttctttctcgtcgattatattataatatttgactaagctttcttttgttctgtgttcttgaaaagcgagctgagcagagccgttggatcatggaaacggagatcgatgagcgaagagatagataaatagagggaagagagagattggtaggctagctctctgagctcttaagggttttgttctttcaggttctcaaaaaagacagcatgcgatctatcaatctccttcaatgttttaacacatgtacctcttttgaattatcatcaaaaccgagtctaattttaaatattttcagtctctctcatatgtaaaatgcagtgagccatcacatgtgcatagtcatgcgtcttcaactatacgttatataagccagaaaaaaaaattcaatattacatcttgttcttatataaaaccaaaggatcacaagaatcttatattaatttccaaaatttcaagcctgaatttcaaagtcgtgaacgttaagatgtctctaacaaaattacatcaatcctaaacctatattattatgaccactaaaatatcatgcatcacttaaatagtttaactagaaatgatctaaattgtcttagatacttatattcttttgtcaggaagttagttgtttcttccatatatgagaaggaatataaggtaataatggatatgattattatttgtgtaaaacagtcttcagttattccattattaaatttttggagtttgatcgacacagatctgtagaaagttcttccttaaaactaacaaaaatttgcagcacaaagttaaacattaactcccttaattaacccatgtttgattcaaacgatcagagacatcatggtattcgacttatttatggatcaagtcatttggggtttgttgtagagttgtggtagtaccctttctttctgaagggctagcaagcggagtctccaaacaattttttaattaagggtgttcactaaaaatcgatttcttttgaatttttttgatatattttctttgtcaccgattatttttttcgaccttttaaaaaaaaaaatcaagctccaaattcgttaaagagatattataaaatatggaattgtaaaaaatagacgacgcacaattttacattattttaaaaaacttccatacttggataaaacgttatatattactgttacaccataatatatgcatgtcgttttatatattgtttaatcgatttgtgagtatcagatttggcatccaaatcctacaaccaaaactttgggtagccttgcgaaaaccatacacaaagtgttctccacataaaaaatcgatctaaactaatctccacctctacttcttctatatataatcatagattttattgaagacattaaagaaagctagatatgaacaagatattttacattaatatatcttgatataaaaagaagaagctagatatcaaaatagacaaagaaaacttattaattatatatttaataagattacaaaaacagggactgaaaaaaagaagagagacagtggacggccgccatataggcatataaggttcacatacaatgatgaattgccgagagagtttttgttccttccttcatatagatccccgattttgtaatatggacagataataagttataacttagaaatattcatatttaaatagaaatatccaaacgaagtgaccaagaagatcacacatgccaagttgtgtaaataaagagagatttgagtattattatttatctgaatcagaagcaatgggcaatatggagcatacgaatctaactcttctaacaaattgtattgtctcttttcccgaataaacattgatcttatatttggaaagtggtcacacgcttctccttaccgacaatcatcaacccggctactcgaacttaaaccaaaccgggcaggtaaagtaaagattaacctagatatcatatataaccatgcttgttcttgttaggtttacaaaaattaaaaaagactactacctaaaaaaaattacaactaagatttatttatttcaataaatatcacaaactttaggcttttggacactttggttttttagaacagtactatcattttgcacacacacaccaaaaaaaaagaaaaaaaaagaatagtactatcatatataaatattcctaaaaggttactaaacataactaaatctcttgttttttctaattgtgttgttctggaactaaaacttgttttgtggtattttgtgtgttgttgatatgtgatgttggttttgaatattgatcataaccagataagctacgtcaatgttttgatatatgttgaccaatgaatcactcaacggttaaaagctgaccaccttatctaaaaggattagtaactaacagaagttcgagtcggtttcattaggtgtacatcaggtaagccctaattaattgcacccactgaaacatattaaagggaaaatggtcaattaggacagattagaagtcataacacatatggatcacaataaaaatcaaaactatatatgcatagatacatacatataagatgtaacgaaagattgagatccaaaagaataaacgatagagagatgggctacgtatgcggcttatggatcacaatctccaagaaattaaacacttttggaagcaacaagacagagatacgtatatatatattgtgtgtatgatgaattatgtcaattttgagtgtcagtacaaatggagttatgtccaacattttggtacttttcatgacttgtctttttttggtttcttcccaataaaatttccccaaagggaccattgatcacctctctctctcatctctctctaatcttcatcgccgtatcctctgtcttgtgacagattgatttgtgtgatgtgaaactctctctccctctctttgcatcgaatcattcgtttattatcacagtttataaatgacttcattctagtaatttatacttcattctatttcgatcaaatcatatgtgcgtggcgtagagaaaaaaaaatcgacatatgtgatatactagtaatttataaatggtcacggtaatttgggatgagttataatctaatggagtagattttggtaacatttttaacttcggtggtttaatgttatatataccctgataatgtgaccaaccaatttatgcagtaaaagaaaacatgtagtaaaaataggcggtaggaaaagggtagaatttggaatggtttagaaaaagtattaactatcgatggtatacaaaaattgtgtttgaaaatggttttgaaaagctgacgtttataaagaaaaaaaaaacttaaacaactgaaacggtataaaaagttttacaaacaatcagtaagattatactggatatgatagtatctgtaaatgctctactacattgagatcacaataaaaatttggtataaacataaataaagttatcgagaaagatatatatattttaaaatttttattctggactacattttcacaaattttgcgagctcataacaatcattaagcctaggccgaaagaaaatacaaagttttcaggctcagaagtccaaaatagaatttgaagcccgatagttctgaacttgtaagcccaatcatagtggtccaagaaaacaaggatcacaatacaagttcgcattgcaaacaaaaattagaagaataatctattaatcttgttacactattctagacgtagatgagtttaacacttcaatgcatttactcgatatctaactctgcatatgtagtcgtaatttggaatcagccttatatatatttttaatattaaaactggttaaccaaacagattttaaattcttatgtcttaatattaaaactccttcaacaagctcatgtggacccaatattaaaaaattagttattcacaaaatcattggataagattagtttatccaccatgattatccaagaaaaaaacgttacgttcaaagttcgattgatttattacgaaaggaaattaaagagatgtgtcgtatattcttatccttgatacagagcaataagatgataaagatatacgtggattttaataataacacacgaccaactaatatagactcactcattcacatcatatcgacactaacaacgacaacgcgttgttttcgtccgtcatcaatcgcgttcattcgatctttatattataaaaaaaattgtaagttgaaaatatgatcgctgcaaaattatattttccatggccattgactcctccgtgtgaacttaatttcattttccattgcttgcaatatttattagaattagaaatttcgattctaatataacccagggaatgatattcatgtgacttactttaacccaaaagaaagttaaaatcgaatatccgtctatatagtttatgggagtaagtgtacatgttgatttaggtgtttagtttttgttagatgacaaaaaaggtaatgagtttgatttattcttactattatatgtggccgtgaaacttttcctaatggtacatatggacttggaagttgaaaatgataacaaagtagtatacatatattctttctgtttcatattgtgttaatgtgctagccaatgacaaaacagaaaatttgatgaatttttttactaagtgtaagaaaaattgaacgacccttataataaagccaataaaatataaaatatattatcgtattaattccagaatttgtttggggtatgaatataattaataaggttttattacggaatgaagtgcactagtttcacattgatccatttagtaatggattctggtccatttaatgtggagcattattcgacggtacagtaatgtttacatagtcggttccaaacttcaagcccagaatataatctgttactcattatatattggttgtgatttcatcgtgtttggtcgagtttgtatttatttataggtagtttagaaaatgtgaagagtttttttctaactattttttcctaaccagctagattacacttctacaactagggatcataaaagaaaaaaaaaacttacccaaacggccaaaccaaaccaaccaaaaaaatatacataaataaaaacattatttgtttttttttccaactacacattaattaaagaaaaccttgatttatgtataaaatataaactgattagtttagtttagctaaaacacaagccaaaactgacccaatacctatttcagtgtagacagaataaatcaaaatatatatttataggaagggtttcaactctaagcaatttgacaggtccgaagtcttcacctaatcagatttaatatcggattccgactaattaactagacaaaatcatttgactgcaaccacttaatcatcaacttataaacttaaaaaaaaaaaaaaaaaaaaaaacttagaaactagcttagagcgctacttactacttagtgaatttggatattattgttgtaacttgagctaaaaaatggggttgataacacttgggttggaggtcgaactagacattgatcaactaatatttaatactttcagattatttttatcctccccaactaactaaaatgtgaacattgtatgcattacaagcaaacaaaataaataaaaatcaaaatgaaaacaaatgaataaagttaagaaaattaaccaaatgtgaacgttgtatgaattacaagcaaaaccaaaaatatatatctaaaaaaggatatgaaattagaatcatgtaagaaagagagatggagatgcctaaagggttaggtaactttaggtgcgtgtggtgtggtcaaagcaaacaaatgagccatgttgttgagccacagttggacagtggttatgtggtcatgaaccaccattggctctgtggtatatacgtgtttggcgcaattaaccgatccaactaacaaaaagtacaacactttttgagctccatatattttccttacatctcaagacttaatgagctcatatttaaaaaattttataagaagaaaatatagcaatgcacaaatacagtaatttattcgtctttaaattaccttggttagttaagaaattagcaagcaaaacctgatcaatatgtcgattttaaaacaatcaccgattcacagcactttatttgtaagataaagttttaaattttaacttgtagcttttctattactataattttaattttaagtttgtaattcattcatgaaaaatatatagagacattatgtatcagaactaaacataaaaaaatgaaaatgaaaatattggagaattgcagtatgctaacgtataactggattttcttataagaccatgaatatttcactctaacgtatggtccatttctaaatattggggatggagcataatctcattaggacataactcattctacactaaagctaaacaaatatctttctttctttttctgattaaaatactatgaacgtattgtagttgcattttccattaacaagacacatcacccatgcattgatgtgtgtgtgataacagaatatcactttcataattatctatttgaataattatattgagacaagtttagtgaccgaagaaacgaattagttgaaacttacatattaataagttgacaacaatcaatgattgtcaaacattatgtagtatgtacacgttaaaagacttctgtcactgcttaactagttttattatgaaaccactcaattaattaagataaaccattttaactagttagtttatttatctaatcggtacaatgaattgaatattataacgagggaaagtggttatccacagacccagccgccagctgaaagagacaccatgcaatatgcgacttaaaatttgacttattaaaaaaaatttgaatattatttttgggacaacgacattcatcactattaaatgaatccatttttatatggtatgttacattaatcagcatgtttatctcactgtcacacagtaaccttcaataaaaagagatcatcttccatcctaaaaacggatcacatggaatctcatataatttcagcaccacgcattcgatatgagctttataattcaaatgacaattatattaatcatcaattatcattatactacacaatcttatataataatctttctagtttacaaccaatatttgaaaagttgtgctaatttttataaacgtaaatgatcttcaaacaagattcgagctcattttaacaacgttaaaacaataaaaataacctttgaatttggaaagtgatatgttataaaaaaaaaaattattatttcacaaaaaaattgtgtaatactaagaaaagtaaatatatgattaagaccattgacgtatagtctagcctaagtgtctgaaaatagaagccagaaataataatttcctttcacaaaatcgtggattatattggtttcgtgatcgagttagttaggtaactatcattttataacaagaataaaaataaacttctttttgagttttgtagataaacatcgtaattcattagttatcgaatataagatttggtagttgattatgacatcaaagattgaatattcgatgacgcaaattgaagttgaaaatatatatatttcttttcacgttgaaattgaaatatagacctcgacacttggggtcgtccatttatacataattatctaatttaggtaacaaaagattagtgacccatatatttatagaaaaaaaaaagagtaaacagaaccaacttgtgacccactaggacgaaacattgttgcgtgacgtggctaactaatctacttggctggaataactgaatgaaagacagtttatccatctggataataatgaggatcgaatcagaaaggcttgtgaggttataaattaaaagtagtaaaggctttccacacacataacacgcacggaggtttggtttctgtctgaaatcaaactgtagttattgtgggttccgatttaaattatgacgtggaatgatcgtataaatgttataataacatgttatttgttaaaaaaccagcacaaaatcattgatatatatatcattattaggatcgtgtacgtaagtgcaattccacattcaaccactagaggttattttacttaattaatagaaagtgtaaggttagttagtgcatatataccttttacatcaaccaaaaataaatgtatgtatttattattatgtgatatctttgctaatggttatatatctttcaatatagtatttgattggcagtattgtacagtagaatgaaaaatctgatgaatgctatattaagcattaacccactggtaacaagatttgagacagccatctcaattatcagaaagcaacaaaaagagtcaaccaattctgattattaatttgatttagcgatagatgcatggaaaatctgagatgcatgacttacattattagccttagttactttatttgaaaagaaagatataacttatttttcaagctaccgtttgttagcaactacgacatatatttttttataattattttgttgaacatactgaaaatataaaaagaccggtttcaaattatattaaaacgaagagaatatgttttccagtaaatttctatatcaattatatggactagctagacgtaagctattcttgtatgcaccccggtttaaataaattatatgtatgttcacccaccatattttccgtacatattcaagatgtttaaacttggtaaaacaaatgttattgtaactaaaaccaaaatgaaccttaatttgattaccatatagttagcttacaatttccggagattagtgtagattttcagctcagaatatagaggcgcatatgtctttgagtctttctaatttctttaggccaagtccggtggaaggtggagctttaattacgtaatgaatgcggcaacttgactttcgttctcaagagtcaagatgaaaccaaagatgtgaactaatatatctcatcacattactacaatcttacataatgaaaaaaaattcaacttaagaaagtatatccatacacaatggcttttcgcttacaaaggaaaagaaactttgttttgtactctaaactttttttatgaatcaaactaaagttaatacattttttttgcttgcaacaaagtttacacatacaagttctatcatattcaatttgatcttctgttttttattttgggtcaacaatagcattaaaacatacttaaacacagtttttttcaaccatcatttctatgtaatactattaatttccataaatttttgttttatcacatacttattcttactcttgattattatttaattttcatcatcatttcagaatatttttatttctaactttcatttttttttttaactcactttcacataaatttttactccattgaatatcctatttacaacttctgaaaattaaatattttctagattttattttattttttcctaatattgttaacgcccctcatctcatgggtgaactacctagtcaataacagaacaaaataaaaagttataggaaaatgagaaaaaaatactcaaaaaaaaaatcaaaatagtaggttgtgacgtttcaaagtcacccgcacaaagcaaagagattagaagactctcttctatctttaaatcccttctcagaatagataacagatatacactccatcaaatctatacctacatcaacctttatatagttatatgtatcaccctctctctttctctcccttatatatataactccaaaacaatcatttaatccaaacccaacatatccttttaacagaatcttctttatctgaaaatatctaaagaaaatggtattgaactttagagataagtcctgcatttttctggcaattctttgttgtttatcattgagttgtatagtaaaagcatcagtctcttatgatcgtaaagctgtgatcatcaatggacaaagaagaatccttctctccggttccattcactatccacgaagcacccctgaggtaacaatctttattcacatttttaacttatatgtttcttctaaaatttgattatttcactttcaatggatttttataacttctgatcaaagttttcttctatctctctgtttttctgaattcgattggcttattttgatttttatgcaatgtgtttcatttccaagatttttccttcacatgggttttgcttattatctgcataatatatttttttaaagtgtttttatttgaaagaaattaaatgattcattgaatgctctgttttgtgtgtagatgtggcctggcctaatacagaaagccaaagaaggaggcttggatgttattgagacttatgttttttggaatggccatgaaccttctcctggacaagtaattttcaagaaaatatactaaaatgtttttaaaattgaattttcttctctcacaagtcacatgtcttctaaattttctttatgattttttcttcagtattattttggagacaggtatgatttggttaagttcatcaagttggtgcaccaagctggtctctatgttaatctcagaattggcccttatgtttgtgctgaatggaattttgggtaaataaatttaaacactcattccctccttgaaaggttcattatccgtcctaaaatgattggttatcaaattttatttttttaatatttgttatggttttttaggggatttccggtttggctcaaatttgttcccggtatggcttttaggacggataatgaacctttcaaggtttgaaactctaaacaaaaactcacttttgccctctcatatattaaacctttttttttatcttctgattggatgattaaatatgaattcttattgatattggaaaggctgcaatgaagaaattcactgaaaagattgtatggatgatgaaagcagaaaagttgtttcaaactcaaggaggacccatcattcttgcacaggtctgttgttgtttgttacattaaatatcattaaccaatgattaaaaatggagggaacaaattaaatgtttttatttaattaattgtgtaaaaatgaaaaaaaaaatgatatggacagattgagaatgaatatggaccagtggaatgggaaataggagcaccgggaaaggcttatacaaaatgggtagctcaaatggcattaggactctcaactggtgttccatggattatgtgcaagcaagaagatgctcctggtcctatcgtacgttctttcttatcatatgcataatattctggctgaactacaacacaaagttttatttttgttttgctacacaaaaagtttttgttttatatataagaaattttaagtatgaagtaccaaaccggtatgattttttggggttttctttgataaccgttgactcgggtttattactaccaaagcatgtcatcaacataacaagaaattaaaaatggtttagagtttttttgttcttgttggttagattctctctaattcctctgttttcctcctttctatttctattactaatggttatttgtaaaaaaaaaaaatacagatagacacatgcaatggttattactgtgaagatttcaaaccgaactcaatcaacaagccaaagatgtggacagagaattggactggttggtaagtcacaacatcaacatgcctagaaacttttagtttgataaaaaatcatagattaagagatatcaattttcattctttcaaaacaagtaaaccactgtttcaaatatgtaaatcaaatctcaggtacacagattttggaggtgcggtaccatacagaccagtcgaagatattgcatactccgttgcacgatttatccaaaaaggaggttccctcgtcaattactatatggtaacaaaaataaaacagagttacatatgaatgcacatagatgttttcacttcttttttttttggcttaatgtgtgtttatatacctttttatagtatcatggaggaacaaatttcgacagaacagccggtgagttcatggcttcaagctatgactatgacgctcctctcgatgaatacggtactaaaccaaactcaaaagatataataaatatctctgaatgattagctaacctaattctgtttacttcaaaaaggcttaccaagagaaccaaagtatagtcacttgaaagcattgcataaagccatcaaacttagtgagccagctttgctttctgctgatgctaccgttacatcgcttggagctaagcaagaagtaacgatcaaagctttttttttaacttacttatgtttagatttcaaatgagaaacaaacctcatgcttttgcatgttgctttcaggcttatgtgttctggtctaaatcatcttgtgctgcgtttttatcgaacaaagatgagaactctgcagcgagagttctgttccgtggattcccatatgatttgcctccttggtcagtcagtattttacctgattgcaaaacagaggtttacaacactgcaaaggtaagacagaacaagaaacttctttgtcaagaaagctaccttcttgatatttagattgaattgaccctctgtgtttttgaataaacaggtcaatgcaccaagcgtacacaggaatatggttcctactggtactaaattctcttggggatcattcaacgaagcgactcctacagcgaatgaagctggtacgtttgcaagaaacgggcttgtggaacaaataagcatgacttgggacaaatctgactatttttggtatataacagagtaagtataagaacatcaaaactctctttgtttttgtctcaatcttcggaaagatcctcacggttggtatggtttatgtgtattttactcagcattacaatcggttccggtgagacatttttgaagactggtgattcacctcttcttacagttatgtcagctggacatgctcttcatgtgtttgtcaatggtcagctttcaggtaatataagagaaacaatggaagcttgtctagtctctgtgttgttttagtcctgtaacttgaaaacattgttggaatttgctctgtttcaggaactgcttatggaggacttgaccacccaaaactaacctttagccagaagatcaaactacatgcaggtgtcaacaagattgctcttctgagtgttgcagtgggtctcccggtaagttcttgatggatctttaaaagcagtttttgtgccaagaagataattaggttctgaactttgtggctcttgttttgtttgcagaacgttggtacacattttgaacagtggaataaaggagttcttggtccggtcacattgaagggagtaaactcaggaacatgggacatgtcgaaatggaaatggtcctataaggtcctccactgaaattcaaaaccacttaactttaagtttcctagtaacaacaaaacaatcataataatggatttaaatttgatttgaacagattggtgtaaagggtgaggctttgagtcttcataccaacacagagagttccggtgtgagatggactcaaggatcatttgtggcgaagaagcaaccattaacctggtacaaggtaagaaaaaacacaaggattaaactaatgtctatacacaaacttagacacaatgaataaactgaaaaaaaacattcttctatatgttgcagtctacgtttgctacaccagcaggaaatgaaccattggctttagacatgaacacaatgggaaaaggtcaagtttggataaacggtagaaatattggacgtcattggcctgcatataaagctcaaggatcttgtggacgttgtaactacgctggaactttcgacgcaaagaaatgcttaagtaattgtggtgaagcttcacaaagatggtaccatgtacctcgttcatggcttaagtctcaaaaccttatagttgtgttcgaagagttaggtggtgatcctaacggaatctctttggttaaaagaacatgaaaagcttcttctgattccgagttttcaggacagaagcaagctgtttgattcgtttgtctatatctttctctggctttgctttgaagatagagacagagctggaattttttttcttttatggctttgtgcagtgattacaaaaattatacaacatgtatatgtataactgtatcctactactagtcatcatctatggctaaataaaattcacagaataaaggagtgtttctatttaccataacattttcgtttgttcaagcaaataactgtttcaatcatctcttgaagttggaacctttttacgccttgatcttctaatctttatggctattgggccttcaagtaggcccaataaataatccatgtacattattagactatgagtcgatgatgataacacatgtaaaaatctaaggatggatttgtaaatagagcattcattttacttaggggttcagtagttttcatatttaaaaaatataccctaaaataaaaccatattagagaaattagtaccgcagtgtgacgaaattaccaaaatggtcacattaaaccacttaactactaactagacctactctactactaacatttactgatattccatttttcttcctcctattaacaaacgtgtaaatcattttcaccttttttcaccataattaccttccaagttaatgaccaaactaccttcaaatatcatgctttctcgaaaatacgacaaaacggtcaaacacagtcttcgcctagaaacctcgccaacatatcgtcgttccactcatactcactcgctctcacctcgtttgtactccacgcgccgcctttctcgtttccgtattcgaaacagcaaccgaacagaccactagcgtcgacgcttgccatgacggaagagtcgctgtctgaaaaggacggaccacagctttcttcgttgacattgatcgtgatgtaaccggaagacgactgaacaaccaccggcatagcgtacgggtcgtcgataaacctcactctaaaactcccctcgccggaaaagttagttccttcgatctccgtcgtcgtcattgtcggtgaagaagactcaacgagactcatgatttcatccggtgtatactcgtcatactctccggcaacgagcatcgtcgtcttcttcgtcacttccttcgcggtcgtattttttccgttctcgtctactttgttcctcatttcttccattttctctcaaatcaagtgagaaagaattaacaaaaatgagagagagaccgtacaataatattgttgtgattttcttcttacacacatttatatatagaattaagtgtagatatattacatataaaaaattataacatttttatgataatatctataaatacagtgaattgagtctgtaagtgggtccgaatgatggaaattataaagtctaaatcaataaattatcagctgtctttttgttgaaaatatgttacacgttttaataatataatttttgtatttcttctagttaagtttcaccaagaaaattaaaagacaaaggaaaaagtgtcttctgatataatacaaatatacaatttgtgacgaaataatttacattaccatttcaaatggaatcggattttcttttctatactgtaaagaagaaaataaaatacaggaaaaggtatggaaaaagttaagaaagttaatgaggagttactaaaattaggaagctggtcggtgagtaattttgaatacactggttagacttttccctgataaaaccaaaagtgggtggatatttttctttaatgtttctcatagcaaaaaaaaacataaatatagtgatgtgaaaagacttaaatgggtttcgaattgattttgaaatttacagggacgtgccatctgtttggtcactgtacagttttttctcttgcagcgatgcgacgctgactctctctcttcccaattacttactctttttaagcacaactgaatttatattcatcgatgcacacaacttttatgattcattggtccaaacgtaaccaatcaggatatgaatggcttataggcctaaagcccattttcgtttgcttagagatgctcaaaaccaatcttctctattcgaactggaattgtgaaggatgatgatacttaatgcttaagcctgttactttaaaacgtgatatgtacattcaaattagatttaacagaatctcttgtttcttcttctcagataaacagatctattcaactaaaaattttgaaccgggaaatgatcactcctggttttatcttaaccggtttccatgaggcaaagagttttgcttgtaggagaaggcaccttctttcctttcagtctcttaacttaaacgggcaatcaaaaactcttcagtgttctgtaggcaaaagattgtttagcgagaaccggatcgtaacatgaccgttggtgttccatgctcactcaagcttccggtcgataatctcctcatcttttgccagaaactcttgcctcgacccgaggtcaagggacccgagttagactgtctctcgaacctccctgaccccgtgtacatttccgatgtagataatcctctctctgtatcaggctcagagtcgtaatttggtagcaatggataccgagccatccttgctgagctgtcaccacaagagctctcagcttgagtgtcatctctaaaatcgtctttagagatagaagttaaagaattgagttctttagcttcatcacattcgttgctgacaagtttcaaagcttgcactacttctcccatgaaaggacggtgtgatacttctggttgaacgcacatagaagctattgccgcgactttagctatgctatcgaatgagatctcgggtcctaaagactgatctataatagctgcaagcccttctgcactcgtaagaaaaggccgagtccatgaaactaagttctcttgtccgggcggttgagacatatccactggtttccgccctgtaagtagctcgagaagcacaactccgtaactatacacatcactcttcaccaaaagatgccctgtcattgcgtattccggtgccacatacctattagaaagcaacatttatataagttaaaatcggaacaggaaaaaaaacagtctgaagcagtttgtaccgattctggtttttattatcttacccaaacgttcccataacgcgtgtcgatatatgtctgttatcttcatcatcaagggcgttacgagccaatccaaagtcagatactttaggtgtgaaatcgttttccagcaagatgttgctggacttgaagtctctgtgtataactcgcgggctcgagtcttcgtgtaaatacgctaaaccacgggccgcaccaagagctatcttcaaccgagcatcccaatctaaaggcgaagatgctttatcaatccctggataagaaacagatagaaaacaagagattgatttcaaagataagcaaactaaacagcaccaaaaccatatcgatcgaaataaccaaactacaatgaagtctgaaaaccaaagaccagattggggtatttaaggtctggaaaacataccgtggaggtgagattcaacgctgccatttggtatgagttcataaaccagggaacggttacgatcttcgatacaaataccaattaaattcacgaggtttctgtgatgaagacgactaagcatttccacttcggctaagaactccctgctaccttgctggtcatctctcttcaataccttaactgctactttagttccgtcatcgaaaacaccttcgtaaactcgtccaaatccgccttcaccaagaaccctcgattcatcaaagttatttgtagctttcattatttcacttgcggtgaaagtctttgcagagagagtaaacggagcaatgctggattcaaatgacaatgaagttgagctaaatcggcttccagttaaagatctcgccgagcctgcaaattcagataagttatttcatgtttcttccaagagcaacagtagtagtaactagtaaccattttttacctgatggtttcgagagggaaggcagtgaagggcgagcaagtggtgttcttttcgaaagacgtcgtcgatctctttgtcgccggaaaaccaagaaccaaacgataacgaaacataaaccgataaaagcagctgcggataaaacaatcacagcaatacttccaccattgagctctttcttgcgcggcttccttggaacatcaactccgagcggtttgaccgcccttccgttattattaccagagtacggtccttgatctataatggtcataccagaagttggcggggaagcgggtaaaccaggataacgcacgtaaatcacgtcgtatccgccaaagattggttcatctatatagacttttttactccagaatctctggtaagtcagcattgcagtcatgttatcgaatttatctccaagcggtactaaatcgattagaacaatggatttctcaggttgttcgctggccgcgttagctcccattatacggacttggctctgtttcatgaaaactccggcgctgatttcccgagcaaattctgaaaccattgggaagaagtcgtagagcgccatgctaaggcgtagctcaacttgaattggccagacacagccacatggagatcccggaggtgtgtttgtgtacggttccaaacaaatagttgaagaacaatctggagaaacacaataacagcaattggtttcacaccaaaacaagaaccacataaagacagttttgttcccaaaacaactgaaaaaatctcaacaaacctgaattagggggaggaggaggaaatgcttgaagaggtggacctagagggaatttccgagattttgaaggtcttgaagaggacctgagaggaaacacttcaggagaaataaacataatttaggatttcacatcaagcaaagagtttttttttcttaaaacagattttgcctattggacaaattatgagcggggaatcaaaccttgggttggagaaggtgctagagccggggagatgcgtttcatagagaaagagactggagcgtgagcaggagaaatcaaagaatcaggaatgggaggagaaggagcatggtgcgattgtggaggaggagtcattgaacctataataacaaaacataggaaaaacagagaattaagatggctggccaatagaagtatctcaaaggctatggtaaagtggaaacctttacggtttgacttctttggagatatgagatgcggtggcagtggtgaaggagctggactatctgcgattttctttcgttcttgatgatgttgatggtgtgaagatagaggaggaggagatggtgatgaaggatggtggtgtacattactaggagtagaatctggcggtggagtagtagatggagatgtatgatgagagtgtctgttaaattttggggctgagggagcaatcgaaggaggagaagctgcaatgtaataataacatgaatttagtctccttgtcttctttacaccggaaacaacagtaacttatatgattgatgccttaaaaactaacctttatgtgggaagacaggtaagggtttagcagtttcatttgccggtgcagcacccggacttttactatcatctccgttatcgctggggggcggatgttttactggatttgcagcatgatctagaaaagaagaggaaatgttgatatcctggctaaggttttcttacggataaacacattcaaaagtttagcaaacctggtgagacagcaggagattctatggggaaaactgggtgggtagttggcggatttcttctcggagatcccttagttggagtcgaggtaggtactgcatggttttagagagatatcagaggataaagagacacattttcgtgacaatgtgactaaagtcattcagcaaccgcataccaggtgagctcgagggtgttaacttaggtatgacgggatgtactggtggtgcaatgtcaattgatattgttggtggtgatgcaactgattcagagaccacagatgagtttttgccattaaaataacgtatatgattgaagtaagaggggagcaaaacatggtactataccaggagcaatagacttttcgataggaggaggcttgtgattgttagaagcatttctaggaggtacattgctcggtgtaggcggaggcagagccactgatggaattggaggaatatccgaaacaggtgatgaaaccggggctgcggattagacgacattgcaagttaaagactcaagatttatgctaaagtttcaaaatttcaattggtagtatatacacatacctggagtaactcttcctgagaaaggaggctcctttggtgcatctcctggaatgaatcgaggtggtgaagcaatcggtgtaatgggttgaagaaccggaggcgaagctacgggcaaatccttaacgggtattgtagctggagctgaagaacgaatcaaaacccgataaaaatcgaaaattcagtacacaattctagtggttcaaaatgactgccaagtgttcgatcaattgtctgtgaagagaatcaacatttcaatccaatccaagttacatacctggagcattaggaacaaagacaacaggcacaccggccggtgctttacctccgacggaatctgacggtggtggagctgccaaatcagctaaaggaggaagagacggttgagaagaagctttagacggtggcacattgtcggatttgtgagattcaggtgaattactcggtgcttgaccaaacccttttgaagtttcgggtaatggagacggtggtgatgataacggagataacaattccgatcctgagttttaaaccatttataacaaaattttagtttacacgaaagcataaaaaaaaaaatcacattgtaaaatcgcattgtgtttgcaataataaagtttccttttttcatcactagcagagtttattaaacaaaaacaaagttgagaatttagcaaacataatgcacaaaaaagaatgcaaatttaccaaattgatccatatgggtctaatctaatcccaattattgaaaaagtgaaaacaaataattgtataaacatacctgaggaagaagcagcaactaaaaccgacgaaacaagaca

SEQ ID NO: 915 - DNA, 78423 bp, Arabidopsis thaliana
gatcctaaggaggagagtcaaattctccattccatagaagagatcaagcttcctcgatgatcacgaggaagacaaagaagaattatttgatgtgtaatcttaatctccaagtttaaagcaatcgaagtggcagaagaagaagaaatgacttcaaccgcaagaagaagaagaagcaaaggaacagtgagaaataagcaaaggaatgattttttttttgtgagactttaatgttcacaaacaaaaataagaaaattaaagacagaaacgagtttggtggaagagaacggtagtaatcaaaagtagtctctatgtgcaattaatctttcatcttcatgtttgaacaaaaacgttttttttttttttgctctcgattggtcaagagagatcaagagagagagatttgattgaacagaaaaggtgggatttttgaaggtagtgggatagtgtcaatggaggaaactagtgtgtgtgtgtgttttgtctgagagaagcctagtggggttttataattcatttgtttattattgaccttttttctccatttgtggttgaagaagtgaatttagtttaaaattctttcttcttaaaggttgtgttaatattagtcaatggatttcctacacttatgtttaattcattggtgtgagaaaaagcgttttccaaattcatacaaactagaaactaaaatctatgtaattgtagtgagacaacaaaaaagaatctataataaagggaattaaaaattggttttttcggctgaatctttaagattgattaaccaaccaccatttttttggaatttgtttattaataagaaaaaagtgtaaggttatatcatgtcaatgagataagatttatgctaaacccacttttaagatacttataaatgtcactttttgaaagatattaacaacatacaatagatgttctatttgttttttgtcaaacacaatagatgttcaatattttgcatatttcatgtaaattatcaatttctagagtgtaaatcatgtagtctaagttttcataatgattaatctcaacagtcaaaatctaataagtagtggaatcgattgtaatttgttttgtattgtagaatttgttgaatataaagaaaaaggaatccaatgaggagacaaaattaaccctatcctatatcccgttaatccaaccttaaccaaaaaatatatatataaattcttagtttggattagcttttgaaactgattttttgtttataatattaccataagtccataaccataacgtaaaatcatatatacgcatgtttccttcatattcaaagtaacacaatcaatcctgcttggttaaagagtaagtttcgtatattgatattctattttaaacttcattcccttcagaagaatcacaaacgttgttttcatattttactttgtttgctttatgaaaaaagaaagatagataaaaatctttggttgtgataaccgatagcaacaattcactttaattgacaggcacaacgatatcaccgacgtaacatcttgtaaatatgtttccctctaattaaagggagacctatatattattgatcataagtcgaatgtgaagatttaaaatgcaaattcatgtcgaagatcaagtcgcacaagttaaatgatcacattgttgaccaaaaagaaaagtgtactcatcatactattattttagtatttcgatagtggatgaagacctcccggaaatggattacaaaggcgctccttcatgtattaatctttaaaattacatataccagaaaaagatatgacttttataggcaatctgtggtgtattgcttacacatttcctactgctccagttggtaaaatggaacgataactgatgaacaaaaacaattaaagtatatataatggttacaaattatactagtaatgagttaaaataacaaacttgtcttcatcttattgctcatattcccaagattcggctcacctcggcatataattttccgtaatgtaatttggaaagaaaaaatcttacatgcaaaatcatgttcagaaacgtcattttattaataattgttggcaaaaaaaacatagattttattcaaaaattatagtattaatcgcttaagaaaatgtgagtccataatcatacgctagttccaaccagaatcactgaaaaatgattaggtatagtgaaaatgtgaaattcaacttcaaatagaaaatgacatagttaaactgtatttaagcaaccccttttaaaatgaagtttgcataagtcaaatcttgatttattacatacgcaaaatggttatgtgtagagtatgaactcatcacaatacatttagtaagaattaattcacctaagaataaataaaaacacgtggtgtaagaatcagttccgttgtcactaattaatgacttttagctttgaactttaaaagtctaaattctgattgacccatttgatttttcgattgaatacaaaacaaaattaaataacaaaaatccgtttcaatgcaagcaccgacaaatatccaagtaactcatacctagacacaactttaaaaaaaaaaaaaacagatgaaatcataaaaatacgagaaaggagtggcgagaaatgcagatcgtaatttggtgtcgtatgtgtagggacgtaaacaacgatcagtacgaccagattcgtgtttggctttttgtcgtttaactgtaagaagtgatcacacaattcacagacaacgacgttagctctctttgtttctttactactgttcaaacaaatcttattgtatatattctttgaattgaatcatataacattaaagtccaatataattaggtggacgaacaacatttgagccgaactaaaaaaatggaaaatcgccatacctaaaccaaaattaatgaatactacaaaactgaatttgattaatgtcaaaatctaaagtggtcaaaatatgtactaatctaataattctaactactactagtagattatagcctccctatataatgagatctttccgaattttcgttatatggtccaaaaaaaccttgtcgagcctcgtgacaattaattacactatatacccaccgatattaataaatattcctctctgatctctgaactggatccgactaagtccagttagtactgtaccaatgccaattttaattaataatattcagattttccaaaataaggtaaacaacaataaatgggaaaattaatctagaaaagatgcaaattagcttaaattactagaaaattagagggtagttgatgcatttatagagacctaaattttttgggaccatcaaaattcactttcacattaaaggaaatgagaaggtaaagagccatgtgtagaggcatagacagaatctataaacccttgttgatgatgaagttttcttttgtttcctttactcttttgctaaagctgcaacaacaacagcgggagcagcaaaagaaagcttaagttaacccttaaagatgaagagatcaatgtttctcttctcttttaccatgtgataaaaaccacattctcaaggtacatcttttaaatgctagagagttgaatctgattcactaaaaccagctttaatctcactgttatgacaaaagtggatttcattcagtgatcaaagattgatgctgaaacccacattgatcagatactatctgtttttttatttgattattaaccattctagaattaaagtatgtcttggctagaaatgattgcgattaattactgtaaaggaaaaaaaaatgtacattattaccaaccaacaagaagtcagtagtttaggtgaaaacaggtgaagcaaattctaccatgactgttgtgtgtttctgtgatgatcactctcttacatctcaacaaacaataatatatcaaaaaaaatgtttaatagaagaacaagataggtaacaactaaccagtaaaatagtaaggaaactgatggaagactgttagcttttaactgaccaaacaaagaacactgttgacaaacctatttctaaacgacgatgcttcgcatgattcagcttctgacctagagaaaatattaagtccaaaggtggttagaagaaaacataaacgtcaaaagataatagaaatttggtattaaactggaacagaaacacaatacctgagtgcactggagactgagtttagcatgattgatgcccacaagatagcatctaatcgtatcttttgttcagtaaggttattggcaagggtcaaattcttgaaattgtttcttgaaatcttcagccagctttgcctcctcttcttggctaattttacagtttctccaatcggccctatctgggatctttagcaaccctgctagaacctgtaaaatccaatgtcatttctatagcaacaaaacgccttaaggatctcaaaatattgttaaggtggatcagaagttatctatctattcgaatccaaaatgtcatatattatgatcttagcatgaaagttcttttgtgaatggtcactctgtattaaacagaacataatgtttgactcttcatgcgtatgaatattgtgttatcaatggcatctttctttagtagtataatagcaaagtcgcaatccattcatgaattgtcttacctcccgtccaaactgcgcagggaatacttcgttttcttccaaggtgtgtgatagcacagttccatcaggaagttccacatagaagagacccaatgccgcattatattccttctgcagatattttctgccatcagtactatcattaactgcaacaaagacaacatcactgagttataagatagggtccattgattctataacattgagaagaaaaacagtaagaaaatcagcttacactttttagtcacaagcttaaagcccagtttttcagccgccagactaaagatattaggaagaagacgagctctggatgatggaacaggaacaacctacataaggtagactactgtaagtaacttttaaattcaaaaagatccacctgatttgcaataggaacttttcttacttggaggttagcatgagaaacacgtttagagaccaattcaaagaaaactgcatcatttccttggctcttataacaatttctcagaccattttggtatctactgagctctgattcaacctcaggggataaaaccagagtattgggcaaatgttcgattgggattatcaatatgtgatcttcgactagcgaacctttgggtagagcacaataaaaactttcccctacactgacgattaaatgtgactccacactcgggcttgatagacaaaaccagcattcttttgacctgagaaaagcaattttgatttgacaattactgtctccaccccgagtccaaatggcatatatgttctcagaagctagattagaatatacctgttagcattctcagatctgggcttcctttgtatgctactttcatcttgaaactcatgcttgtagctgcactctgggcctttttcacacttacctttgatgataagatcaagacaaacacctctacgacactgttctcttgcttcagcgttgtgttggaaatggcaatcttcaccacgaggacaggaacctgagcagacaaatttgaaacagagcttttccccttgagatccactcttttgccgctttgggacatcatacctccaatactgtgaatcagagtcactatcgtttggcctcttcttcgattcagcagctccatcttgtaaattataaggccatagcgtagtttttggaggctttgcactaagctctgctggtgacatggtagatgttggtgtaggagaaagcgcatgaagaaatttctaaaaagtggaaaaaagaagtaaaattgaagaatatatgaaaactgcatgaaatcatcagaaaacgcaaaaaaaaaaaaaaaaacagtctgatgtgctacatgtgtttgcatagattctgcatccaaagtatatccatcttaggaggagccatacatacagttaagagtaccactcaggaggcaagtgatcaaacagagaggtaccaaaatcttcagaaaaaattaataagataccaagctcgagttgaaaggaactatagaacacacctgtttgtttttatttccaacttgagcaagaccaataaagcgagttacatgagtagattcagcgttgaggtaaggttcacgggcataaaatacccccatagaacctgcaatgtgatagctaccacaaaaggaaacagaaaccgcaaattaagttcataactaagtgatcaaaattccccagtaacaacaatattagaatcgaaaaagcacttaccgaggtttaacttccattaccaactcagaaacagtggaatcactacaagaggaatcagaaattccaacaggaatatcagaaaccgcagctctgtttgtgactcccgcaggccattcattagtaatacactaattaaggacgacaagtagaacaatagagaaatgtatccacagttctaatttcatcaactaatacgaaaaaggatatgttaagaacaaatcaactcctccaggttcctcagcaagtgcacgaagagcatcaacatcatcttgactatatttcccaaattgactctcagatgattgtctaccagataagtaagcaacagacaaacctaaacaaaacaacttatcaaaaaaaactgataaagattgatacttttatgatattagcaaaacccttaccatggagactgaacttcccacttcctcttaaccaaaacaaattgtggcaaacttcgagtccatccatcttaaacccttgattctcagctttcttcgaagtcgtcgataagattttgggtgcgacgacaccatagtctccggtgaagtaagtaggaatcggaacttgagctcgaccttcgacgtaatccaaaaactcatctagaatttctggagaatcgggaaaaaactgtccgacgcaaatcagagcatcaaagggaccagcagatttgctaacctgcaaaaattggagttcgatttaaaaattggagatacagaatcaggtgaaatcggagagcagaaggagaaagatagtgatagagaccgattggacacgcttgaagagctgattgagacgtccaagaggatctccacagagtaaaattctgggcgccatgacagtgatgacactggacggaggagaaggaggaggaaagcaacgacaatgacggagacgactatttgagacttttctttcactcttaatgggcttctaatgagcccagttaagtgggcttctcatgagccattcatctaatatttgagccttctctttcactactaaatgggcttctcatgagctttttttttctcaaatcatcatcatcattcatccatctatatttcaaaaaagaaaacaaacacgataattgtcttctattacctctctctcattcacctctcgctaagtgtgcgttagccgttagggttccgatctaatcatggcggactctgttttgaaggaggttaactgtggccggcctgaaaagatcccgaagttggacaaagcttgcgaaggatcgaaatcgtcctggaaacatctcaagctaggaaacgtggaagatgatgagtatcttcgacagtattgtttgtttcactacgaattccataaatccgaggtactattcaactttaatttttaagcttcctttccttcaaaattagggttaattcgaaaatcggaatctgataagaagtcttttttggcttaattagggtttcacggttgattgggagaaatatgactacatgttccatataaggccgttggaaaattcaccacctatcagcgatatacgaaccaatgctgatgtgatccgtgatgtgacactctttgccattgagaaacacaatgaagctcatggatctaaacttgtgtttgtcgagcatgtctcagctaatttcaaatttgccaatggtctcctctgctggttaacattctgggctaccgatatggcctcatccgctcctacatcgcagatctatcaagtcgaactttggcgtcgcggaaaacagtttgaaattcccatcttcagggtcaagcctaaggacgaaggtgacaaatttcgttttaactctattggtttcttctttttattctttggctgctacctattctgatgtttaactcgtgtgtgtttatgcgatgcagagatggatgatgttgaagtgaaaccaccctctcccatgccttatgatgactatggtactgctactttctcttggtttaccttttgtgaccttagattagtttactaggtgttttacttttctgatcaaactaaaccacctttacctttgcttttctaatcaatgctagtattcattaattgtgttttgttgtcatgtagataaaccaccggttgtctttgttcgagctgctcctgaagatggtgtccctttcgtctttgatcgaactggagctctttatgatctctatcggtctggtttgtaaggaaaaagtatatataccattcctttggtgacaaagagatatgatgttagtcactgactgaaaaatcaaattaggcttgtattaatattataccctctgaattttcaacttcttctatctctctaaatgtactagcttctcttctagagatctatgaacacaaatagaattgatattcaaaaatccatttgtttgagaaaagaatgtaactttaatttaccttttttggtggtggtggatcttcataaatttgttttctttttcttctatccatatcttaaaaggaaaaaaacaatgagttcatgaaaaccaacttagtgaaacaaaaataaaattcaccaattttaatatagacatataagctttctgcattttgaagaggttatcaaaaatatatctaaagagaaaaaaatctcacgagggaagaaatctcacccaaaaatttagcttatttccgttttcctttcttgatgtcacattcagcctgatacaaagaggaaaatgagcttgtagcggcccactagactcgtagcagactttttgcgtttttactttgacggtgtattttttctttatttatatgttagaccatcttcattgggggtatctcataggagtttctcacaattaaaaatataaaaataataaaaatgaaggagagagagtgtagaaagtttccacttgagaaactttgagatactctgtacaacccatcatgacaattctcattttactattggtttaattttttaactaaaatacttttttaatcaaataatcaaattataatataatattaatatttttttgtttgagaaactttgtgggtttctcatggatggaatagatggaaatgcccttagctgcagcatgcattgagaatacgtagatactttctctcgaatcttcttcttcagaaagaaaaaaagagaaaagaaaacacgacaattgtcttctcttctcgaaggtgcgttagggttccgatctaatcatggcggactctcttttgatggaggttaactatcgccggcctgaaaagattccgaagttggacgaagattgtgaaggatcggaatcttcgtcgaaacagcgcgtggtcaagtggggaacagcggaagatgatgaatacttgcgacagtatttgttgtttcactatcaattccagaaaactcaggtaagaaaaaacccctagatttctctgtagttagggttgagatttgaaatctgattatggaatctgttttgttgaaaattagggtttctcgattaaatgggagcaatttgattacaattttcgtagtagatcaatggataagtctccaaatgaaatcagcgagagaaaaagcaatgccgtattgatccgtgagatgacactcactgctatcgacaaacacaacgaagctcatggaaccaaacttgtgtttgtggagcatgttgaggcaaattaccaattgaccagaggtcttacctgctggttaacattttgggctacagatatggcctcttcccctccacagtctaaaatctatcaagcacatgtgtggcgtcgcggacaaaactttcacacttttatattcaggctcaagcccacagatgaagagattgaagctgttgaagtgcagccaccgtctcccatgctttatgaattagataaaccaccgattgtcttttctcgacctggtcctgaagatgaagcattgcctggtgtcccctttgtcttcaatcgaactggagctggtcttgaccccgattggtagagtatgctcttgatcccgataggataatgtatgccagtccctttttggcattgactagtaatatttctaatgtaagtcgtcggtttggaaattttgttacttggtcaaacttttttacaaggaaattatgtactatcacttatccatagatataccattaaccgtgagtaatttatattatcaacacacactattcgtattgacatcgaataaatacaaggtcccataaattgacctgaacctattcttatgttatgatgcagaggaatataattaagtaagagataagttggaaagtagacactttttttataaataatttgcaaagtaggtagtttttttagaaatatgagaaatagacacttttctctttcctctctaatacaactttttgtctaatagagattttagtaaatgacttatataaccttttgttattttgttatgtagtaagataaagacaaaactcaagtcaaatcctactttttatttttacttaaatatttttactttatttgatgatatttcttcataaaaatttaccacataatcatattagttcttaaaatttttatgtgaatctaaaaaatctaattttgctatattttaaaaatatgtagcaatttttatttaatctcagccgacggtgtacgtgatattgttaaaattggtgtactaatggtagtatacaacaataacgtaaaaattaatatataattactgatgtagaaaatgatacactgagtataacagtgtacaaaatgatgtacatagatgatgaaaaatatggtgtacataatcgtacacctttaaaaatctatgagacagtgtactaacattggtgtacgagatgatgtacaccactaattgaaataatgatttatacattctctataagtgtacaccaagttttgtacactttgtctaccaatcttgtatgttatcatttaaaagttgtatatatcattctatccaccaatcgtcataatagtttcaatcattttgtacaccattaagagtaacttaattatgtacaccatcatgtacaccattatattgaataataatatttggtttatacaatcattatgtttgtaaaatattaaaaacaatattacttatattaataagtataagagaagtcagtgatgatttatgaaatatcggtgtacacacttgtacaccaacgaataatggttagtgtacaaaacaatgttttaaatgtttgtgcattataatgatgacagataaatactctaaaagtcaatgtaatttaaaaaaaaaaaaaaatttaaatatttaagaaaactaaaataaaaaaacaaaaagataaagacaaacaaaataaagtaaaaatagttcctcatataatttttattctctctcaagataaagggtattttagtatttgatatgtattttgtcttttagtctattagataaattctctatctcacaaaaagcaaaaaaagtgtctatctctctaatttttaaaaaaactacctattttacaaattatttttgaaaaagtgtctattttgccaataagcccattaaataatgtttattcatagattgtttttctttttgagggtaacctttaaatgtttgaagtttatgtatcaaatgattgatgttcacaagaacttaaagaattacttttcaataccaatattttgtagtaataatacttagaagttaattaaaagctaattttacgttctacgtaattttgcatgagaatatatagtcttatagtaatacagcaccagtgcaccacccactccgtttcccttatgtcttcctaaacatgtattgtttggctgtaaacatgctcgaaagatgttgtttaattaaaatctgataacaaaagttgcaaacaaaatcccaaccgtagctatttttatccttacaaatggataaataagccaaaaataacagtttcaagtcttacactaaactgatctgattggatcatcgaaaacaaattgagcaaaacttggatttcttcagacttttgagattattcaaccgaataaaccttattcatagaccaatacaataattatctacatcaaagttatcactcccgtgaaattttacgagagatcaatagctttaaatattgatgctctgtttcatctacatgaagtataacttttatctcaaaaaccaaattaagatcagtttttgccgtggctgaagctcgacaagaactcgagaatcttggaagatatgttccctgagtttctggttacagccgtgtcaacagtaacattgctcttatttacagcttctgttggatcattgttgcctcgttcaactttagcggattcgaattctgcagcgagtttcatggctgagagtagagaactttgaatgtgtgagctaggcgtagtcttgagatttttactacttgctggtttttgaggctctcgattcagagttttttgttcttctgatgcaaatgataagaaacttattccttttggaggccccagagggagaaagcttccctgttgtgactgcttcaatgtctgactatcagagttgtctgtgtttggcttggacgcagaagacgctttcaccgtatcctcttgtgaggttttgtctaaagagagaaaactcataccctttggagcaacggatggttttctcaaaggaggaacctgtggaggcgttacatgttcattgatctttgaagatgatgcatcagatgagtttcgttggttagaatgacttgagggcttcaaaaacgcaacagagcttgaaactcttgcttggatcgccggtaatttggctatggcatctctcacggattgtttttttgttttctgaggcgagaaagacgctgcagtgatcttagtagacgagactgttacatttgcactcggcgtgtctgaagcagattgtggagtaccctgttaagtgaagattagtatagtaggatcaaaagatcaataagttattagactctggaagaagaatcatgagaagatcgagagattggtttttaccttatgcgaaaacaaacaactatcacccctgtagcagaaacctttagtaatgaaattattgcaagggtatttggagagatcatggtcgaaaggacaatcatctcctttcatacatgactgggttgcaaagtagcagcaaggctgaaacaacaagaagacacgagtattagagaccaaggagatgacccagctatttaaacttgagaaaataagttatctcttgaaacagtaatcttaccgaacatttggtttccggtattgtatcatgtgaaaatttgcatttatctccctacaaaagaagaaaaacaagtgcatcagcaaacaaaacttttaaatccaaagaaatatttataatccaaagccgttgtgtagacctcatggcaccgccccttgagatagtgtcgacaatacttgataggctttggttttggagctactggtttcagtttcagctttttcacgccaagggctatacgctcttgagctctttttatcctagcttttgcctgcatgaaatagcttatcagtaagtaaacatcttactccacacacaaaatgattgtaagatatccccgtaatatgtcaaagaaatgcatacactacattaccctctttctggcttttgcatccttagaaggcgcagacctttttttgatggaggttccaggatccatctgcaagttaaaatacaagtcagattttattaacacctaagcaacataacataacaagattctttaatattggatacctttgcttcgttactgaaagtttgatcaatcttcttggcttgattatctacattcattacctcaacaccaaaactcttatgactagtgagatggctattaccagttccatcttgtgagacctgatactcctcatgtctttcgactgtttcatcatcttctacaagcatatcatcattatcatcccctgatatctctccttcttctacatcatcacctccaactatccgagacacagaatctaccaaaaccggactattatcaacaggtttctctaattccatctctctttgaactgttccattacaagcttccaaaactccagaacttataacctcattagattcaacagatttaggaacctcctctgcctttttctcactttcaactggatctacttgaacttgagttgcaatattaggcttctccaggacattttggacaatgtcatagtcattcacatccaatgcctcaaagagattcacacaactttctggaacagaatcttgagtttcattaatcataagctcaaagctatcgaaaaaatctgtgtgtctactaacaacagatgcatcttgcaagtcaattccatcacaaatatctccaagcatcaaactcttttcctgtgaaattgtttccaccttctcaccacttgaatcaccagacactccattgagttttgattccgtaattgataaattctccggcggttcgcaagtttctcccggagactcttgagcaatttctatgtaagaaaacacaaatagcatcagaaatagtttcaggcaatttcaagcaacagatgaactttgaattttgattactagaagatgaattaatcattcctaagaactttgacttcgaatcgaacactgacctgttcgtaagaccagctcctggagaactgccggtgtggcaagagaaatttgaggctcccgatcgaaactcgagcaaaagtgataaagcaaagagcgataatttcgattcggcagatgcgtgcgtcggtgaggaaacggagcgacggaagattccattgtctccgccggagaataatctcaaccagtaccgataggctcaacttcggcttgtctttcgccggagaaaggccgtcttgtggcggtggacgatttaaaaatctttattgggcttgtatcatctttgatgttaatgggcttcctgattttgtaggcccaatgaatccttcaacaaacggcgtcgtaataaggatccaaaccctaaaagatttatggattcagagttttcgaaattggaatttctcactctctctatctctcttagccagctctgatcatttcgatttttttccggtgaaaagggaggagaaacatggttgtacgtatcagactgtcgagatttggatgcaaaaatcggccattttttagggttatggctgctgatagcagatctccaagagacgggaagcatcttgaggtcttaggttacttcaatcctttgccaggtgattgacaaaacaaaatgtattccaattggtgttgttcgtagagttttcgattaaaatacacgatctcttggtctatgtgttcaggccaggacggtggtaagaggatgggtctcaagttcgatcgaattaagtatgtttcttctcatctaattctctagtttcttatgtttttttcggtaaaatcaggtaggttttgggttgaatttactcagaaagaggtctctgaatgcttcactagatgattaaggcttttctgcatttgaagtgttttggttaattgctaaagttagcttctagccgcctctagatatcttaatgcattgttgtatagtcaacattgtgttatagttaactatctttcgatctgatacaaaggagctgagttcagtctttgaatggtttttgttatcgaaaggcgaatgaatctacatgtttcccatggttggttttgatcactttctttctcttcatggtattgaaccattagttgaagcaattttctacctcatttaatcactaacttatgaaaggaaaaactgaaatatttgtggaaattcatcaacaagttttgttatataacaaatgaaacttctccgccagtcttgagtctttctatggaacttctgctctgagttctggaattgtttcttattagtgtaagatgaagaacctgttgattatctattcgtatacacacttacttacattcttaattgttcaccatatacaacctcttttgcataattgtatggtcatgtagctttagaatcttgtcatgctctttatcatcatctaaaattaagattataatgtccggatattagaagaacacatgtcaagactacttaaaagttagatcctggtctgtctttcttttgttctgaatgactagtttcaacagaggatgcatatagtttgattaatggacattttgtttgattctcttgttctgtacaggtactggttatctgttggtgctcagccatcagacccggttcaacgtctcctattcagatccggtttacttcctcctcctccaatggtggctatgggacgtaaaggtggagcacgagacacacgcccagttgatccgatgactggtcgctatgtggatgcagagaataaaacagttaatgccaatgataaccagcctaaggaagaggatacagaagccaagagtgcatgattcattagccttctgtcatcgtagcttttcaagttcactttgttgtcgattatattgtgtaatgcagcattagacaactgacttgtttcctttgtttggcgataaacggcaaggtgtttggcactttttgcagaaacggcacatattttgcattgggatattttagattttaaaaaatgaaaaagtaaataaaaatgccagcgagggaattaaaaaaaaaagaatggcagttgttaggtttaaattttataaaggaggaagccacgttttgcgtttagtcgccacccagaaaaaaccctcaagtcttcttcttcttcctcaatctctccacctcttttcaaaccttcttcacactctctctcaatcaatcctttttcttctcaaatctttcagttttgatctctaaatttccagaaaatgagcaacgataaggacagtttcaatgtcagcgatctcacttctggtaaatctatatctccgattttgtttctgcggctttgcttcttcttagtcaaagttttagaagcttttttgtttgtttgcagctcttaaagatgaggatcgagctggtcttgtcaacgctcttaaggtgagtttctctatctcttcttatatcgatttgcattatacttgaagaggaacatgtaatttgggcgtttcgtcattttatagtttctgtggagatttttttgtaactgttatgtgtttgattcacagaacaagctccagaatctagctggacaacattctgatgtgctcgagaatctgactcctaaaattagaaggcgtgttgaggttttgcgggagattcaggtttgggaaaacttccattcactttttatgagctctatgcttatgttgtgattaacgtttcctatataagcttttgttcaatagattggtgtagattgatatggtatcttgtgagtatgatgttgaaatgtatatttgtatgcttttgattatatgagaatgctgtgcattcttttgatgattatctgagaatccttttcgttttttagggcaaacatgatgaaatagagacaaaattccgcgaggagagagctgctcttgaagccaagtatcaaaagttatatcagcctttgtataacaaggtaatttggttgtagcaagattaaactattttgaaaaatttagttatcctgtattttctttatttccagctgtgttggctttagttagcttcgaatttctcttgacactggcttgacatttggaatgtgcagcgttatgagattgtgaatggagctactgaagttgaaggggctccagaggatgctaagatggaccaaggagacgagaaaactgcagaaggtactctctctctctctttgcctttgtaaattgtaatcattcttgcaagaaaaaaacaatttgcttatttcaccgggctggattgcagagaaaggagtccctagtttctggctgactgctctgaaaaataatgatgttatatctgaagaggttggtgttacatctatgattgttcatttagagttacttaatcatatccatggaaattgaccagagttttaatttcttttgatttcagatcacagagcgtgatgaaggagcccttatatatcttaaagatatcaagtggtgcaagattgaagaaccaaagggattcaaacttgagtttttcttcgaccagaatccttacttcaaaaacaccctattaacaaaggcgtatcatatgattgatgaagatgagcctctgcttgagaaggctattgggtaattgttgataacttttttgtaatatttattccctagcatattttgttctgagattcttccaaggagctgcggaatcttgtactgacttatgcactaacatggattttgattctttgttctttgtctcaggacagagattgattggtatcctggaaaatgcttaactcagaagattcttaagaagaagcctaagaaaggtgcaaagaatgccaagccaattaccaaaactgaagattgtgaaagcttcttcaacttcttcaatcctccccaagttcctgatgatgatgaagacattgacgaagaaagagtatgatatcatttggttttaagacaggccctattttgactatgtttgattatacttttgtagtaatgttttctgttcttggtgcaggccgaggaacttcagaatctgatggaacaagattatgacattgggttcgtcttcttgaacataaactctgtcaatttaatatattccgtctaacttattaccaactgtataagagctctagctagcatcttttatcggaaagttaatacattatttagtatctgattcaagtattccttgcttcttgcagttctacaatccgggagaagatcatacctcatgctgtctcatggtttactggtgaggctattgagggagaggagtttgaaatagacaatgacgatgaagatgatatcgatgaggatgaagatgaggatgaagaagatgaagacgaagatgaggaagaagacgacgaagatgaggaggaagaagtaagcaagaccaaaaagaaggtattggattcctcttgtttcatttcttcttgtcatggaattaccttttctgagttagttactaactttttgatattgtgttgaatgtttatgcagccatcagtcttacacaaggtacatagccatattccacccttcttatagtatttgtctgagttaattagataatccgataccaatgagtcatacaacggtcataaactattgacatttataggctagaccatgatctaaaaagtagagaacatgacccgtgaattaggagatagctgaaattaactgattaagctcactatgcacgaatctgtgaatcatagaaacttgaactcttatatgactgagaattataaatgaaactatgtagaatccttctcatgcatatttataagcttaggctaaatctagtacttgcaaaccattgtgctatgtttgtgataatgagatggattctatagtcatactctttttgaaatcatattgcagaaaggagggagacctcaggttaccgatgatcaacaaggagagaggcctcctgaatgcaaacaacagtaaacaaaatcgaaaagtctaaacgaaaaccagtaaaagaaaaacaaatgttttgggttttgagtgaagtttcatggcctagttttttgcttccatgtaaggcaaaatgttttgaagactgctcataggaatgttgctgtaggcaaaagagtgagtttctccatgtggagatacttgataaattatttttggtgcatttgttttttttttttttaatcactaagttgaattttggtgtgttcgtcaaaattatatctttttaccacttgaattaagtctcttttggtttctttaatttaaaaataaataaatcttatcattgttttttttgtgtggacataagtgtattattcttattgtaaaccaagaaaaaagaacagaaagaaatttgttttcatgtagtttcttcttcaatgggtcgattagtatttcattatggtcaaagtcaaattaatcacacaccgtgaccattagcaatttagcattagtgagtgtcgttattcgttaataaatcaattaattgagtcatttaaatagtaaacgttaaaatcaaagatgcacacgaaagggactctttctatatacagaaaaaaatatatgtacttgttttaatagttgattttgactccaaatggaatttgctgattctaccaaacaacggttttggattaatgcgtatttgtttttgaatattttgcttcaccgtaacaaatcatgtcctctcaaggactgaagattcttttatcagttaattacaaatacaattagtgctaatgaatcatttcacattaccctgaggttatcaaactattgacttcaaatctttgtcgtccattgactttttttttttttacagctttgtcgtccattgactataaatgttatattggagtattgtttaagcgtgattaattttttctaaagcatgatttagtcaattagttattttttttgcttttagtgctatttgatctgaatttgaatctaatactccgttttattagaagtttaatattactattaaggtaatcccaaacaatagatcataacccaaatatttgatcaaaattcaaaagtaatgatctaaaaggcgtctttatcttaaactttatacaagatggcttgtaaatcaatagtatgatactattttaatagcacgaatcagccaaaagaatttaagacatgtagggttttatccaaatgttttgtagtaataattgcctataaagttatgttccctcaaaagacacaacctaacggaaaaatgactgaaacagggaaactgctacattctcttttggccaatgtatctgtaagtcagttaattcaatgaatggggatgctaatccaaatagactgtggacaatgattcatcactttagttgatatcattcaagttccaatattcaaacgaattggctttctacggtaatagctagtctttaacatgtaaaaagaacagtaaacaactattttcaaaataagatatttttatatagagtaaatgtaaaaccaaacgcatatatcattctatttttgtttaatttttacgtttgcaatttacaaaacaaaatgctaaaaatgtttaagatagagagttcatgtaaaagatatatatacagtaatttataaatgttttgaattattgggtcagatcatcccgtttgatgataattagccatatttaattgccgatatcatatagtgcgataaaaaaaatcatatatatagtgagtggattcgaacgatgaaagcgatataattaatatacctattttggtaagactaggtatactatatgatacaatgtttgaagacattttaactaagcttttgaatttgtcactttttccatagaaaacagtcaacattcttttcctcttaagtgtctagaagcataatcttcaaaagttccacgtgtttaagtgttaatatagtctttaaaattaatgcagggtataatatcatgaaaatgttagtttaatagcctaattaggaataagtagctttacgagttagtacaggagaaggttttctcaaacgtacgttcttccgtaatcttaaatcgggtcaaaaatggcgtcttccgaaattttcagttctgaattttctacaatttgccccaactttttattttgggatggagtatttcacatagtttatcattaactaaaaaatataaaataaataataaagtataatagaaataggagaaattgaaaattttagactaatatttaagagattatgtgtataagtgtatatttataattggacaaaacctaaattataataataataaaaaaattctttttttgagaaacctttaaaatatctcaccaataaaaatggccttagatccacactcgttttgttgaaattaagccttgtcttattttttaatcggttgtctcgagagacatccatgattttaaatacaaataatgttttctatacatattaataaagttatatatcggatatttaatactcctttcgtagcattttacttgcggtttaaaactatcatttttcaaaacaaaaaatacgttgatttttcatgaaataaataaatttgtaatatttcatgtaaaatcgatatatagtgaatgaccgtacgttggaattaaccacgtttctaaaaagggaaatgatttgaatgtggaaggtaactactaggtaagttcattaattaatgtaaccattaatatattgtttggcaaaaacccatcgctgtctccaagctcttgaatattcattttcttttcatctatagatatccttgtcgtttggttttccatttagcgagaaaagttcagtcaatataggcgacaaaagaaatttaaacttagccacataaacttaggaaaatagtatatatttcgtgacataaactttaaatatttattgcaggataacttgtatcaagtttagtaattatctctaatacaacttgaagtgtcgtatggagaaaaagtacaaatattgaatgccaaattatacgacccatcaatcacaaaactctcaagaaatttaaacaaatacaggacaacaattttgcatttcaaagaaaaaagtaacattttgtaatagagtgatgatgtcccaaagacaagtttttataaatgacagatattgcttattacaaatttacggtaatagctaaaaactgaataaaaacaaacggtcaatattgattcaagaaatatgacgaacggctgaaaaattccacagtaataagaaccatcgacaacgataggagccgccacacgtcatagtaaaaaatagactgtccataaataatttaatctttcgatcattaaaaatgaatttgtaagcgtaaaagaggaatagaaatttaataattactatatagtatatagttacgaaatagtcaaacttgttgtcagtgagccaagtcagcaacaacccttctgactgcttcttggaaggctgattcgtcccattcaccctacaaaaaatcagttaataattccgtaagttttattcgataaactttttatagtcaagagtcaagaccaaactagtggttatctacttatcttatcaaataattatgtataatactctatcaaattaatttatgtggaagagagattctcgacctttaaaaagtgtatatgtatatatgtgaatatataaattcactactaaactctaaccaatcaatgcgatgcattcaataaaaccccactaaattgttaaatttaaaatgtagcaatcatagcaaatttccttttttggtatattttactgtatattatatcatcacatactgtatatgccaacttttcctaatcaataaatcacaaataaatgtcaaataatatgtttccttaacagaaaccaaattaatataatcaagatgatactttacctcaatcttgagccttaagctgatcacaagaacaattgaagtatccccctctgctctagctagagttcgagcttcgattgacactaagctcacattgttgatttgcttcaagaattcgagaagtcttatcatcaaatcatcaaccctaatgatgtctccccttagaacaactcgtagatccaaagtcctctctctagatgttgattcaggtatatgtcttatacgaacgttaaacctctcttcgggtcgtaaatcattttcaatctctctttctcctgctagctttgcctctacctcccgatttctctctagtagtttcgaaatctcaccttgcaaagaagatagttgctctcttgcaatggagaggaccgatgctttatctttctgttcaaaaaatttagtcattacattagctcaaatatacattagaagaagaaacttatcaaattttgaaaacattaattaacagaaatcatagtatatacatgaaaaaaaaaatctcacataccttagttccgggaggaaggagagatctcaatgcttgaaagctctcattaagcttctctcgccgtttcctctccgatatcatatgttgcagttgcgttgcgcttggcccgctagtataacgtccaccccctccacttccaccgcttccctcgccgtgtgtagtagcgttttccctagtaaaacgctctctctggttaatgttaagcctattgtagaaggacatcgctcttgtcatcatactttgcttccgaacactcggaagcggggctctaccgcggtcactaatcatggagtaatatctcttaaaagcggtggctcttcctttacgctgcggcgaggaagaagttgacggaggacttgatggccccgttaaaaccgctaagattgcttgcgtcattgcttcttcctcacgttgacggttacggaataaaggctcttgatgctgtggatggatcatattgatcggagctagcggtggaagtaccggaacgttaacggcctcagtcgtcgttgaaggtttagggatgagtgggaacaaaagagaggaatattcggagatgttgttgggactaagagaagaagacgatgaagagggataatgaggtggccggagataatcggagtttgccggagaagactttctattgaaatcttcagggaaccattctcgaagacttgcttcaattttcatctgttcttgagtcaatgacacattagagaccattatataaagattttagagaaagacaaagacatatattttaaaatcttcaagtaattaataaatgcatatggttttataaaattgacaaaaaaaagattcatacatttgtagtatcatacgtcattccgagttcgatctcgccgctccggcaacccatgaatatcaccgtctgatccataacacatttaaaacattaaattttacatatattagtgacattttgttgaaatattatgaagatgaaaataatgtacctgaatcctggcttcctgcgaccagtaatgaaaatagatgaagaattgattgttagtgaatatcatagtaagaaaaaataatttgaaataaaaatggtgttgtagtaatgcttctaactaacaatatatgacctgatagaagagacgttgtgtgtcgttaaaagcaagtctttgactctcttgtggtcgaatttctacgtatggaagattgttcatgaacgccatgcttggcacatgcctaaaattataacatttttgattatatattttcttgttactaaaacataaatattggtaaatataaattgcatatacgactcaaattgatgaacaagtttacccattttggagcgggataacggattggcgatactcatggaacaagctcctagctaaacttccagaagaagaagacgaagaaggttcttcagaagcttcattgtaatatccatccattgatattaaatagctgcagctcaaaatcaaatgcatcatgagattaataaaaaaaaaacatttacattagagagattgaacatgttacatatatgtggtgcatgtaatgtgtatagatgtaaaggtcgagaacgaggaagatatgattattacttagaaggtcgaggaaaatagtaagaccaaagacaaacgtaaacacatccaaaagattgagctagcgaccggattaactggttccgggtattgggatcatccgttaagaagaatgcatccatgtaagaagatcacgcgtgtggcttttttccaaacacaacagaagattttgagaattgaagatgaagaataagaggagatgattaaagcttcattgctgtattaagccagagagagagggagagatggagggagggaaaattattcgttccatatttttgttttcttatttcaaaaaataaaggaaaatattaaagtggagaaaagtagagagaagaaggagcccaaaagaaagagaatgagagagagatttcagaaagagagagtcaaagtcaaatggtacaaaggtttgaaagacggtcaagagaggatggcaaattcaattattctcttattttgatcaacctatcaaataatcttattatcaacctataaaaaaactatgtaatgttgtttgagttagtaaaagaatatttgggaaggattatatctaataattgattttgttaattcatcattcatctcttgctatagtagttttgtaataaaaaaaagtccaagaaaaagttttgtttctattttgactcttattaaatccaccatgaataaataatatccatgtcaacaatggtggcctaaacgacgtcgcgggatttctttaattatcgataagtactgattgttatttatcaatggccattgaaattgaaaaggatcgtaacagagtataataactatttgtcgattgttgaagaatctttactactattaccacaaaaagtataatcatgtgattttatgtcattagccattctcgcactttcctgcttctttatatatatatatatatatatatatatatatatatatatatatatatatatatatattccaataatccttgttacatgcatcgcctctagaaaaaaaaacttcttagatattttaatactaatattatgtttcctgcccagaatatacatacaatcctacctaatataatatagccaaaatccacaagcttctagaacttgcaactgtttttctcaagtatatggtacttgttgataaacatccatttttactataattgcagaaattcaaaacatgattcagacgggactgttattcggaatttactatttcaatgttaattttaatttatccgggaaggagatatgtccagcaaaaatcaaatcttggtttggaacaaaaaaacacgatatgagtcatatgacgactagactattatatataatttatttattttattgttataacttcaaacagtgaaaagaaaaaaaaaatgtaacaagttaggcatctcgactccttatgatgaagaaaacatcaagaaatttctgatctattttcttcgtacataaggaaataattttatctttcaaaaataaattgaaaatgaaaacattgattagtatgtgactcaacaagaaaaaaacgtattcgtacgtacgtgtggaccataacgattagaaattaatcgggagcaagtaattggatttatatttattgttatacatatcatttttgttttatgtttatttttttggcgtgtggtaccatatcatttgcgattttatcgattaatcatgtgtacataaggaaaaaacagtaactggtggaacgctttcacaaccacatttgattgaacgaataatattcgatcgtacaaatttaagagtttgcccgaccacaaaatgctttgaagcaagttgtatcaattaattgaaagcatttctcttgacgagtaaattaaatgcatgtttctttcgtcatatgacgacaagactcgttaaatctcatgcacttggactttgagacaacaatgtgaaccaaaattaatgatattttttcctaaaaatagttttcatgataattttcttaattaataattataattttgttttgcttaatattcgacctgcatctgcatgtagtctcgtaaattaatgttagtgatctctctacgtataaacataataatgacatcgcgcattagaccgttcgacggtagcggtgttcttattttttcttagtcgatttaagaacattcagcattataaatttataataaactatatctaatttattataacataaaaaatgaaataagacgttttttgtatttaaattcttgcatgagaaaatcagttggaaatattaagaacggtcaactcctattgactatgagtcaatgccgcattgcggcaaaattgccacttgctttgctttctttcgttttgcatttctgataacgaacagcgtgtcggttgtgttcaaaaacagcacgtagtggtaatatgaggcccagagttcgacgattaatatttgggctgaacattagaggcctatgaactgacatttccaaaatgatatcacatgaaaaattgaaacatctatttctaaacatctttccttttttttttcatcatctctaaacatctttcctaaacaaacgaagtaagtaaaatcttattgaaatgttttttcaccacacaaaaacaaaattagctttttttgttataattttcacatttaatttaattttaatttatattgatattaaataaatataaaatgatacaaataaattttgggatggtattttacacgaatatacaaaggaatctcatgattatatttttagtaatgatacaatgagattttgcgttataaaataattgttccaactttttcacataatatacagtttagattacactatttaaatattcggtacttagacactttctattaaaaattaggttggagattccttcggatcacaaagctagcggctgcaactttcatcatatgctttccacttttcacgacgtttttgtcgttttcttgattttactttatttaatgtagtagtttatacgggttatattagtcaatataatcaagaatatgcactaatgaattcatttttgacattaatgaaaaatattctaaaaatatacaagttatgtaaatgtggattaatcccttaatcttaacacaaaacaattgagacaaaaaaaatcgataattattaatcttaccacaaaatatcagatgtctagaaaatcagagtttttgaaaaagaaatctgattctaatccaaccaattatacgtggactgcgttcgaccaagatcttcaaagtacataaaaatatatattaaaaattaagccaaaaataaaaacagaaaggaggcaagaagtgtggatgtctccttctttcccgcagactgtaacaaaaaggtttggggacatttcttggacataattattccctatttctttaattaaatatattatatatttatagatatgtcaacattttcttcacaaaaagatagttttcacatttagacttactttcaaatcttatgatcatgtcctttactttcctatcaatttccattttcttaataacattattctttaatttcgtgttcttaattatagccaaaaatctccaattcacgtgaaattgtggtatatacttttctgtcaaaaattgatataacaaagaaaggaatatttacaaagtggtgagaacgactaacaataggattaattatcgtctaactcgagtttattttttgaaatatattttgtcccggtgataatatcattttgggatcatatttatattttctctctacgaaaatattccacctcggaccaaaatgtctaacccatccttcttgtgatgaatgataaggaagatattgtataacccccatattagcatcctcacaaaacttcagtatttccatgttttcttgatcaaaagcctcccaattgtcaaaacccgcggatcttaaaaaccctaccgcataaaatacatcttcctcgggtatagcggcagacatccgatcattccacctaaaaacgccgcataaaattagcttgtaagaatatttcggattccaaaacgaaaatgtagatagtaaattttgcaatatcgagttaaacttacttgttgcgattcataggataaacaagaacaggaccgctagtgatgttatttcttaggataatacccttaaaaacaccatcatcaaatttggagatttgagtttttggtacgaagagattaagccatggatgtggaacatcccattggcctttggatttcaggtttagctctccggttcgaactcggtttaggaaatccatatacgtcacatctttctcgtacataaaccctcttacatggtttaaactatcgcttaactcctccatttcctgcataagttaaataactaaagtaaattaatataattgaataatgcataaagatctcccaattatacatgtatgatttatgattgtatgtatgtacggacctcgttgactgtgtattgagaagtttcgtcgtaatacttgacgacttcaaggcagtagatgacacgatgtcgtttgaccattgaggcgatcctcaagtgatcggacggtggataatacgtggatctccagttatccggtgggccatggtccaccataatggaaccttctaagaaatctacaccgtccgttttcgatatcactcgttcttgatctcttgtgaattcggagaaatctatgtatagaaaccttaaccacttggcctacaaaaatccaaaaatgcatatatgttcattcataaatttcatagaattttctgtagttgcataatttacaaatttaacatacccttttcggagctacttcaagtttaattctggctcttgttataatgccgaattgacccaaacctcctaacaccgcgaagaaaagatccgagttcatgtccttggaacaagttgcaatctctccttttcctataaaataaaatttgaccccattaggaaaagtttagtaagtaaactatttcaacaaacttggaccgttatgtaagaatatacaaagactaacacaattaattgatacaacaatgcaacgagtttgaaataaaactattctcttctgtacttgttttgagcctagagtgctaaagtcggtatcattaaattatgtttatctcctaaccaaaaaatggaacttgaaagtcttcgtaatctaactacacttgagaccaacagtgtaatgtatatggatgcatatgtggacataatggatacagctataataagaaaattgactgttacttaatccattacacctggttaggaccaaacgttatgaacttttgagttttgtccttacgccacaagaaacctcgtgtaaaatcatgggcgtgggaccattttttttttggttgtttttttttagtctatgaatggaggcagcggacaaagcggtctaatttatctgcggtttagtccatttcatttttgaggcggacaataaaccgttgcgcaccatgtttatttgtatgtaaaaacggtatggaattggtccgctgcggttttcttctattttttttaccccaaaccactgcggaatataattgatgaatggtaaataaaaaacggtctgatctattgacggttgtgtccgccccaaccgccgtaaccattcaaacccttaattgtctgtttgttcaccgggttatatgaacagttttataatatatgaccatgtaaatttcgcagaaatttgacttcgaatccacgaaatttgcataatttgagtaagaaatatagaacataattattcaaaaaaaaaagtttagttggttaaacgtgtaatatactaatgtgttactaaataaatcgcgttttaacaaaactatatactattttttttaataaactaacaaaactacacgtaatgtatactaccaaaatttctttgtttcacgattttaatgatgaaataatctgttgttaaaacaccaagaatattgattaatcttctattgctagatcgacctttgcattaatatcaagtttataatcttagaccaaccaccaattttgcttatcaaaaaataaaaaaaccaatatttttttaatgcgtctacgtttacaaccacctatttttacctagtccgtatcttctttctaatcttaagaccaaaaaaggtgattagattgatgtgtgaaaagaagaaaagctatcaacaagttcgagaaataaataaacagagacaaacaatacaaacaaacaatagcataaccaaaaatggccgcgcagatctaaaatgaaaaagacgaaaaaacttcgaaaaacgtacgaagttctttgttgtctatcagaaacgtacgaagttaaaatcactattactgttttttttaatctctgtgtgaaaaagatcgtggtacgtaccagtaataacatccatctctagaacattagtgatctgtggaccgtaccgaaacgtttgtccactaattccgccgtttgataacgtcccaccgactgttaaatacaaataatccgtccaagaaaccggcgttaaccctaactccaaagttttattcaacacctcaatccatagccacgcagcgtccacgtcaacatataaacaggtcctagacaccttgatacctcgatcccggtttaccatggaccgcatgttgaccacaactccgtctttagccgaggcttggccacggtggctgtgtccgtgaccacgagcggctaaaggaaaagacagttgagagtcaaaagagagttttatgagatctgtgatgtcttcaacggaggaagggattaagacggcggaagggaagattttggtgacgtggccgaaatctgtggcggctgattcgacggaggaggaggaggaggtgagttttccggcgaattcgttgtgtgaaaggatattccatggttgtggtgatgtgttggttgtgatcggagttgagagagtaatgatgattactattgttattgctataagacgaacttgtgaacgaagattataactcgccattttttttgagaaataagtctttttattttatgaatagcttgattcttatcaatgaagagtagtagctgtatatatatagacacgcatgcagacacatgtattgtacggattttttgttttttgtttgtgtaaaaaaaaatgaaaaatcagtgagcaagctagtatcttctctgtatataactagtaactactaattattgaagagtttagattatttgaaacaaattattttgttttaactaaattttattttctgtatattcctataataaaaaaattcagttgacccgagtaaagtagatagctgatataataattatacaattccgtatttaaaagagtatgtatgatataagttctgtatgacacgatacgcgttcatgtttttgttaatttattacaaaaatttacaatgaatgatcaaagtcacgtgagaatctaattagcaaaccactggtttcaaactttcaatagaccacaaaagcaatagttgtaactgtctgaacacgcacggtgtcgctcactagttaaatggttctgcataaatattccacggtccattttgtacattactacattaatagtttctgtagtattgtagtaatttctcatattgtgactcaaagaggttttgcagttgaggttaagcaaaaaaaaatgtagcttcttttgatattcagattatgcagtttggatcctatgaatagatatccatgttaatgtttcacaaactatatagagtaatcaaatgtatataagtctatcaatattatagatgaaactaattaattgattaactgatataatagctaaaactaacataatgttgtaatgtatcatcattcccaccaccaccataatcatcactgtaaccgtgattagttgtgaaatagcaaaaaaaaaaaatgagcatgtaccataatcatcatggggattggagattggccttagatcaccatatacgatatttccccacggacaataaatcttgacccttggattgatcacacttatattagaacttggctaggttttttgtgagagttaaacttgactcgaattcttccatctgcatgtaaataagagtaaatgatgtttttaaaataataacaagaagaaatttgagtttacaattttttaaataatttctgggtttatctaatcaaaaacttaatacacatatagtatgtaaacttcaacaacatcagctagttttattttcttcttcctacctgttgaatatattttacgatcttgttgtaaacaatcggacctataatactttacatatattaatgttctttttgaagaatatttctcattaatatccctactagatgatgtttccttgtcacaattaggtcatcatcaaaagaatctacaagatctgcttcttctgaggtctgaataatttatttaatttccttcctcgcgactatcgaaaagtgccgataattctaataaattaacaatcgtaggccaaactttgtagattcgtaattaatcattgtgccgtaaataaacgataaaaagcaagacatggaatatcctcaagattttgttctgtttgcttcttttgccacatgttaacttgttgtcgctgcaatttttttttatcttttactaatgaattgaacttaagcaattataaaaaaaaaacactccaattccatttgctataacaaaaattagaatttagacagaatattattaagcaactggaatttaactcgtggtataccacagggcaaatattttatttttataaataatattattaaattttaagattttagtttaatattaaaattatataatttatattaatattataattaaaaaatttggtgatgataaaataataaaataaatattgaatctgtgtttctaaaacagtcctgctatatttcatatcaatccaaatccgtcatgctatatttttcgtctcatgatatttttttttttataagtttaaatattagttgtggaattaattttgattatgattttataccgaaaaagttatggactattaattctatggaatattcaaaccaaaataaagaatgtttttaggtgcacatataattgggtttgctcattttccgggatcgtaaatgtattttttggtttgtttcacatttgttttaatttattgccgaaatttaatacaaataattcaaatagttcaaattttggttgttttaagatttagtaaatattgtaggtaaaataaggaaaagttaaattattgtgttttgcgtgacatatgggattgccatatatttagaatctttttggtttgttacacaattaattgtcgtataaaaattcaaaccattaattaaaaaaaatcaaataatttaaatccattggcagccattgtaaataagttctaactttaagatttatttcataaaatggatataaaaatgtatatgtagatcctacaaataaatctattatctaactataaaaattcacgtccaaaaaaatacatcatagccaggcctgatcataggtataaaattagggggatttagcaattctaaaattaatctattatctaacaaaattggatatttataatttaacaaaaaaaaaaaaaaaaaaaaattgatattcataaactactattatagaaaataatttattcttttgccaaatccttctttctgattgaatgaataattttatggattaaatgttgtatgtataagataaacaataagacgttgtacccggacagcaaaaccgtgctaaacgcacgtgtagttgtcattttcccatctttataacttcatgtcgcgaaaaataataatttaagaacgataacttgagaaaatagagtatagactatgaacaaaacgaccattgattaacggtgctaaacaaagtatttataaataaaaatgacattcattatgaccccccaataaggtggccccgtaattggaacttgacaatttagaagatcttcactcgattgtttttctttttattgtcagcgacctttacttcagttttattatcttaaaacaaactaaagatttgcccaaaaaaaaaaaactaaagataaaaagacaaatcattaaaatttggttgagctgtatacgtttgtaataatggaactggattggagagaaaatcaaaaagaaggaattagtttacatgtatatgtataaatgtttattttttcttttaaatataatttaatattagattcaaaagaaaaaaggaattagggtaatgatttcaattcgtgggcacattttgttatattcgtatctctttgtatttaattaaataagtactactatttgagttgtcttaaacctttatttggccatgcatcatcatgctccatatatgttcccttcgtttatattattatccattcatcattataagattcaagacgcatgtgcgccgcacctcataagtaatgtacttttcttgataaatgggttggcgaaagatatggattctcataattggcaaattttattgcgatctaagtaaatttagagcttcctttaggaggtttaacttctttcgggcttgagcaaaaaaaatcattttaactagtagtattggttgtgaaacttttgggtctgatatataattaagaacttagcgtgtgcaagaaattaatttatcgaaatattaattaaccaaaaacttgttattataataaaaagatatatgtattgtgtagctatagagacactctatacaattacaagagacacatatatagacgatgcatgttttcacgtgagtgaaaatttctagataaattgattgctgtatgcgtcgtattataacatcattcattgaatcttttgaaattcgtatcatctttagtattaataagtacttgcattagtaattttgaaagccagatttagattagagtttaagtgggagtggaactaagcaactgtatgatatggcttacgtcacatattattgaatgtatgatatatatataccagtgtatagataggatcaaaaacattataagatttttaaataaacccaactaaagatgtttaaactttctacttagcttatttaccaaattacgtgccaaataccaaagtatagaaacaagtcattccgacaaccacgttttcaaaattaagtacaacagcagatggtcacagccgaccaagttgacgacaatacatacaaaagcaagtattgaaacacgtaacaaaatgttatacgtatctcagaaaataaaggtatacgcatatacatttttagttttagatagagaaacgtaactactaaacggagagttaaaaattcaaagtgatgtagaagtatgcatggtagcgatctaaaaattcacaacattttatattttattattttagtaactgatatttcattaatatagacataatatcatcaagatacaaaactgaagatatatggttcatgctagagggagcatgtgatctacatattggtgaaagccattaattgatttgaatttcttatatggtgagagtaaaattaaaatctatatattactagtttactagtttcaagaaacaagaagaaactgagttgtgaagtaacatacttaaaatgtgatgtggatgtggtaatttagtccatacgattataataatttggtttggtaataaaaggaaaaaggaaagtgaaagtggggactaaggagattcatgcaaatcttcgtagggattctaagtatagtggaccacttcttcgttgtacatagttttcattgaaatggtttatagcaaaatatccatttaaaagtcgaaatatctattaacgtactaatattattatataatattcagatatctatatttattttaaaatgataaacgtttgttcgaacatattcttatgttgtatacgctaatttggatgtgatttgataaaactgaagatacataattattgttcgaacaattagtgtggttgatgaaatggttggtagaaaactaattggaaaagtagcgatggtttaagatttactctctactaactctaaatcgtcaatatctcaagcaaaatgttgctactgtttcggatcgcttgatctctgatttcaaagccctgaaaattatggttaacttggctaaacaattgtttctgaatcattacatacaactctttattaacaaaaaaaacaaacaaatatcggactaaaaccattgactctaacgatagttctcacggaaaagtattgcatatctcagtcaacgaataaagaatacttaacgatcatatatataacatggggtgtctaaatctgaaatgtttcgcgtacatccacgaagaaaatacatacatgacacattacacatacaacaaatgacatatatgtctttgtatacggatacaatcaaacagtcatggacatgataaagacgagacacgtaagacatgctttatacgatagtgaaatctgtcggaagagaatgtgacattaattagacattggcaggatcctacaacaagatcaactcgatcttcgaccaaatcaaagtgtcttagagataaaacaggtaagattttgaagaaaatggttataaaggaatcttaaatgtgggtccaagatcttggaaatttcctcacagctcttttctatgaaacaaagattaatcacttggattctctgccattattcatatctttcgatctctcttttttgttttctaatcttttgacggacgtgattgatttggtacgataaactttctcacactcttatcgtaaaaaacaataaaatgtctaatcttgaaatttgaaaaaattataaatttaactttgataagttcaatcggttaattattttttctttgggttttatcgtcatttgagagacatatgccatcaatcaaaacatatgctttagaaactgtaaaataaaattcaaatcaaaagctaagtttctaagatatgaaaagaatgaaaagtaagcgtaatggctaagtttatttttatcagttatgcttgaactttaaattcgggtcatttttgttctttaatttggtttgttttgtcaaacaagaatagatgctttgatacagtgacgtattatctttttagagttctctaaagtcaagtgggagagtgtacgtaatccggcctatgaatgtccgatcgaatattatcttctcagctttccaatgtgtagccccacaaaatctaacaaacatcgagaaccgggaatatgacgtaaccggacatcccgagtcccgacattttcgtaccggtttttggttttattcctggtacagtttgtattgtccccaagcgatcctttcctgtcctctttcatataaaaacaaccgtatttagggttgaaaggcttaaaaagtgtacgtaagttaaatgggctatggcctagatttctgtaactctctatgttgtgattgggccttctactattagcccgttactttgatatcagtatctagaaagttatgattatgccgttcgaaaaataaagaaaggaattatattaagtagatatgtctgagcccgggttcgaaccggggacctctagtgtgtgagactagcgtgataaccgactacaccacccagactttgatacttagtttaacaagagaagtatattgattcggtcatttaacaaattgttttcattttctcatccaagttgaaacttgaaaaaagaatcgaggaaaataacaatggataaaccttaaatgatggtagtagcaacaacaacggaagaagacattaatcttttttttttaaagtaatttgtaagttttattcttttttgaaagcatcatgaagaaaatacttgagtgttggttagagaggaaacatatttttaaaatagtaagaaaggaaatcgaagttgaattgaaagtttgacattgttttgttaaacagaaaaaaaacgtaacctaaagagatagggatgaatgtgatgattatgacgaggattaatttaatcaggagatgaccgaaaaagtctttttcgagccacgaataaaacataaaaaatttcaggtctgaatttcgtggccaagaatggtttgatggatttgattcggatcactaaaattctaaagtctatattacaacgccttatcttacaagtttggattcgttgaaataattccaagtctatcacatagtctatgaaaatataataacgtattacaaaaatgaaactagatgcatgattaacaaaatttcttgaaaaaaaaattcactactaaaacaagtacttcgacacgtaacttatattaaaacaaatagaactgattgatgacattgtttttattgcggtgtttccataacgttaaaaaacttaaaaatgtgatttcaagtcgtgactagaccatatcaaatgttttgtttttggttttaattttctacttaaacgttgcttgttgtaatactgagttataaaaaattgaagttttgaatcagtatctgatcttatcggctttcaattatccattcagtgaacattacgttcggtaatggaatatacatatgtattaaatgaatcatttaatgttcttaaacttaaccttatactttaatgtttataaaagtataaacatgacaagagtgttaatgatattttgcttttgcttatagaaaaagcaaagtaattatagctcccctaaacatcatttataaagcttaaaataatttcttgttaaataaatagtttcattttatttgtattgctaaatactaattgttgacattttgcaatcacatgtacatgcataaattgaattataatattggtcagtcgtccacttataatattttcattaacagtttcacgtataatctaaaagtatatatgatacaaaataggaagtatatctgtatatgtacaaaaatattcaaatagaactcttaatataatctgtatcatggcacgaacaattttgcctagaaaattttaaataaatagaataaaccaacctgaaaatagggcagaaaataggaaacgtgtaccaaacatctcgaaaaaattgccaagtgaatgaatgatcattagaattaagacgcaaaacaacgtcctagatccaattttaacgccacacatacttcgctaagcaactacgtttttttctttcttgtctctttatgaactaaacaataacaaattcacattaactaattaataaattacttaaatatcctcaaacatacagggatattatcggtaattcagataatgtccactcctgtctcctacgtgaaaaacggcggcaaacaaaaccgcgagccagacatcggcgaggaatacaataatcaccggcgacggagacggcttcaatgggccttaagcatctccttgtacctcagaatcgaatcgagtctctgtaatttcagctgctgtttgaatttgttgatgaaatctgaagctttcgcgtcgacgccatcttcgccgtcgccgaaagacgtcgatctttcgactctcgttgtatctggtcttctccgttcgagggattccaccgtctccggcgcttccgcatggcttcctgcgaaaccaaaacctgatttctcgctagccgattttgtcatcttcgttaaagctttcttcttcttcttcaccggttttttcgattccgatttgcttcgtacatgcttgtgctcctcgtgaagaaccggatccggattttgtttttgatccaaatccgggtcggatctgtagaaggaggatagcttaatggatttgacccgttctaagatagacggagctcgagttaaaccgggcgggttaatttgactgttcactccggttccggttggttgatcttcttccgggattctgaattttgagatatcaatcgggtcaacccgacccatccgggtcggaatactttcgaatcgggtcggttctgtgtgatgagcataatcattctcctccgggttatactgctggaatttgaagtatgacatgttgatggatttgacccgatccagaagagaaggagctcgttgtaacggtgccggagccggatccgggtgtaaatctaggtgggagtgggagtgggagtgaggatccgacccggttacgtcgtgtgggaacttgaaataagacatgttgatagatttgacccgatccaaaagagaaggagcacgttgtaacggagccggatttggatccgggtaaacatgaagatccgacccgattatgtcgtggtgagctgtcatcgagaaaagctcagtttctggatgaggaaatttgtagagatgaaaattgatggacttgactcggtcgataatcgatggagctctagctaacggagccggagcatgacctgacccgaatccatcgtgatgctggtaatgttttcttgaacctgacccgagtcgagaggttacgacgattgtaccgatcataagattaagaaggaggaaaagagtcgtcggagtgaaaaagctcgcgaccgtcgttagtaactccatttttgggttgtgttttatgttggttttgtcggaaggagaaatgagcaaaaggagtatatttatatttggattttgttttttgttttttttgaggtttgcgtttatttatttattttacttcttttgtaaactttttgactgttatttatttggtcatttgaaaatggttttttgttttgattatggaaacgtcgaaagtatagagttaatgtgttcacatgagacgcacgtgaatttctcttttcttctattcatatttcgtccatattattaaatttaaggaagtgatattttttagtattattctgtgtggagtataagttttcaagaacagctaattattaatcagactaattttattataggtaacaaaccagttacaattgtattgatgatgactccgtgaaataaaacactacacgttaatgcaaactttccattatacataaaaatacgtacacagttggaaaaaaataaaacactacacgttaatgcaaactttccattatacataaaaatacgtacacagttagatttttctttggcattcgggacgtgtggaccaagtcatctcatcttttcagaaatttcattattggttgatatcaattgaatacgaccgaaattcaagatccgaacaagactaattaccttaagttttggtcttggcacaaataaattctagattttatgggcataaaatcacttctatacgcataaaatgaattgtatacagttaatataaaagcatctttgaatgcggtagattagtaataagaagctacggtataaatgtaatggataagagctggacacaagtgaaatagagatgctctgtctttgactggagaaagttatgtgtagggctcatcgtactgttaaatcatataaagttccaaaattattgtctcgtgagacacccgacccatcttaacatagtgtgtttagaccactcatttcaacacgtttttctctgtaaagcttacaaattgtaagtactaactctattatttacacatgttttacgtgtataattcttctggcttgactttagggttctctgggctggtctcaaattaaatgattcttgagctaagctacttctacttgtaatttgtactatagtatgtaaatggttgtccttttatgttggttgagttgagacaatataatatatactgatttttatatattcaataacgcaatgcaatttgaaaagaaaaaaaatctcacccggtgatggtaaaccacgtatgtagtgactaaagtctaaacatataattataaaaaccggttggcatgttaatatacaaaattattgagtaactatttcgactagggtagtgtttaaatattgatgaaattatcttagatattttgaacattagaaatatggatttatcgttgatgcttttttatgtagaaagtgtaggatatgaatgtgaagaggtaacttaagttaaaatacaatgactaaaattaaaaatacaatgactaaaaactgacttctaaatttgatttttctactttgaaattaaaatattacagaagagaacatttactcaaaatgtggagtcgacgacatcgcgtgggggtgctacctgctacaccgaccttttacggttgactttgatttcttaaacacatagtttgaaaatattactataaaaattggtccactcgtagctacacgtctctcattttattattattattattattattaaaagttattgcatttgcatacttgcatgtaactggctagtggctacacctacacccacgtgggtcgccatagcagcatttactataacgacggataacgaacaaaatatatggactttatatgattcattcagaaattttcatttcatagactgtgactttttcttttatgcattatgaccttatgaggatgcatggtccagcttgagttatctcttgtgcgagaatgggttatatatgtaatatgtagagctggatttataactttttcggttcagtcggagttctatatagaatttgagaagagtgtttttgaattaggcgaaaagtcatttcgtttttaggtgaattgattcgatttgtgtcaattgaggtcggttcgaatgcatgtatcattggattttatttttccattgatagtgacttagctactactagctagtctactagaatcatcggttgcataaaattagtttaatatgtacatcatgatatcatctaataaaataaaaaaatgaaatcatctaatatgtactatccttacgcatttgctaaatttatttctaaaatgatatattatatggtttagagtccgtacgtggattgtatatgaaccatgaacatcaatttgtaggtaaggtactacgtagtctcgattggactgactagtgactacttcgtcccatgctataacaatatttctattatttttttatgacctttttaaattgacatttgtcgtattttgttacacaatttttttttaatgttcacataaccccaataaaaatgagttaaaacttatcacatatattttcaaatatcttattgaaaagtcatacgtaaacttacttacttacaagtgaacatatgaaaaaggaaacaaaaaaacttgattaaaagtgaacttataagacgtaagtccacaacaaggccagacatacacgatacgaacggcccatggcctcatcgcaaatcattcatatgtacattaggtagtagactaattgtagcatctcatattttagattacaaaattaaacattgttagaagttgatatttacatgttagaatattggaagttaaagttttatactcttatataacaaatgcttttaattaggaagacaattggcagtatcgactaatcaacacacaaatttcctcaaaacaatgaatttgtgtatactcaagttttttttaacaaacaaaaaaaatagctagtcggttgcaagtgttgcttgaacagaaagtttctcgttggagacaatatgtactttttgttaagagtcgaattcatggcgtcgcatagaatattttttgttgttacatcaagtcaaatttggataacatggggactgcgattttaaggatatgaaatatgatgattagatttttaaataaggattccgctataagtaagaacataagttggaacaaagctctttaactaggtttcctcatgatatatataagtttaagtcgtttgataaaaaaaaaaaaatatatataagtttaagccccacaacttaccaagttactagagctctaactaggattagaaagagagaaataagaaacttagacaatacaaccggacacatttgagtttttgttttcacggtgaggattatggtgacgacacgggctcaacttctgcaggaatccgagtgaagaaaacttcgggtatagacatgtaacccgatcctggaccagtcacagtgaaaagtatggtgggtaactctgcaagcaccaaataatacagttaagaaaagagaacctcaaaaaaagtcaccatggaaaaaccaagagaagagtaaaaagatccacctgggtcatcatcatacaatggaggagggggatccacttgaactgcagcaatctctgtatcataaccacatacacactaatttacatcacatatatgccaacgaaaccatacatgtattctaagagaaaatatccaataagttgttaaccatcaaactacgaacctaaacctcatccaaaagaaacctcaagttttcagaagaacataaaacatgaagcacactaaaattcccaataaactgcaactgtctatggatggttgattaattgaaaaagaggtttcatgaagataccttcatcagttggtctgagcctgaagatataaatctgacagaacgttggtccacagagacgaactttagcttgataaagtctaggctcgggatcggatgaggccaaatcccgagccaaaaacgttacccaataaagtataccagcacaccacctgtaacttgccgacacgtgatcgaccaactcaatccgacttccctggatacaaaactttgtgagcaagtaagaacaaacaaaggaacaaaaacattcattcattatatcaagacgacactgaccgtatcaaacattgtgttgtgtaatagcacggagagccacgccatggatcatttcatcattggtactgcacacatcaagacggaatggatccatgataggcctagtctcgaaccgaaaatccaatttatcccaatcaatcacgaaaccctaaaccacacaacaacaataagtgagctaaaattagcatatcgtgctggtttcaaaaaccaaaatttttttttatcaatgagtagatccaggtttcaatcgaggtcataattaaaacctaattcctgtggggagaattgaagatatgtacctcgctcttatggtactggtagtataagatgtactgtcgtacgtattcatcgtcgtaagggtcgtatctccggagttctcggaatgtgtagccgtaacttgattcgctggagaatttctccaacctcggcttcttccgaatgtgaaaatcccccgtcgacaacgaaccggccatggtcggaaccctaaattctgcttctcagcgagaacaagagacaaagtgagccaagaagttttttttttctttcaggaaaaggaatgctgccttaacacgtgtcagagtggcgtatcatatactgggcctttcatgggcctgcttatatttgtaaacccattgtgtactcttgttgatgtgcgttcgtcttatcttatcccaattgagttctagttctttgtgtctttcctaatttccctactattccaattaattctttatgacttttcaaataataccctaagttctgagctaaagcatctcacgatgaacttctttaactaaatcatcaatatattgtgggttgttcgtaacaatttttcttcgataattgatatcatcattatattaaggcatcgtacaaacaattttcattgctaagttgtttgtttttgtataaagcaacaaattcccaactattgtttttcaccttttcgttgtagagaagaaaactttttgaaaaaaacctcaagttttagctgatccattttaaaaccttcaacttaatttttaatagaaaaccccatcaacttagaaagtctaatgaaaaacctttttcagctcatttgtacctctctttttttttcattgttcatttactttttcatattttatttttctgatagtttgccattcaaattattcttgatcattaatccaagatttttttgcttttgttttcctctttttatgctttgttatgacaaaaaaaacataattaataaaatacaaagtttatgaacattaatgaaaataaattcacacttgctacaaatccacatattttattttatttttgcttatgtagtatgaaatatagtaagaattgttttatgaacaatgatgtaattaaattacactttgtcttgcttgcttgtgtaagatgcacatgttcacaaacaaattcatctgtaacgtcaacatacatctagaggtatatgttgggctatcgctttggtgaggagagtatcagctcttttgaagatacacttgcttcaagagaatcagttcataaactctctttggtcgctaatttgtttattttattaatattaggagttattttactattttttaaaagattaaaaaattcatataaaattcatacaaaattaagcttaaactttcattttgttgattattattaggttagagttagattatattaaactccactaatccaataacactataaaaagcataaaccgtaatttgtacttattttctcacgaccaggtccattggcccattctaaagaaaaatgggttcataatctacaaggcctacctgattataggccatctaaaagattcatatccaataaggcccacccgattctgaaatatgaaaatgtgtgagatttagtaatagtacccaatacccatagaatccataaaataagcttacgaatttaacaactttgtacctaataataatcaacaaactgattgaagcttaaaagcaagtctatcatgacaattaacaaacaagttttatgatcatcaatcataagaataaattaatcctttttatcatcactccaaggagaacatatcttttccaacccctttccaatagagcatgcgaatccagctctctccttttccggtgagagagaccgagaacgcgaaggtgaaccagaaccgtctttctccttcttcttggaatggatggtgtcgatgacggcttcgatttcttccttggctctctccaaaacattaggagccttcacttcatccaccggtgtgttctcactgatatcatcactccttccatgagtttctttgtgatgatgatgaagatggcgaggaggtttttccttcaggaataaagatttgaggtcttccctcgcctttttcaacatattcggttttttctttccatcttctgtcaatgtaaaccatgtgaaacgaagtgagtcttgaacaagaaacaagaatgaacacaaaacatcacatttgtatccatgttcaaatcataaaatagacaaactctgtagttatgttactaccaaaccctgtaagtctcgagactaacaatcgatccgagaaaaaaaattaaacgatttgatgcaatgatgggagaaaaactggtacctggtttatctgatttgaattccattttatccctgaaagcgaatttataacacattagcaaactccaatgtttgaactctccttattcataacattagagacagagaagattcaagactagttacaaaagtgtatcagaagaaagaaacaaacaaactttgaactcttgcgttgatgaatagctccgataacagcatcaagctcttctttagctcgttcgaacatgtttggtgctttgaccttactctcatcaatatcaccctgaatctttttgtccgaacgatcttcatcacctaaacaaacaaacaaaagccaaaaatcttataacatgagacacacaacaaatccacagtgttgttcaacattacaatataacacatcccaaaaaacactaatttcctagaacataaccataaatcatcgttgattaagctcaataaatcaccagtaaaacccccaaaaaaaaatatctgcaatgaactcaatgataatatacaaattgccttctaagaatctcaatgattagattcatacattcaccataaaccaatcaatcgcagaagagaaaacaataatttgattgatccttaaataacttcagtaaaactaataaatcatcattaaaccccagaagaagaaaaatatcatctcaaaatcagaataaacacaaaatcaatttaagaacgagaaaaaaatcaaatcgaggatgagagaattcgatggaattaccagaaactgtgttgacagcagtcgtcatcttcgtcttgctttagacgagaatgagcaaattcgatggaatttagggattttgtaggggttttattgtgagagtctgaatttgggaaaaatccgttgagaggtaaaaattataattgcatgattcccacaaggcaacactggaattggtcctaatttgaaacatcgccagactgttttagcttaatattgggtcccacttttatatgttttatgctaattaagtcattaaatccttctcttttctttgtttagaccgccacgttaactattttataatgggcccttacaaatattatggcccatgggtcttacgttataatggtcatctttgttttttttttggttcagtctaactttaacatgcggagaacactattggatagatttttactcaagagtcgacttttatgaaatcgatccattcatattttgagttgccatttctttcttatatgaataaaatatatttttaataactatggaaaaataacgaaaataaaaatcattatagaatagtattttttttatacaaaactacataaatgatatggatacacgtctagcaaaatagcccgttatttatttacactcttcctttaaagttgcaagtcatatcgtgtctctgacttatcggtgcaattttagacaatacagtttcaaactttgacctcttggtcttaggtcaagccaatacaaaagagaagaatgatcattttataaaatttaattactcataatatgaaatcgacattgagaaatgtggccagctcgtcgacataaatagaagaatataaatgaacatatatatcagagtaactcataatatgaaatcgatatccaaaatgtggctgtaatattttagacttaacgacaacgcattatgtagttattttcacctatgcgagaactttaacatcacaacgacacgaaaaaagtaaacaaaaatattcaagtcgaaatactcgtggtacggtcttatttgttgaccaaagttattagttttaaaattttaatccattatctgggaggggatggatgttttacttggtaaaagggtatgcataaatttatatccaaaacccttttcttacggctcaagtagagtcttctaaaaaaaagaagaagaactagagtcttctcaatgcccacgaagaaatcaaattgtatatgtgtagttctctaactataacgtacatacagtattgttattttagctattcaaaatatattggtaattaaaaaattatttgattgtttttcttgaatataacaatcactaattaattattctcgaatcaaaaacgttcaaactaacatattctttttagttttaatagtattgattagtattaatatgtacaaatttgtgaaacgtttttagtccatttgtgacgactgcggtattagcattccgattatatattttgggttaaagataaactttaacgatcatatgacaactagttaacaaaaaatgttgattttgtataagtgtaatcttggtagtaatatattaacacaaacgtgtcattttgtgtcgtgtaaaaggagaacaagtgagacaaatagaccaacagctttgaactaacacgtacgctgcacaatttagtagaaaacaagaagaagaaactcttttgagaaaacccaaaagtaaaaagacttgaccacaattggttgactccgcatttacacaattacacctcaacaccccgaaccggttttggtgctctttaatatgatgtcttaatcacatacatatatggttgctttctttgaccatcataaatcatgctagtaatatttatgtttttaattgaatttaaaaatatgtatggaccactgaatatcaatttaatcaaaccttttcagcttttcttaatcatattggctttgcactatcataatcgtgaggatattatttaaattttagtgacccgcactcaccaaactcgaatgttatatatctgatttgatgtgaaaccctctaaccaagccgagatttattttacaagtttttgtttactagtaacaatgttatatactttggacataaaatgatatatatatatatatatatatatatatactcattaacttattgtataggacatgaaatcaatatactttggtattaccgtcacatatttagctgtattcttaacatatgattgtgttgttcttgtaaatttgataggtttcttgattcaataagaaaagcgcacaacccaagagaatttgattatactagtactcgttatcgaagatagatatagaatgaatccgttgaccgaataataaaaacctaaataatcatcgggattaaaaatatgaaatgcatataagctagtaataaaaaacgacgacgtatgcaatgatgtccccacacgctccggacgtaacgccgtgcgtagatcaacaacacggtcacacacatatgtacagtgagattgtatatatgtgtatgcaactcctaatagtgttatcaaaacttaaataagtaatgagtaccgataatataattcctacgacgacgtattcaaagttgccccacacgctagtatgtattggaaaaattaacaaataaatctaaacattgaaatatgaaaatcaagagctcgtgtggtttgattttttatggttttaaatccgaggaaaacgtaaaacctttgaatcaacaagactcgaagaaaaatcttcactgcgtatcttaaggtccaatcccaattttgttctcacggaaaaaaaaatctaaaaaacattcataaatatattctcattaatatatatatagagacgacagatgagcaaagaagagacataaccataaccataattcttcttattgtctttaataagtgtttctgttttcctaaaacattcgacgaaacttcttcagatcgtaatcagtgtaagtaccttcctcaatctttggatttaaaaccatttttctttcttcatcccatgtctgaatcttttctttttaattttaaaggtagctttaatggctttatcttttggttacttacaaagagacaacagtttcaagaaagattcacaagagtgcgaaacaccaagaattcgcaaaaccccagtaaacatgtatcttgagaagactttatcgttcaaagatttggtcgatcagaggaacaattacagagatggaaattgcggggtgaaaacgagaaaaggtataaacttgaagggtcctaaaccagataacatgattcttgatcggagtctctcgttcacgagtctagtccaagtggaaaacagaggaggagaagaagaagacgaaagaggctcgtctccgaaacgaaggaacaggggtaacttaacggcgttaagtttaccagcaccgacgccattttggtctccgagaccgtccacggagctagacgctgccgccgttacgttacaaaaggtttacaagagttatcgaacgcgtagaaatcttgctgactgtgcagttgttgttgaagaattatggtacgtttgaatttcagttttatacattttaacccaatgttgatatgaaaattatacttaagtggtgtgtttggtttaggtggaaagaattggaattggcaaagttagaaccgaacaaaaccaatgataaaccagagtctgctgtatcaaggtgggcaagagctggaacaaaagcagcaaaggtaataattaattattcactagtcatacattatcatcattaattcttactttggttaataaaatagtttgatatgcttgataggtggggaaaggattgttgaaagatgataaagcacaaaaattagcattgcgacattggttagaagccgtaagtttaggcttttatttattttactttaatgtatacatattcctttgatttatagtaatgattttaaaaaattattattacagattgatccacgacataggtacgggcataacttacacttatactatgatgtctggtcagaaagtgagagtactcagccatttttcttctggtaaattttacacaaacttagtcaaattttgatttcgaatgttccttagtaaatggagctgattttgatagcaaaccttctgaatgatactaaaggttagacattggagatggcaaggaagtaaatctcaacaaatgttcaagaactcttcttcagcgtcaatgcatcacttaccttggtccggtatgtacacatggtcttcggttatttccggttggtaaaagaaaaccgattttagttctggtttttgactaacagaaagagagacaagcttacgaagtggtcgtggaagatgggaagttagtcagcagacaaaccaagagccttgtggagactactgaaggaaccaaatggatctttgtgttgagcacgacaagaaaactgtacattggtcagaaacagaaaggtcggtttcaacactcgagctttctctccggcgccgcgattaccgccgccggtagaattgtttcacacgatggagttgtaaaagctgtgtggccgtacagtggtcattatcttccgacggaagagaatttcagagaatttatctgtttcttaagagaaaaccacgtgaatctcactaatgtcaaggtgattaagctaattaaatctctaatcccgcattttattatttatttctttgctatattttaataaactttcgtaattaattgtgttgtagatgaatgcgattgacgacgatgatcatctggtcaataatgatggaagcactaagccgtcgatgatggtggcgaaatcggacggttcagatgaacagaaacgattttcatgcaagtggagtacaggaaacggtccaaggatcgggtgtgtgcgggactacccaatggatctgcagacgcgggcgcttgaacaagtcaacctttctcctcgtgtagtcaacggaacaatgggattatttggcccaataccatcgccaagacccagcccaaagattcgtgtctctcctagactatcttgcatgggtcttccaagcccaaggcactaattttaccaattttcctaatctgatcaattaaattatttcaaaatttttgaatattccttttttttttcactcccctaatagtattgggcgattctttatttagagtataacttgtactcatttttatttaaaataatttaattttacatgtatttttatgtttttgaggtttgtaaccttttatttactttgtaccttcgatatcattattttcttcaatcaattataataaaatccacttaaaataatgaatgactatttcataatagaaaacagttatttatttcgactgtccaaagttacaaatatttaattttcctcctcgtacaatttatgattaagaatttagactagtaaagtcaaaataccgagacaaaactaaaagaatgaagtcacgtggggattacgtttgagtatatttgactcataatgatggatggaagtcacgtgccaaacgatctttaccgctcaccaacggcacgcgtagctctcacgcttggtgacgcatttcttactcgtagccaatcccaattttctcacatttttttaacttttaaaaataatttaaaactctacgcgtgttataagtccaaattccaaaataccgaactaaaccggaaaattaaaaaatcgttatgatacgtaattaatatgagttgatgaaatttaagtatggtgataataagtgattgatattgggtttaagtttaacataacgtattagtttgaaaatttgaaacgatttatagttatttatttaaccggatttcggtttaataaaaccgggatatgtggaaccgtgtaagctgaggaataatagttacctgtaaggaaagagaaaaaaggaaagaggagagaagaaagaaaaggaaaagacccaaactttgagaaacaccttcattctcttccttccttcatcaaagcttaaccttttttaatttttatcctcgttttttcaattcgcgtgaagagacagagagagagaaagataaagctagaagagaatcgacattacgaatcttttgttccagatcgtgagagaggaggagttggaagaatgaagatgactattgggtctttgttccaaccctaattttgcagattaatttcgtttttgttgatttctgttttgggtttgcgttgctgattccggtggattaaagggttctttttggagagcacaaatttgttgggtttttttttggggaaagagaattaaaattttctcctttagagtcggcgtttgggttgagagagattattatagtttttagggttttggatttctgaattggtgattatcgatggagcctcgtgtgggaaacaaatatcgtctcggccggaaaattggaagcggttcatttggagagatctatcttggttcgtcttttcttcaattgattttgttttgaaattgtaagttagagtattctacattcctaactttgtccttggaatgttgtttgtttaggtactcatattcaaacgaatgaagaagttgcaatcaagcttgtgagtttcttcctgcaaactttgtttttgtgttatgtgaaggtttttattgcagatagagacaatgtagtttgtttactatataaagagatggatgatggattaacttctgaagttagattttgacattggttagagcttaaaaacatttattgagttacttgaattagatcaacattgatgataatttggtacaaaagtccaatcttcacttgtccatcaaagcttctttcatatttatggtgctacaaggcctttggtgcaatactgagagtaatttttctatcttattggcaggaaaatgtgaagacgaaacatcctcagctgctctatgaatccaagttatacagaattctacagggaggaagtaaatattcatttctgataaacattctttttgtcctttgtttttttctttctattagctctttcataaccatgttcttaatctcttatgattctttaataatggcagctggtgttccaaatatcaagtggtttggtgttgaaggtgactacaatactctggtgatggatttacttgggcctagtcttgaagacttgttcaatttctgtagcaggaaactttccttgaagtctgtcctcatgctcgcagatcaaatggtagatctcttcttctgtttatatgtgactccttttccttagattagtctactgatcaaatctgtttatgttcagatcaaccgtgttgagtatttccattcgaaatctttccttcaccgagatcttaagccagacaattttcttatgggtttaggaaggcgcgcaaaccaggtttccttcacctatattttcgattttgttctcatttagctttcgagtgatctcaaaaatgacacttttttatttataaaggtacacatcatcgactttggtcttgcaaagaaataccgggataatactacccaccagcacattccctacaggtgagacaacagatttgtaaccagtccgtgtttcttcttccagcgtacaatactaaattcttccatcatgaccttttttggcagagaaaataagaatctgactggaactgcaagatatgctagtatgaacactcacttgggaattggtaagcttgacagaagattttcgtttttaatactctgaagactatgcatatgttaatctgttttctctgtccgttttgaacatctagagcaaagccgaagggatgacctagaatctcttggttacattctcatgtatttccttaaaggaaggtgagtattattacctgcatgacttgtggtttcacttcgttcttctcatactttattaaaatatgtctcatggtttcttttttagtcttccatggcaaggacttaaagctggaaccaagaaacaaaagtatgagagaatcagtgaaaagaaagtctctacatcaattgaggtaaagtctcaatcacaaagtttgattctttatttcaaacttctacatttttttgcttacaaattgctcattttcctccagtccttgtgccgtggttacccatccgaattcgcatcgtacttccactactgccgatcgcttcggtttgatgataaaccagattacggttacctcaaaagaatattccgggacctctttatccgcgaaggttttgaagcttttcttctatccctcccacatattttctttcccaaatctgcgctttctaacactagactgttttgcagggtttcaattcgattatgtctttgactggaccatattgaaatatcaacagtcacagctaaccgctcctccatcccgtggcctagtaagtcctgcggttggaaccagtgcgggtttgcctcccggactaaccagcatcgatagatacggaggtgaatttgtttaaaatgatgagctcttgaacttatcaaatgtttaaaactttgaaagttgaaagttttgtttgtttgtttgaaggcgaggaagaaggaggaagaccaccaatggattcgtcacgaaggagaatgtcaggagctcttgaaaactctggcaacttgtcatctagaggcccaatggtatgacaatattgctctgtttccttgttctctatctctctctacacgaacaaacactgctttagcaaatctaaaactctatatctctagatttaaagtgtaaaaccaaatcttttttgtttgaaactttttcgttagcatatggtagcaatcacgttttgaatgtgaatctgaagttagtaatcttccccgagaaataaaaacacccaaaaaaccgaaatcgtattaaatttgcagagaaaacaacttaaaactttcagtttttatttcgaattttattatttatttggaaaaagtaacattttaggaacttgagaatgggaaatctcaattcaaaaaagggttcttatattatgtcgtatattcaagcttcatataataggattaaactaaactagtttccagtttccactttcttacaaggtaagtctcaactttcaaataaaacaaatggatttaaagcaaaataagtacatatttgaattcagtatttggaattggaacatcgttgacatgtatttttaaatggctctgaattttgcgtgtataagtgaatggatctgttgcgtgtataagtaacaaacaatttgatgtgttttgatgtaacagatgccaagctcgtcactgtttgcacaatcagcaggatcatcgaggagagtaacgtcagaggagctacagagatgccgaaccggcgccggtttaagaaactctccggtagttacaacgccggaagggaagagatcttcttccaccagaaaacattacgattctgctatcaaaggcattgagactctccaagtctccgacgaaaggtttcaccaccactgatacatcatccatccatcgcttagcaaagttgtcgtatttgttcagagctttttatttgctttcgactctatattggagaaacgagaaaatttgctgatttttttttgtttgctttggttttttctaatttttattcatctggttcttttactgcggagggaaattaaattcagtgtttggaattggaacatcgtatatatagttttttagtaatactgaaaatgtcttcttcagtagaaattgttcatgttattttcgttcactgcatagtgatggaatgaaaaaacggggtcaaattaatagaagaagtaatataaagggggcaaaatgcaatacacatgaagtattaagattttatccattacttcacacatgacgcccttcgtctttttccttattctttctcctctcagaagagtttacttgttctggaaccctaaatctcgaatctggtaactcggatccgataaatcgttccagagatctgttacttctctattcaaggatctgttatcggtgcgaggatctacggattcttctgttcgcgcataatcggtgagtcttaagaatcttcagcttttcgtttgattttgatttatcgtaagatctgatcggtccttagtgtaatcactttatttttcccctgttaagttcacgcgtaacctaagaacttgaatttgatctgtaagctagatttaaccttggttttgtgtattgagttcgttctcggtggaaattggcttatggtgatttatggatgtgacattttggaagtgtttacaaagacgtatttagaaatgcatttggcgatttgctcgatgttgatctgttgttttctcgaacttagctctataagttttgtaattgtaggaaatggcagataacaattcaccacctggctctgtagaacagaaagcagatcaaattgttgaagctaatccattggtgaaggatgatacttcgctggaaaccatagttcgaaggttccaggattcaatgtcagaggcaaagactcataagttctgggagactcaacctgttgggcagtttaaggatattggggatacgagtttgcctgaaggtccgattgagcctgcaactccattatctgaggttaagcaagagccgtacaaccttccttctgtttacgagtggacgacatgtgatatgaactctgatgatatgtgttcagaggtatacaaccttctcaagaacaactatgttgaggatgatgagaatatgttcaggttcaattactccaaggagtttctaaggtgggcactacgtccaccgggttattaccagagctggcatattggagttcgagccaagacttcgaagaaactcgttgctttcatcagcggcgtgccagcaagaatcagggtgcgtgatgaggttgttaaaatggcagagatcaatttcttgtgtgttcacaagaagctcaggtctaagaggctcgctcctgtcatgatcaaggaggtgactagaagggttcacttggagaacatatggcaagcagcttatactgcaggagttatccttcctacaccaatcaccacctgtcaatactggcacaggtcattgaacccgaagaagctaattgatgttgggttttcaaggcttggtgcgagaatgacaatgagcagaaccatcaaactctacaagttaccagatgcaccgatcactcctggattcaggaaaatggaaccacgcgatgtccctgctgttacacggttgcttaggaactacctcagccagtttggagtcgcgactgactttgatgagaatgatgtcgagcattggctactcccaagagaagatgtcgtggacagttacctagtagaaagccctgaaactcacgatgtcactgacttctgcagcttctacactctcccttcaaccatcctcggtaacccgaactacactacattgaaagctgcgtattcttactacaatgtggccacacagacctcgtttcttcagctgatgaatgatgcgctaattgtctcaaagcaaaagggtttcgatgtgttcaacgcgttggatgtgatgcacaatgagagtttcttgaaagaactgaagtttgggccaggagatggacaacttcattactatctctacaattaccgtttgaaaagtgccttgaagccagcggaactcgggcttgttctcttataagctcaacaacttgatttgatggtatcaacaaacttgaaatttgtctctctttttttttcttcagtctgaactacttctcccatggtttactgaaactgagtttaattattttggcaatgcaattttggattttgcttttagtttcacttgtgttctctgagagagttgaccctgagaagtaaagtcaacactagacgtgtgcgagtttcaatggactgcatttttaggtccaagaagtagctacggcccatctatcgtagaagttgttttttgtactaaagcctgttatagccgaactaggtcgctacgtttcctaacttgtcgtttattaggctacttttaaatcgcacgcaccaatccagttcttacacgcgttttcacaaaaaggaccttacatgggttgttcccccaataagaaaattacacgttgcagaatcgaagcagtggtctatccttgttatcgtcctctcgtctttatggctcttccaagtcattttgagaaattttcgattttgagatttttttccaaatattacaaaaggaaataattagattcctctttctgcttgctataccttgatagaacaatataacaatggtgtaagtcttctcgctgtattcgaaattatttggaggaggaaaatggagtgtgttggggctaggaatttcgcagcaatggcggtttcaacatttccgtcatggagttgtcgaaggaaatttccagtggttaagagatacagctataggaatattcgtttcggtttgtgtagtgtcagagctagcggcggcggaagttccggtagtgagagttgtgtagcggtgagagaagatttcgctgacgaagaagattttgtgaaagctggtggttctgagattctatttgttcaaatgcagcagaacaaagatatggatgaacagtctaagcttgttgataaggtctgtttcaatgtcccttgccttgtttatgaagaaaacaaaccactattcgttgtgtatttatggatttgattgtggatttttgtagttgcctcctatatcaattggtgatggtgctttggatctagtggttattggttgtggtcctgctggtttagccttggctgcagaatcagctaagcttggattaaaagttggactcattggtccagatcttccttttactaacaattacggtgtttgggaagatgaattcaatggtaaaaatctcaatgatccattgttttagtcactatcttcatggtctgtgtttaacatgttgtttattgttactgttgaagatcttgggctgcaaaaatgtattgagcatgtttggagagagactattgtgtatctggatgatgacaagcctattaccattggccgtgcttatggaagagttagtcgacgtttgctccatgaggagcttttgaggaggtaaagtatggttccactatgcatatcttgagaggctttttctctagttatttttgcatgactttgaactgttttaaatacataatttgttattaatgtcttctaggtgtgtcgagtcaggtgtctcgtaccttagctcgaaagttgacagcataacagaagcttctgatggccttagacttgttgcttgtgacgacaataacgtcattccctgcaggtaacaagtcagctagtactattctggttttaccactacgaaaaggttctgacttctagcaaatgcaggcttgccactgttgcttctggagcagcttcgggaaagctcttgcaatacgaagttggtggacctagagtctgtgtgcaaactgcatacggcgtggaggttgaggtataatttgaatatgatattccacagcaataactatatggaggaatcattgttcattgagactgtttttctatttgaaatcttcaggtggaaaatagtccatatgatccagatcaaatggttttcatggattacagagattatactaacgagaaagttcggagcttagaagctgagtatccaacgtttctgtacgccatgcctatgacaaagtcaagactcttcttcgaggttctctttggtgtttctctctccttctagttaaatcgttattgtgataagtctgttgctcatcagctggaaatcctttcaggagacatgtttggcctcaaaagatgtcatgccctttgatttgctaaaaacgaagctcatgttaagattagatacactcggaattcgaattctaaagacttacgaagaggtaagaattggtggtcctatatcaacatagaaacttcttatttgcttttttaattcgtttaatataaaactgtaggagtggtcctatatcccagttggtggttccttgccaaacaccgaacaaaagaatctcgcctttggtgctgccgctagcatggtacatcccgcaacaggtagtaagagcaagaagccttgacccgatgtacttttattcacatcttgaatctgtaccatctctgacttagctttcccccaattaaacaggctattcagttgtgagatctttgtctgaagctccaaaatatgcatcagtcatcgcagagatactaagagaagagactaccaaacagatcaacagtaatatttcaagacaaggtgagctctatataaaccacaaagttaactatgctgttctttcacacaatgagaaacttttaaaacttgtgattttctattttttggcagcttgggatactttatggccaccagaaaggaaaagacagagagcattctttctctttggtcttgcactcatagttcaattcgataccgaaggcattagaagcttcttccgtactttcttccgccttccaaaatggtaagcaagacactgattcgtgattcataacaatgttactgtaaacaagaaaattgattcttcttttcacttactcaggatgtggcaagggtttctaggatcaacattaacatcaggagatctcgttctctttgctttatacatgttcgtcatttcaccaaacaatttgagaaaaggtctcatcaatcatctcatctctgatccaaccggagcaaccatgataaaaacctatctcaaagtatgatttacttatcaactcttaggtttgtgtatatatatgttgatttatctgaataatcgatcaaagaatggtatgtgggttactaggaagttggaaacaaacatgtatagaatctaaggagtgatcgaaatggagatggaaacgaaaagaaaaaaatcagtctttgttttgtggttagtgaccgagaaatgtttaaatcaacaagagtaaaaatgttcaacacatgcttttaatttttatcaatttatttcgcttatattgtttacgattgccatttattttaaatatgatcactttcgtgttcctaagtgcaaattactcaataatctatacacattatttataaacaagaaactgctaattttggattagtgaaactacaagtggttagtgtgccgtctttaatcattaatctaatattaacaagaacagagaacaagtatatgttcgttgcatcacatacagaatctaagaacaagcaccacataattatcaattaaattaatcaatccaatgaaacttcttcttaaccctttaaaaaaacaattactagtcaataaaatcacttctaaattcgctatttgcacattttattcaaaatgaattatatatctttattaatgtcaaccccttgaaataatatagaacattctttctaatatttttctcacaattatatcaattaaaaccttcaaaattatcaataaaacgaccatatcttaaatttcacaaaaatataagtcccaacataacaattttttcgaaaaagacttttctaataaagtaggcgctttcaattttcacaacagtcaataaatacatcacccactttttctatccaagtcaactaaaaacgcgggtcttcttctccaaaacccatttcctcacaaaatccatctgagaaaaagagcaacaagtttcattttcatggtggtgatgacgaacaaattcttcgaattaatcggcggagctccgtcgtattcttcagtatccgtcgctgttaaaggatccgtcggtgacgccgtaggaggaactgctagtcgtcgtgctcttcgttggacaatcgaaaatttccttcctaaaatcgatagattagttcttgttcatgtcatgcctacagttactactattccatctccttgtaagtctcgattcgaatttttttgttaaatcaatttcgagattcatgaaaatttaacactagtttttgtttgatttaaaagctggatcgaagattccaatagaggaattggatgagagtgttgtgtctatgtataaacgagatttgagaaaagaatttgaacaagtttttgttccgtttaagaggatctgcaaatccaacaaagtgagtttctgtgaaagctaaatttatgatactgattttggaagttttggagaaggcttatggaataattttactggttaaatgtttaggttgagactttgttgttggaacatcatgatcctgcaaaggctcttttgaagtatatgtcagatactgatgttgagtgtttagtgattggctcttgctcttctaatttcctcacaaggtaatgttacataatgggatttgatatctagtatgtgtttgtatatggtatgatcttgcttagacgtttggattggttttgacaggaaaaaaggacaagaaatgccattaacggtgctaggagaagctccagagacatgtgagatatatgttgtttgtaaagatagaatcttaaccaaatcgacgaatcagtttaccgcaggtatgtttcaattgcattgatctaaaatctgaagtcaagaaggaaaaaaatacaagttttattgatttcccctgtggtttttgtttctgtgtgaaattttcaacagattcatcatctagtttccgtataccagaaggagctgaagcttatacagaatctttcagtcgcacacgctctgataagacagggttgtctgcttcatctataacatcttcaggcaggatgagaattggaaggcctggctctttaccgcatagtcatccgacctctcgagtgtattctgatgcacagtcttcttcaactgatattgttttggtcgatgacgaacactgtcgttctatccttaggcatagtactgtttccactagtaaaatacagatggatcctagacctcacttaaaaacaccaaaggtgaagcatttaatatatgaccattttgattctctgtgacacaaaatgcatatgattttgatccaagatctgtttttgcagtcaggtgtaagagctgaggtagagcagctaaggaaagaagtgcaaaccactctttccatgtacaaacaagcttgtgaagagctagttcataaacaaacacaggttggagttctagaagaaaactttttttgttctcgaaatcctttcctaatgtttttacatcttatggattcataaactcaatcccatgttgtgacctcaggtccagtctctttcctctgagtgtatcaaagaaacagaaagggtcatcactgctctggaaaaagaagaaatgcgaaggaaagcagcagcagaagagaaagaaaagcatctaaaagctgtaaaagaagtcgaggaagcaaaatcaatgctagccaaagagttctgcgagaggcaattagccgagctagatgctctcaaacagtccatagagaaacagaaagtcattgagcaactcttcttgagagacgggcgatacagaaagtacacaaaagaagaaatagctgcagctacagataatttctcttcccgtaaaataatcggcgaaggaggatatggaaaagtatacaaatgcagtcttgatcataccccagtagctcttaaagttctcaaacctgattctgttgaaaagaaagaggaattcttgaaagaggtaaattactagtagtctcatggcctaataacaacagcagcctttaacactctgagatctgaaatcaactattttactttgcagatctcagtcttaagccagcttcgtcatccccatgtggttcttctccttggtgcttgtcctgaaaatggatgccttgtctatgagtacatggaaaatggtagcttagattgtcacatctctcccaaaaaagggaaaccatctctctcatggtttatcagattccgaatcatctatgaaacagcttgtggtttagctttcctccacaactctaagcctgagcccatcgtccaccgtgacctcaaaccaggcaacattctcttagacagaaactttgtcagcaaaatcggtgacgttggactcgcaaaactcatgtcagacgaagcaccagacagtgtgacggtttacagaaactcgattatcgccggtacactctactacatggacccggaataccaacgaaccggcacaatcagaccgaaatcagatctttacgcatttggaatcataattctccagcttttaaccgctcgacatcccaacggtcttcttttctgcgttgaagatgcagtaaagagaggctgttttgaagatatgttagatggatcagtcaaagactggcccatagccgaagcgaaagaactagctcgcattgcaatcaggtgttcgcagctcaaatgcagagacagaccagatcttagcacacaagtcttgcctgctctcaaacgtattcttgaatctgcaaatagtagactcaagacagaacaagctaacgcacgagcaccaactcactattactgtccaattcttaaggtaaatcgaataaccgatgcacaccaaccacaattctcgatggctcaggttttaaaatgtttgattctggttgattgtaggaaataatggaagatccacaaatagcagcagatggattcacatacgaacgaaaagcgataaaagaatggattcaaaaacatcaagatgtgtctcctgttactaagcatcggctcaaacattctgatcttacaccgaaccacactctcagatcggctatacgagagtggcgatctcgttcacgcttagacctctccactactcttggctcctactgatcacactaatatatatacagtctagtctaattcgtatattgactaaataccctgaacttgtttgaatcgggtgtatcatctctgtgaatatgtattgtggtattatataataagtcaacaaggatttggtttgctttttgcagttctatatgaagagcatttacaactgataatcaagtgaaagtttagaggattcatctacaaatagactcaaatcaaacttgggtgaactcaagagcgtttgcgtctggatcacgagtaaatatcgctggcctccctgacttactcattgtatatgcaattcctacaaaatcaaaaaatcttcttcagaacgaaaggaaacatcctttaagccaaaagaaactaagaagaaagaataaaaaaatataaactaccagctttgtctaagatctctttcagatttgaaacatcacggattgcaatacaagcgtgtcgatcccggcctccgtgctcgggtctacctgttaatggatctggatttggaagctccataagatgaatcatttctgaacctacccataaccatgctcctctatatggaagcttgtcgtgaggccttgcttcgttgatctcaaggcctaaaatgttctggtaaaactcgagtgaccgttctaggttctcgcagagcagaccgacatgatgaaccccaacaactccataatctacaataacaatcaacaatcaaaactggtaatccgagcttagtgtctatagataaatggtgacatttgcttaaaatgttgtaaccactaaccagcagacaatcaacacaattacttattatcagttaattaccggttttgttgttaagctctttctcttgtacaacactaatcccttcaattgacgatccttgtgccttagccttcaagctataaaacctaacattgatcctttctttcctcacactcttcttctgaaactcaaaccgctctttcgtagagagattcgtgcaaataaccttccaaataccaaaaaagattcatcatcaatgatcaatccaaggtaaagtaatcgattttgaatgatactcacaatcctaatttctccttttaactcaattacttgaaaactaaagaaaagaagcccttaattgccaaatttacaagattagcgtctaggactatctcaagatcatccaaaaggtaagaaccctaaacaacaatttctggaaatcgagtaacctaacgctaggagtgaataaagaagcttatttgtttgatacctttggtcgtaaatcaagtgaagctgaagaaggtctgaaaatagaagccatggaagagaatcttggattaggctctcaacacaggagcaagagtttttttttgtctttaaagtaatgatttcatgttttttattttctttattggccaagaaaattaaggagaaaaacaaaacctgagccactcagccacataatcactgggaaaatcaatttcgtattgtctcgaaaaatataattgtttcaacgacaacaaaaaatcaaacatgcggtgtggtggcaaaagtcaaacgtttatttaatgaaagtttatcagagaatcgatgggcctagcccagtccaataggtgattcacgtctcactatttttgcagcttcacaaaaatggtaagttggtaacttactatttcgagcgaaaataactcagtaataacttccagattcgtcaaatttctcttaccttgtaatgaagtttagatgttttagctttatgtataaaaatttaagaatatggtctaattttatataattttcttattatcattttgtatttgatatcatattgacaaaatttaacaaatagatattagttgtacttctatgtgaccgccactttattcaatactaccttttaagttttaacagatccgtgtagcaactgatcatctcaaaatatgtgacacatagtatactatacaatatgagctggttttgttttttattttatatcgaaagatattttactttatctgacagctgcgagagatcctaaaaaaaatgaattaactttaaagaaattgcatgcgtctatctatctacgtatatctcaaaaataaaaataaaatcaaggtcacatgactcatatccagtgaataaaaaatattcatgaaatcgtaaataaataaataaaaacagaaattcatatatacgtttttagttatataactatacgattggttcagtgtatttgttgcccaaccaaagctactttcacttcacatatcattacatggtccaatgattatggaacacgtattattatttttgtttaaaaacaagtaaataaataaaacagacaccaaataaaaaaggaaacacaaagatatttacggaagttaaaagagaggtgttgtctatgtcagtgcaatgaacctcttcggctcatcttttcccgccatcccaactaacagatctctcaccgtacacgccatcctcttcaccaaatctaatgactttctctctgtctacgtggcgatcatccggtctgttttccgacaataatgggacccatttgattgttatttcgaaaatgattttatttttcttcaatattgtttttttcttcaatattgttttggaagtaaaaagaatcatctgttgacaacacaacacttcttgccttctcgagtttgattctcctcctttctgtttttggtatccacccgattgtcattattttattttgaactctagaaccaaaaatatcagagcaagctctctagtcagtaaattttgtaattattatagtacctcatttttattagtagcattaatgtactagtgtggtcagtgtagatgaatatattttctactaaactaataaaaattgtatcataatttgtatattttttggtgttttcatcttttactataaaatatatttttgtgacatatggcatgttacactaaacaaaaaataaaataaaagaaatttgtttttgtataaaataagtaaattacgttttttgtcgaccaattttgattaaagctcaaaagaaaagagcaattcctaagagatattatttttatgtgaaataagtaaattactcattatgtaaaaagtttggatttatcttaaatctaatttcataacgtttaatgcaagatattttggtaaaataggaaacgtataaaacatctgtattcaaaacttctataaagatacccaataataatggaggggtgacacgatagtaaatagaataagaaataaaatttaatcaagtcaaaataaaataaataccctttgtttttgtttccacaattccttaagtctttctaattactttgttgttcactaaaacatctcacattgtgctattttttttaataaataaagacctctctctttaaaactgattatcccctaaactatttgtttgtgagaaagaaagagaaaaaaaagtttttttggttggaaattaattgagggagagagagagttcagaatctctaaatggctgaaacgaattgcccagaatccaggaaactctgattttagtccttttttcctcgggaaaacgtttgctttttcttttttgtgtgtgtttggttctttaattgacaaatctctctctatctgtttcatgtgctagctaaggttgtcttcactttcctctaatgagtcatgagtttcttgtcttcatcttcatctaataaagttaacaacactctcatcaatttttattatgttcaaatctgtctgacttttcgttcttttctcttacacccaagcgttttaacaatctaacatctgtctctttgaatacttagatatccaacttcaatttctctcctttctcttcccaactttgattcctgatttgggtttttgttaaagttcaagaaagttcttttttctttttttttcctcctttaatggacgaagtttctcctgcagtcgctgttccattcagaccattcactgaccctcacgccggacttagaggctattgcaacggtgaatctagggttactttaccggaaagttcttgttctggcgacggagctatgaaagattcttcctttgagatcaatacaagacaagattcattgacatcatcatcatctgctatggcaggtgtggatatctccgccggagatgaaatcaacggttcagatgagtttgatccgagatcgatgaatcagagtgagaagaaagtacttagtagaacagagagtagaagtctgtttgagttcaagtgtgttcctttatatggagtgacttcgatttgtggtagacgaccagagatggaagattctgtctcaacgattcctagattccttcaagtttcttctagttcgttgcttgatggtcgagtcactaatggatttaatcctcacttgagtgctcatttctttggtgtttacgatggccatggcggttctcaggtaatgaatcgatttggtttcgatatgatatgatcggaaactgcaaaaacttggtttttgacatttgtttttgtgtgtttaggtagcgaattattgtcgtgagaggatgcatctggctttgacggaggagatagtgaaggagaaaccggagttttgtgacggtgacacgtggcaagagaagtggaagaaggctttgttcaactcttttatgagagttgactcggagattgaaactgtggctcatgctccggaaactgttgggtctacctcggtggttgcggttgtctttccgactcacatctttgtcgcgaattgcggcgactctagggcggttttgtgtcgcggcaaaacgccactcgcgttgtcggttgatcacaaagtaagtatagatgtttctatgaatgaattagtacaatcatatattcattaggacttgcggttttttgttatggtgttaccaatcatagcatgtttctatagattagttaatgtacttatagcgtttgggtctacatttatgtgtagccggatagggatgatgaagcggcgaggatagaagctgccggtgggaaagtaatccggtggaacggggctcgtgtatttggtgttctcgcaatgtcaagatccattggtaattatttaactttctcttgataatgatccatgaatttggttcttttagttgtttccttacattacaacccgtcgcgaacaggcgatagataccttaaaccgtcagtaattccggatccagaagtgacttcagtgcggcgagtaaaagaagatgattgtctcatcttagcaagtgatggtctttgggatgtaatgacaaacgaagaagtgtgcgatttggctcggaaacggattttactatggcataagaagaacgcgatggccggagaggctttgcttccggcggagaaaagaggagaaggaaaagatcctgcagcaatgtccgcggcagagtatttgtcgaagatggctttgcaaaaaggaagcaaagacaatataagtgtggtagtggttgatttgaagggaataaggaaattcaagagcaaatccttgaattgaaaaagaaggtttggaagaaaagtgaaaaaaaaagttttgatggtgggtaaaaattctctttagtgaaaaaagaaagataaaacaacaggtaataattacattgtaatattaatttcctgcttaaatttgttatttactttcttagtcttcccaccattatttaatctttttatatttattttactaacatgatatatataatgtacatgggaatagtgtaacttccaaacaaaaagcccccttgtatttttttttatcttggggttagttgtaataacactacattcgtctacgtaaatatttagtgttattatttgatgtttcataacttctctttgtgtgtgtgttttcgttagagtgatatagtttcaatagtattgacatcattttttcattaccaaaaattacattagtcttcatcaccataattttttcattttgtttaaatctactaaaccaaccagaatatgggatggttgaataaacgtcacaataatttgtaaatccatgtgaatgtttagattgtaggtgattgaagacaaaataatacatacttatatcacaagttaattgtaaagtggtgtgtaaggcagcttttatccccaagaaaaatcatctttttatcacatcaacattattcaacaattacacaaaaaggtaaatatcatatttaaatgtgaaagaatataaataaaattagtcttgtgaaaaatttaatctcttcgaataacattgttttattattcttatttcataaaaaaggaaagaagtaagcgttggttagtaaaagagtgttttttactttctcaagagtttcaatttcttcttcttcagctttatacgcatttaaagcgccgacgaagttgaacactgaagaagaaaaagaggagacgacacgatttttgtctgaattatcagattcagatttcgtttaatcgccagattcatttcgaaaaatcttgcactagattctcttatcttcggtgagctctctctgcgatctttgtttttttttccgagcaatttccggtatttaatgaaacgatggatcgacgaattgatttatttgtaaagctaatcctgtagacaactgagctcaaaacattcaatttttgttaaagagacgagtcgtatctcgagtttgaagttttcgcggttgctgattgatttgatggggatttgaaatttatagtgtgagttttggttagttgctgctagggttttcgaatcacactttgtattgttggtcttgtgttgattgaaatgtatctctagtctttgattactgcttgtgaaattctgatgtttttattatgattgcagggaaattgaagatctgggtcataagcaatagcttaaagcatggacgaaagtaattatctctcttgactcttcaactatgagctttgaggttaattttactagaatattgagtcacagagttccatttatatctagttacagagttgagttgtgaatttgttttgtcctagttgagattgagatgacttagatgagatcactagacgacgttgtttctctcctgtccattttcatttttcatgattttgtttgagtgaaagtgttggaaatgtactacaaagtttttaaaaggaggatatacacatatatatatgtgttgctttgaaccttcttggatatgtgtgcaagtaaatattgtatctgtttcattgcagattctaaatttgtatctggaaacggtagaaccgagctggttaaattcattgctgataggcatgccaaactcatgaaacaagcctctcgacattattccgcaattaaaggttagtaccacaacctgttttacaaactattaccgcctatgcacctagtcttgtcatgtatacaagttcagaaattctgattctcaccatcgaatatattaaacgtaagatgtgaaagatgaagcattcatgtcaacaccttcttatcactgtgaactaagtaaaagacactgtctctgttttttggtagatgctatggctcgtgggaaaaaaagatatacacttgtaaaagatgtagacgacatggaaacaggagcatatgacaaacctcttccatgctttggttgtggaatcggatggttttcgtgagtacttgttctcctattaatcccatgttatctgttttaagaccaatcctgatttaatcttcattttgcctttaacagcttcctcctaggatttatgttcccatttttgtggtactatgctgcattcctttatttcgggaactattatcgtaaagatcctagagaaagagccggtcttgctgcttccgcaatcactgtaagtgctttcatacgattctatgtgtatgcatattactcttagagatagcttttgtagtctaacaatgttgttcttgattaaacgaaataacaatgaattcgatcttaaattgttgcaggcgatgggcttctctcttgtcttactcgtgatttttgctttccggtggttttactatccttgagataaagaagtaactatgttaactatcattcatacctataagctccgtgttcatcaaggaatagtctcggaacttgatgtctcatgtacattcacataaaccaaatgaatttcacttcgatatttttctcaagttgtatattttttttgttgaatgaaagtttttcagtcccttactaaggtggaccaaactacaagccgttttatatatccataaaatcttcaagacggcatgatgtgcaactctcaaaatgtaaaaacggagtatgatgtttccaatgatagagagaggtacggtaggttcgtgtatcttttgtacttatcaacaaaagagaagtttgattgattcgattattctcaatcgctaaaagcttccaattggttaatgccaggacaaatttgtggatctcttccaagtaataatcgaatcattaagagctttaattgttgattttatagtactaatcaattactacaataagacgacatgtaatacgattggatcatgtggtataaatcgcacgtgtgggagacagacaggctgtctgaagaaacttagacgatacttccgattcatctagcgtctctcttttcccagcctgtctctttctcttcttctttttatttttatttttaactttcataattatatattttattttcctattttggctcgtttccagaccaatatacaggtatctgtacctaaactccagatttatgtccatctgtgtccaattattttaatcatcattctttgtttgctataaaacatttcttaaaactgcatttagcaacaaaaatttgagtttgaatcaggtagctagctaagacaatatcactgtaaccaattgagttactaatttaacactcggacaattactcaattagcaatagtataaggggtggcttctttaaaatcttgtattaattcaagggttgtttgtgttacatgattttcaatatgcaactatcagtaaattacaactctatatgttgaagctgatcacggtctcttttgataaagatacttacaattttctaagttttgagtcttgagaaaaagactgttcaatgtttggtggatttgtcacatgtatgaaccataaataatgttgatctactatggaaactattgattcgatggctcagcaaatttttggttggacaaaatacttttttgataatcactttttctttcactaacttttacctgcctacgtaaatcacctgcagattcattaatttatgagatattagaaaaccttgtgtgatctctcgaaaccgattttctcttatattataagccataatgttttctttatacgtaaatcgctatcctcctttcctttggttaatagttttataagtatgattttagttaatgcttacttttctttctttggtctttaggtttaatagtgggacactgaatatgaaagtttagagccaaaatttcaaaatattaataatatttctttttcacagacagaaaagctggtggcgagggccataattttaggactatcaaattctatattttcaagcatttgttagattgtttttttcttctcataacatgttaacttgttagttgttaccataattttttatattttaaatttttgggtttgtcttaacgtcaagatattaagtaaataatttacaaaaaaaataaaatttacgtatattttagtataagttttgatctctttctggttatcaaaaacgtatgatcccagcttttattaagcatttaattgtttgtttccaaaaataataatagtatgaaaataaattgggaaatggtggtggccgagtgtacaacacattaacgataaggtggaacgttacagaacccaaaaatcagggtttatatattcattaattcgcttacaagtattattaggttgaaaagtgtttttaactaacacttttaatttgaaatattcataatgtactaaactacaaaaatgttaaaagtgtttatgagaaattaaagatgagtttaaagggttgggattggatgctggtccccttttcctttttcacctttttttatcaagtgatagttttttaattcaactcttttgctccttccacttatcgaatgtgacaatgttgtggcaagtaatgaagaatttatggtgcatataa

SEQ ID NO: 916 - DNA, 82010 bp, Arabidopsis thaliana
gatctataatgctattgctacgcatgacccatcgacatttgatttcaatattacttgatcaatcactattatagaagcatgataacaactcctctacccaacagaaataatagaaagtataaataaggtaatttcatgcgtaaattttacgaatgaagaatcattatatgtctttgacttctatagagataactcatgtggcaaaagcgtaatcataatgcaacatagggtaaatttgtgtgtaaatcgtagtttacttttcttttgttactttttcataaacgaataattgtgagagaaaaaaaagtgtgtgtttaagcagagacaggttgacaaaagatgcggaggtttgggttggggtgtagcgagaaaagggtaagtaaacactttacaatgatgataaccacgctccaattatttctatcaacagagcatcatgagcatcctctaaagttattttccaaacatatatgtaacacaaaattttaatactatacgtggactttttcagtacaagcaaaatatcatacattcctttaaagtatcatataatgtatagggtttgtgtagtaagtaatacatggagtgataattataacgtaatttgcgtggatgaatcacatagtactatttagtgacatatagataattggttggtagtacatggatcggtaaaagcatgttttgtgtatcgatggccaattatgaatacataagtaaaaactttgagttattacaaaatgtaaaatacgaaaaagtgtttgtaaaccatcttgacgtgatacaaatagaagaagaaaaacagcgtcgtgttgtgtgtgttgcgtatttagcaagttcagcaaatttacgtctaaaaccgtttccacatactgtactttttgtttcactgaaaatgtctagctagtgtattagcaattgcaattatggctaaacagttccaaataattattaacatccactttgaactaacttttttccagtattatttttcaatcctatttaaaacctctgttttttcccctagccttaattatagttaagagtggaaacaactttgacatcatttatgtttgtgtcttcatgaaccaccgtggtaattaaaagatgtgcgccatgaacataagatatttctgtaacagtagtgattaagatttaagatagtaataaaaaacacgacttgatgtaatattttgcaactttcgtgaataaaatcccgaggtttagatctcaaactttaaaataacttcaggaaatcaaatacaaatccaagagatttgttttaagaaacataaaccttttagtcccctaaaatatcattattaatttcgaatgttacgtcgtgttattctgaagctttcacaattatcattttttttaacattcatttgttgactattccttaactaggcattatattttgtaataaaagttgaagtcttactttgagtaagaaattttttcaaatgtagctagtaaaatctcgcggtataatagaaatcttgtgttgaaatgtttccttgctaaacaatatagtatttgatatgtcaacatatgttccattatatgcatcaattacttgcatgattaatgtaatgtttggtaagcaaaaaatatataaatctcttctggtcgacggctctacgttgcttgtaaacaagggttatccaagacgggccttagtggcaacatcctcaacaatatttaaaatgaaattaaaattgtttttttataaatcatgcaacaaatccgattaattatactattcaaataacaatgctgaaattatacttggacggcttcgagaaaataacatatcaatatatctcaatttttcatgtcattatcaaatagctcttttgtacatctttcacaaatttttattataaattcgtcaaacaattataacttttgatattgtggaaattagggtgcattatctttttatgaatgcaagttaagcaattcgaggaattttccaactcaatgatttgaatcgagtttaataatattattttaacaaatcttcggcgcgacatcgttcgagaccatgacaacaattcctttccgtgtccgtatgattataaatcttaatcatatcatttccccctataataacgtacttaaaattattaatactactattattgttaatctctccgccacataataagaccactatataaacgtttactccattaatgtactgtaatcgaatcgacaagtctctctcttctctctctctattcaaaaattataccggcaaaaatggacgatcaaccgccgctgatctggccccagtttgactctaccggatatgctcgccggagatcatcgattccggcgattttagttccggcgatgatcggagtaacttcagcggcgatttttcttgtctttgtgaccttcgtcgttcctacgtttctctcagtcacatctcagattcttcagccagcttcggtgaagcgaggatgggattcgataaacgtggttttagtggttttcgcgattctctgcggcgtactcgctagacgaaacgacgacggattgtcttcggagtctttacacggcggagaagaagaagaagtaggaggaggagccgttacgaatggtgaaatgaccgtcggtgagattagcaaaatctcatcctcgtcgtcgacggtttcagagcagtggtttgatgacgtgtatgattctgataggcttaagatctatgagagtgtaagtagtcgaagtttttctcatggattaccggttaccgggaatgtaccgttgaggcgtagtagtagctcttatcctgatctcagacaaggagtttttagagaaactggcgatcgacggttccggttttatgatgatttcgaaatcgataagtaccgatcgcaggattcgagttcttaccaacaatttcagaatctttctaaaactgaaatcgaggaagaagaatctgagcctaaagagattcagattgatacgttcgttgtaaaaccgtcttctccgccgcaacaaccaccggcaacaccaccacctcctcccccacctccgccggttgaagttccgcagaaaccgagaaggactcatcgttctgttagaaacagagatttacaagaaaacgccaaacgcagtgagactaagtttaaacgaacgtttcagcctccgccgtcaccaccgcctccaccgcccccaccacctcctcagccgcttatagccgctacgccaccaagaaaacaaggaactcttcaaagaagaaagagcaatgcggcgaaagagattaaaatggttttcgcttctctgtataatcaagggaagaagaagaagaagcttcagaaatcgaagagaaaagagagaatcgaatcttctccgatggtggaagatgtaacggaaccaccgcaataccaatcgttaatcccaccaccgtctccgcctcctcctccaccaccacctccgcctccattgcgatcgtcacaatcagtattctacggattgttcaagaaaggagttaagagcaacaaaaagattcattccgttccggcgccgcctccacctccaccgccgagatatacccaatttgatcctcagacaccaccacggagagtgaaatccggaagacctccgcgtccgacgaaaccgaagaatttcaatgaagagaacaacggccaaggatctccgttaatccaaattacgcctccacctccaccaccgcctccgtttagagttccgccgctaaaatatgtcgtgagtggtgatttcgcgaagatacggagtaatcagagctctagatgtagctcccctgaacgggaagtgttcgatatcggttggggtctagaactcacacaatctgatggcggagttgagactaaagctgccgtcagcggcggcggtatgccgggattctgcccaagcccggacgttgatacgaaagccgacaatttcattgccaggcttagagatgagtggaggctcgataagatcaattccgtgaatagaaagaggtaactgggctttttaaggcctattattaggcccattacgaaaacggcgtaggtttcaacctcttatgccctgcaaggctgtgcaatgcacaaggatctcatacgagaaacatcttcaagggaagtcggtaaaaattgttggagatattttatatttgattggcgaaattcgttgtgattttaagcaatgtgcagcaaggactcgagttcaaaagttacgggtaatattggcattattggtatagttattagtggtaaatggtttcaaactggctggttagttttttgggtttaaccggttgagggattttgctttggtgtgttttgattattcggtttgaactttggagtgtcagatgaaaactcaataacttcggtgttgaatgttttatattttggttggtacgcattgatgtatgtacaatgtatggcccattgatatgaaaatatagttgtgggctctgagttttgttgggcctacctcttgtgacctttccctctcccttacaagcaattcttcttcaagttggttgatgattgtcataatgactggttgtcgtatgtatctctaagaataaattcatttgtgtgttgagtgagattcttatagcttactagtaatatgtatatgatatgtcaactgaattcatgttttgcaaggatatcattaccagtaccgaatgatgtgacatatctgatgaggtttgaggtattgaactctcatgattgtcaagtgatggtcttgaagcttataaacgatcctcaaaaaagtgttttgatatttccataattctttagagtagcttgaccttattatataattcaaaactttggccttagataatgagattcaggcagggaggtgacgtgttactcacgcgcgagagctgcgcgttcaaatcataaaaagccgacttgctataaaagcaaacttgttgatgatggttcaaaatttcgaaaagcttttcaaatttctcttcatatcgcgcgctcagtcaaaaagcagagccaaagatgaagaaaccgtataaaggaaagttgccgacgggaactccgtctctggcaatgtcaacactcgtcgtcgttgcttcccttctcgccggagcctccgttgtccacaacatctacaaaccagatctcgtaagcttcaccttctctttctgtacatatgttagggttctcaaatgtattaggtttgctcactttcttcgttcttgataatgcccataagcgtgatcggtttaaaaccattcatttcgttctctggctctgtgatctctcttttattgtaatgcacataaggtgttcgatgaattgcccatgagagatttgtaatctgattgctttttacttttgtgcagagtttaccaccgttggaaagtagtgaagtggccaagaaggatgattctgtaaacaaagtttgaatctttcaatagtttcatcctgttttatcaggctacattcactttggttgttctctttcaattcatgagttaacaaaaaaacatggataaagtttaaaactgagatcacttattaaaggcttttattcttcttcctcttgtgaagatgtaaagaagaacaaactctttttaggtttcttgttggtcaattcaccgttttttttaaagagatataagaaatcgcgatgatcgtgtagatgacatagagaccaacgaattgatggagtctttgctacggattgtggaaaaccatgtcttcgatacatattggaacttcaaaagagattttagtgataatctagttagtatctccatcgttagatccataggtccattaggcccaaacgcccaatcacgtggcgtgataaatacgttaacaattgcaatatgaagaaaacacgacaattaaatatggaagagaggctaattattcatcggtccaattgccaatgtctttgactgtagttaataataaatcattaagagattttcgtttaaaaacaaaaatacaccgtttcaagattaaaagataagttaattacaattgtatttttcctgattaaaaatcagatgtttacagggaaccgcagatcgctcagaaagtgtagtaagatgctcgcaaaaaccatgtgcatgtccatcaaccttcgccgtctcaatagcttacacaaaaatcgtttttgttttcttattaatataaaacctaatctaaatttacaaatttgttttcttattaatataaaatctaatctaaatttacaaatttgtattacacgtacaagtggatccaagtatctgactctacagatattttgaatctaacatttgtgtaattataatttataatctctgaagcatttaattttacttacaaataatgttagaccacgagacagaaggtaaaccaatcttccttatcccaagataagattcttcaaattaaatataacggctttttgcagaagtaataaagatagaaggaatatctagtatcaacggaaaaaaagaaaaaatctagagcacttcgaaaaattatggaccaaagaagattcagactgaaattattactgtattagtatttgtccattcacaaaatgccgaggaagaaaaaaggcattttggtttatattttgtttatttgatattcaaatgtccaacgatcctctctagctaagcttagctataattcaatgtttgaacacgaatcccattattttaacacaaacaacattaattaaatatcgtctcaaggaacttcacttccttgtccataaatacgttatttcacaccacatatactcatctatatctctatttttcttcttcttctctctctcgccggaaaaagtaaatcaaaatgatcaccggcaaagacatgtacgatgttttagcggctatggtgccgctatacgttgctatgatattagcctatggttcggtacggtggtgggggatattcacaccggaccaatgttccggtataaaccggttcgttgcggttttcgcggttcctcttctctctttccatttcatctcctccaatgatccttatgcaatgaattaccacttcctcgctgctgattctcttcagaaagtcgttatcctcgccgcactctttctttggcaggcccgtctctttcaataatctctctatgcacataatctatcttcattaagtgatggtagtctactagtaattgctatgatggtcaatttttactcgaaaacatattggttatcgaaagcttatagtatagtaactatgtcatttaacacgggtaaatattttagttaacattttagctcttttgtaatatgtgtctctaaacacacacattctcatgtttgtgtatatattgtgatattattttttaggcgtttagccgcagaggaagcctagaatggatgataacgctcttttcactatcaacactgcctaacacgttggtaatgggaatcccattgcttagggcgatgtacggagacttctccggtaacctaatggtgcagatcgtggtgcttcagagcatcatatggtatacattaatgctcttcttgtttgagttccgtggggctaagcttctcatctccgagcagttcccggagacggctggttcaattacttccttcagagttgactctgatgttatctctcttaatggccgtgaacccctccaggtatgaatttttcactgatgacctttttcatatgtttgttcaaattaacggaccggttaactcaagtaaactagaaaatgggtagttactagttacgacatgactacatgtcattttgggattcctttttgcctatgtaaatctataacaaattttgagttttgtctgagttcctttttcagaagtcaaaaataatcttcaaagtgacgtgttacattattcacgcagaatttaataattagtacaatataagaaatatcaagttattaactatagtctagttgaattttcattctttttgtaccgattcggttatatccggtttaaatcacatcgactcgaaattcatcacctaaaaatatggatttatctttcattagaccgatgcggagataggagacgacggaaagctacacgtggtggttcgaagatcaagtgccgcctcatcaatgatctcttcattcaacaaatctcacggcggaggacttaactcctccatgataacgccgcgagcttcaaatctcaccggcgtagagatttactccgttcaatcgtcacgagagccgacgccgagagcttctagctttaatcagacagatttctacgcaatgtttaacgcaagcaaagctccaagccctcgtcacggttacactaatagctacggcggcgctggagctggtccaggtggagatgtttactcacttcagtcttctaaaggcgtgacgccgagaacgtcaaattttgatgaggaagttatgaagacggcgaagaaagcaggaagaggaggcagaagtatgagtggggaattatacaacaataatagtggtatgaattttttaatatatatatatatatatatttattttttatttatttttttaaaaaaatatattttgcttctttataaatttaaatagatataagaatcgattcagatattattattattttccatcagtcaccggtgattataagtgggatattattaggtttaaaaaggtttaaaagttaagtaaagagttcatcaaataattttgcgtaattatttttttcttttaacaaaataataataatttagtatatcacttccaaaactcttaggtttttaaactgattatagttttggaaaacaaaatattaattttgtattttgaaatttaaatgtgattttttcattataatgtaatgttttaaaataaaattttctataatttatggtcagttccgtcgtacccaccgccgaacccaatgttcacggggtcaacgagtggagcaagtggagtcaagaaaaaggaaagtggtggcggaggaagcggtggcggagtaggagtaggaggacaaaacaaggagatgaacatgttcgtgtggagttcgagtgcttctccggtgtcggaagccaacgcgaagaatgctatgaccagaggttcttccaccgatgtatccaccgaccctaaagtttctattcctcctcacgacaacctcgctactaaaggtttattaatctccaacttatttcatatttttttttatcattacttgccacgcttctattttttttttaacttttaggaaaaatgtataaagctcaatatcggttctaagttttttttatagttttttcaaagtttcaaaacttatgaaaacttttaaactaattaaagtagatttttatttggttccgtacggctttctataagttagttttttggtcgaagaaaggtcataataaatttagtttagtattttctgtgatatttaattataattatattcatacttggtgatgacagcgatgcagaatctgatagagaacatgtcaccgggaagaaaagggcatgtggaaatggaccaagacggtaataacgggggaaagtcaccttacatgggcaaaaaaggtagcgacgtggaagacggcggtcccggtcctaggaaacagcagatgccgccggcgagtgtgatgacgagactaattctgataatggtttggagaaaactcattcgaaaccctaacacttactctagtctctttggccttgcttggtcccttgtctctttcaagtaagtactaataataatgtcacaatcatataacataacaatatatttgggcaattgcttgatgttgttgatcattttatgggacaggtggaatataaagatgccaacgataatgagtggatcgatttcgatattatctgatgctggtcttggaatggctatgtttagtcttggtatagttcccttcatatatatatttagttatagtctttggtgcttttttttttgctaattattgatacatataggtctatttatggcattgcaaccaaagattattgcgtgcggaaaatcagtagcagggtttgcgatggccgtaaggttcttgactggaccagccgtgatcgcagccacctcaatagcaattggtattcgaggtgatctcctccatatcgccatcgttcaggtgattactctttagtcttatatatatttcaatctaacttacagtttgatgttttagctagtgatgttgggtttctttgaaaaatataattgataagaatatatataattgtatgttttgaaggctgctcttcctcaaggaatcgttccttttgttttcgccaaagaatataacgtccatcctgatattctcagcactgcgtaagttatttaagttataaaatatttaattttcattcttaaacttcattttaatactatatataagatattaatttggtattcaaactatacaaagttacagagatctcctaagctaaaaacttgatattatttttcagggttatattcggaatgctggttgctttgcctgtaacagtactctactacgttcttttggggctttaagttattatcaaaacgtatttgcaaataaaaggcgatacgacccaaaggtgattttttttcaaacgaaaaagaataattacaagaacgaaaaaagactaattccaggtcaggcttaggtgtatgggaccatgcaatgtcgcattaattaaattatagcatatgatagtcgaaaatttagataactttgtataattaattatatgcacatgcatgtacgtgactttgtagtttttgttacatttattaaatttttgggatgtgcaagtacaattatttactattgattagttttttctatttatcgatggtcgtgaagcatgttattaaattacactaatatttcatcatatactagtcaagtattactagatcgcgcagtctgtttagattagatcttgtgcttttctaaatctccatacaattctttattttgttttggatcaaatgcactaatacttccacatataacctttttatttcatttcttttgtcttatatatttatgtttttgtttgtatgtaaagttaattatgaacgttattttttttgttaaaaaattatgaacgtaatattcggttgaagcttgaaggtagtcgcattttaattcgatgagtaaagaacaatcaaacttataatagaatttaattttcctttattttagtatatacttatctgtcaccaataagatatcactcggactatttttggagtgatacaaagaatttgcgtggagaaagaaacatttcaaatgaaagcactagtctagacaattgattgtgtagtaagatagttgctgatgataagttttgcgttatagacaaattgtgcatatctaacatgtgtgaatatcttaacgagtgatcaaacttttcaaccaaactgtccaaagtttttatgaaatagaaattatttttcttctttttccttgcgtttgattaattatgagctcctcaaaacgtatcggtgatcggcgcttgaatttaagtatgtaaatgtaatgtactagaaaagatggcttggctctggaggcgttgactgtgtaacgtgaaaacgatcacgtggggtatcaaaacgatgagatatacgttggaactcgctctttggtcggaacgtaattgaacgaacaacaacacatgagaaattcaataacaattcttctctatatagttgtcctgacctctgacttatctgacaatagatcttttaatagtttacacgtaaaaatatttattattcaatgaagtgcgtaagagaaatagcatatgtatactaagggtaaaagtatttatacgttttgatgttttcagaaggttttgtgcattgagtaggagacaacatttgctcagtgacagctcttgtctctctaggcaccttactattataatgtctcatcgtgaatcttatcttgtataacaaattaatgttcatattgtttcaagtacattatagcacatgtttataaacaaacttgcataaataccttagaattttatcatttttgctaatgccaaaaattatcagtctcttactaaaagcgatcgaaaatgaatcagcgttatgagcttcttttttgttccatattggatcaaatcatcaattactaattaaaagcaaaatgatacaaatcctcaatacgtaagactaaaaccggcccatttaacaaattcagcccataaggcctaaatcatttcatgacattttggttttgttttggtctaaaatcatttttaagattgttaatttttttgctcttcttatagtttatgttaattattataagttgttttctaaacagtttcatataaatttcatcctttttcagatgacaaaaaaaacagtttcattaaatttcaagatattcagcacatatacacctcccaaaattgacagaaaataaaagatacaagaacatttgatgacaagacaaaagaaaacaaaaacaaaaaaatgaattgaaagagttgttgtcaaaagaaaagttgtttattttcagagatgaaattagaaaaatggaaacaagaatcatcgacaaaaacaaaaagttggaattagaatctaatgtaatgtggaataatcaaaactatataatacaaaagttagcctagactagacagcttcggagccgtaaggttcaagattcttgtcatcatccttaagatcactgaatcttgacttcttctccgagagagcagaagaagaagacgaagttttaagagattgacctctcgtgttaaggtatgtatataacgaagttcccataatcgccacaaacgcaccgccaacgctaatgaaaccactattcgacccgaaaatgtagtagtttccaaggaggaggacacaagtcttgaactgtcctagcaccacatgcgtaattgcagaagttgctctgcaatatatggagcaaaatttggacttaaggaaccactcagctacgcaacctttaaatccaaaatgtaacgacaacactaatgtataagaaacttttactcaccctagagctaaggctcctgaccattgaagaaagaatccgagaagagcagaaacaagaatggcagatgtgttggttaagctccaattgaacgatagagcaccgggcggatccaagaacggaatcatcgatacaagaaacaacagagtgattggcgtcgttttccacatcaacctgaattaaaaaataaaaatgaagagatggtattgagagatgttgatacagctatatgaatgagtgtgactgaaaacaaacgaatctgaatcacatacgccaaagcagtccagttttctcgttgctgcatattagaccacaagattttgttagttgcgcttggtatgatccatgcgaatgctacacaagcaccaaacagactaaactgtaaatctgttacagtcgcaaccgcaactcccacagatacaactgtaagtgataccacctgaaaaacatcagccacaaggttacttactataccaaagtttttctctttgttaactctataaatccaattgactacaaacaaattgtgtgataaagagagaaaatctcatttaccttcatgaaagaaactctctttctataccacaagaactctgcaaacacgatagaaggcgtaacagcaattttcgccatctggtagaatccaacactgagaaacaaaaacaacgaagtgagaaacagtatgagacagagcaatgtatgaaaacaagggagagcaaaaaaagagagaatgtttccaaaacctgttatacttaaggctaacattagctagtcctgtagagagtgacattacaatgccaagagtatagagcggaagcaacgatgatttcgtggaaggcggtgaagcaggaaggagcgaaaaggatttgagaagagccattagtagataagctacaatgtagtgaatgaatgtgaggaacactggaaactcaaagcctatatttttaagaacctgcaatcaaagaagcaaaaaaagctgattactttgatgtatttaacactaatgaagatgttaaaatgagaggttggttagttaaaacttaaaagtacccatttgttcatgaagataatgctaatagcaacaacgaaattgaaagtaagagcaacagttgggccacagatacgatgttgttgttgttgctgtctctttggagtttccggtgaacggaatctgttgaataacgatgctctcaagtcctccaatgcttttcctgaattagagaaaccattgttacataatcaaaatcaactctttggtgataaaaccctaatctaaaaaaattgggggtttgctatgataagattggataatcaatcctaaaaggaacaagagatgtttcaaaggaaacggttatcaatcatagaagtcgaaatcgaaattgaaagtaaaagttttgaaatttacctcgttcaccagcatcactgtctttgcgtttgaggatcttcttcacatcttgtcgaagccaagaactaaacatcttaggtgtcagtaacatttgttgcttgtttcaaaaagctttttagtttgagattcgaattcgaaactcataagccaagaggagagaaatcaacactgacccacatctcgaaaaatcgttcctttatgagaaagtggagaatcgaaaaagggtctctctgtgtgtgtgggggtactgactactgatgttgttggtttctgagattaagattagggagaagaagaaaggagacaaaaagagagaaacacgtggcggagataacgggaagatggagattgaagagagtattattttggtgatttgagcaaatcacggtttcttcaccgaccattaaaaaaaacacagaggtagtgagtgtctggctctgtcacttgaaaaggagagggaatgagtaaaccaaacactttagtagtctctagactctactgtctcttcttcttgctttcacgcgtgaattttttacctattttattttttccgcgttctttattttcaaaataaaattatagaatgggataaacattacattaattaactattcaaccgagaaaaagaaaagaatataataatatcagtcgacagaaaaacaaaggaaagctcttttggcttttcatcgagtgatttccgtatccgataatgaatatatgacgtggccaaacctgtctgacacgtaggacctatttacggtttctgttaaccagttgttcacagtctgttcgatgtttgtgtggaattgattgatgtctccttacattccagattcatatgcgggtgttgaattgttcgacattaaaaatgtttccggtgttcgacattaatcttaaaatcgtggttgtttttaattttacaacaaacaacctcgactttacttcaacattttcattagtaatgctttgatttatacttcaatgttttctcatgagtataactttcttaacgactattgcatccgtgttcagtaggtgtagtaataatatggccaacaacgctttgccacttgaataactaggtcacactgagagtaaaaattttccattttttcgaattttgatttcttggttaaaatctttaccagtaatgattcgaaaggtagtcgatcatattacaaaaaaaaagaccaaaaagaaaaccagtaatccaaagttgctcgaccaacaaaccccgaaaaactgtacttggggggttgggtttccgaaaaatatcaataaatccatcataccaaaccaaacgtttttttttctgttagtcctaaaagagtatcaaacaatctcatcagtgtctgagagataataaactggcctccaaatcagagtgaacctgagaaaaaaataaaagcaaacttgttattttcaaattttcaaattcatttcagtcctgcataaagcttaaaccaaatccttactacagtttaaattcaggataagttctactacacaagctgaccaacccaaacttttcttatgaatctagttcaattgataatcacaagctgtaagttactattaccttctccagaagaatttttcttcttgccccagaattttagtactttcaatttgttgcttataggagctgcaggcaccggaatgaatttcccgaccaaagcaagaggccaactgttcaaattacaaaggttcaactataacgttagttatgtttcaacaagcattgcacatattatttataaatatgtatcaacattttcaattgtaaacaatattataatgaaagtgacctgataacaccgatgccaacacagataagccattgcttccagtttagtttcgtcgtggaagcgaatttaccaaggaactcaacaatgataacctggcaaacgaaaataagacggttttgatttagaaataagagtttgtgaaatgtaacttactaagtttttctgatacaccaaatcattatttacctggagcacaagagttatgactattattcccataaagagacgattcttgatcacacctttgaagatgttcttctcatctggtttacgagcattgaactcattgaaagcctgtaaacaaagagttcgattaacatttacgttgacattctggttttaatacagtaagggaagactttgatttaattaactcacttggcagagaacaaaggcgttgaagattattgtgttcttcactctagtggcgtgttcatgcacttcatgctccaggccaagtatgcttatgcctcggaaattgagtgttaacaatacactcacttgataaatagcctgaaagaatcacatttcaactttttagtaatatataagacggggtgatttcaaataacagagtctattcactgatttttttacctggatcagcaagtttctccacatgatgttggtaataagaggttctctgcaaaaagaagtcgaagcaaagaaagataacaataagtctatgtctacaaaaccaaatgttttattaagtttgaatgagagaaggcggaaaaaacagtactttctgccaactggaggcctccccatgaggtgatcagtgggtggttcagtagccaaagccaatgctccaagagtgtccattatcagattaacccagagaagctgtatgttaaagaaaacgccaaatatatgagcaaacttataatatttagagagagagagatattcaaaaagagctaaatgcaacagaaactcaaacctgcacagcggtaagtggaacgtcaccactcgaaatagcagctacaacattaattacgagagcggcgacattgactgtgagctgaaattggatgaacttctgaatgttggcatacactgatcgcccccatcgaacaacctatataatatatatcaccacaaattaaggttggaatacttagtagcaacaaattcagttacgaaaaatgcattcttggatctacacatagtatacatggattcacaaaaaaaatctattgaagtagggatttatgtgtcttgcagacctttatccaacaaatgaatctataaagtagaaaaaagtgaatttgaataaaccttgacaactgaagcaaagttgtcatccaagatgatgatgtccgaactctccttagccacttctgttcctgctattcccatagcaagaccaatatctgcctgcaaatacactcaaaaaatttaacaccaatgagataatgatccgctcgctgagtaaaaacgtaggcaaaatacttggccaaaagaaactttcagttagatgtagctttcgacattatcagtttaaatttcagtaaattactatacctcgtgcaatgcaggagcatcatttgtcccatccccggtgacagcaacaacatgcccttgtcgtctcagagattgtaccagcagaagtttgtcattgggagatgatcggcccataaccttcacatgtggagtaacaacaaagtcaattttgatttaggctgttactactacatcatattacaataacagatgcatctgatgtttaaggagaatatctgtattgggtgaagcctgatgaaaggccaaacctccccatagaatgagactaagacattcatttacataccaacacattcacacttaataattaagaaagcagagttgagaacagtaccgatattttgtcactaatcttgtccctttctgcatcagtcatctcacggaatgattttccttcaatgagagtaggctcggagagatctgcatctgaacttagtattccacattccaaggcaatagccctggcagtttggacgttgtcaccagtaaccatacggacctgaacatcaacaaatatcatgaagtaatcatgcagcattaattagcaggctaaacaataaatttctgtcacttgtcttttctgtttttctgtaaaaaaaataaatcgaacaaaagaagtaccttgacaccagcattttgacacaacacaactgaatctttgactcctggtctacatggatcctgtgcacatttcaaacatttcgataaaaaaatataccaagaatattgcaggacatgacatgcgggttaatgtctgatctataagaaaaatgtgtctatagtggagtactatgcaatgtgaaacggtaaattgaaagtgatctcataagacgagagacacaataaaactaaagcaaaatgccaaaatgtacataaacgaacaaaccaaatcgatcctcacctttatgcccactatagctaataatataagatcatcctctgggagtacccactttgagagctcttcgcctgttgggaccttttcagcctcataggttctaaaggcgagtgcaacacatcgtaaggttcttccagccatatcattaatgccattcttgaaaaacgatgcctggtaaaatcaaagaaaatcgagtgagctgagggtaaaatcaaagaaaatcgagtgagctgagcatcatgacagcccaaaggctaatcacagattcgaacaaatacagctgagtttagaggttaataaattagacttttcacaaaccttgtcgtcagtcattggtgccacattaccatcctcatcgatgtagcttcggcatgatgccaggacaatttcagaagctcctttccagtgaacatgaacttcaccatcagcctgaaagaaatatgggggggaaaacgtcaaaaaaaaagaaaagaaactgaactgtgcttatagagtctgcatagatattatttcgactatagtagaccttcacgcttatatctttcatgcaaccttaaaaaatagagtataaaaattcgtaagcaaatacagggctcaagaaactggtttatttaccgtttttacagcaacaccaccacgtttcttctctgagttaaatggaaaagcatgaagaatagaagactgcgatcgggctgtctcgaaattcattcccagctgaaagagaaaaatcattctttaactcaaacgtataaaatttcgaactagaaaacgagaaagagtcaaaaattaaaccttaactccccagccaagaatggccttttctgttggtgaaccagagtactctaaatcacctccaccctgtcagcaaataaaatgcgatgagtcttgtcttctcaaccaagaagcaatgttaaggaacttatctagaaagtctgatccttcagtcagaattgcaaagcttaaaaacttacctctgggacaaaaatactaccagttgtgttttgagatattccttcaactactagcgaagtgatagttgctggcaattgttcagtatctgttttcttgcccccagcataagactcaaccacagtcatctttaaaaagaaaaaagatttagtatcagcaagtggggaaactgttcactgagtctaactctaacatggagcgaactcagatttgtaaacacaaatcacacctgattcagagttagtgttccagttttatcgctgcaaatagtggtggcagagcccattgtctcgcaagcagatagcctccgcacctgcatatcaaatcttagtcatgctatataataaaactgcaaaaagaatcatatatttttccctcccaaccagaagaaggatagagagaaggtaaaataatcataccaaagccttatctgccatcattttcctcattgaataggcaaggctgaaaacaaatagaagaaaaggaaataaaatcagcaatcgagaagtaaactctactatgaaactaccacaaaggtctgatatagcaaagataggaatacatacgttaaagtaacagccaaaggaagaccctcaggcactgccactacgacaattgtaacctgcagcaatagccgagtattagcattactaaagaagattaaagatacttactgctgggtcccgaatccctatcagactaagattgttcactaggaaacataccgctacggtaaggactttgaccacatcatcaataacatgaccgacttttgtcttgcctttaacgaattgaggacctccattattgtctttagtgtgaccagtgaaatatctgaaaaagagaacaacatacaaaattcgcataatgtcaactagaatcgttcttctgtcatgaacatgatttggccgagttccaaaataataaccagcaaagatagcattcataccgagtcagaagaatcactagcacagcagcagccaccgctaagccaattgaaccaataaaagtagctaccccatttaagcgcacctggttcaagcaagtcaaagattagcttgatttgtaaacatttaaagattccttaacaatgatcaaagatatcaacctgcaagggagtttcttcaccattgtcttcagaaatactggccatcagcaatccccattcagtgttgactccaacaccagtaaccttgcagaaagaaaagaacatacatatcacacaaatggaagagattaataactatctcccaagagatcagttctgctgaacaagaaaaactaggaagtcgtcctaccagcatagaaccatttccatctgccactttacagccagacattaagaatgggtccttgttagcgtctttgttaacctgacaaggaaagggaaattgacacatagaaagttataccaagaagaagcgagaaaatcaacaattttactatgacaggaaacaaaaacacacaattttgctctctccagtcatgctagattcatcaagggcgagagagtggccagatatcagtactccatcagcaggaacctagatataaatttaaacttcgattagacaaggtaatatggacaaaaacaaaattaaaaggagaataaaccactcacctgattgccaatgttgagaggaatgacatcacccaccactatgtcatagatcgaaatctccactcgtcttccacctcttaacacctgtgcagcagtcaacagaaagagtagtgtaactaagaaggaaataagaaaaagagagtatgaggaaaagtatcattggggaaaatttatacctccagatgtatgtttctcttttcatcattcaagttttgaaactggagcgactgtttgtagtcactgacagctgcagaggagaagaaagcatcaaaatcacagtaagagtcattatcaaaattattatattaagtgaaacaagtctgtagacacctaaaaagaaaaagaaaaaagtgaaacaagttaaattacccgtcacaacaatcacaagaatcacagcaaatgcaatgcttcctccatcataccatccttctttgataccctgtcgatgattgttatccaagttagtaaagattgtgtaagaccaaggttaatttggaggtgacattactctggggaaagagggaagagccaaatttagttaattgatttcatcacaaacctctgtttttatcccaagtgctaaagacgctacagcagcaaccattaaaatgatcaaggtgagatcatggcaagcatcccaaagaaacctctgtaatgattaacaaaaaaccaatacgcttgataagaaagtgagcagggaaaacctaacttgtagcatagagctaataataaatatgcatttcataccagaaaccctttccctttcttgcgaggatatgtgtttgatccataaatggtcttgcgctttagcaagtcatcatcatcgccactgatacctttctctggatttgtcttgagcaaattggccaatccttgagtctgatgcaagaaatacacgcataccaataagataattagagaacgactataagaaaacagacataagcatgtttcatgactgaaaacttacccctccatattgctccagggcaccactgttgtgatcctttgacattatcacaagctgttcaggagtaattccaaaatcaccagccggagttgcaggcccagttgttttttcaactcctgaagtgagaaaaaaaaaagaccacatcaacaagtttatacaaaaagactttcttctccacattcagaaccagataatgcacaacaccaaagtacacagttagccaaaattacctgactcacgtcccatatccataaaacgattcgccgcctaataaagaaatagaagacgctaatcagtaatttacacaatctcatgataaagacatgattaaccagcttccaaataaagttaccaaaagagcatgagcatgacttctgatcttctgtctcatttccctcgtttcttgctccttcttcaagtccaaggtgtaccggaatctccgggacgcattgagaaccagtgcagctttctgtaataaacacaattcactgttagctcaaacacagataaacaagcattcttatctcacaatatgaaacaacatcagacttaagaaggatctaggtcttactctccactgttgaagccgctcaatagaagcattcttcgatgggatgtagaaagtgtcgctatcagagtctgcgtgttcactcttcccagactccacatcgcctccacggcgtcgtccaggcgatgacttcaagagactcgtcatcgttgcagtcgcaagagacaagaagaaaaccactcaaatccctaaatctcaaaaccactgagaaaaaatcaaaagataagtaagtttgcagtttaaaggttgcttctgctttcgacaaccacgtgaaatatcaagcaagaaaaaagcaatttctccgggataaaaaaaaagtaagaaaaaaaaaaaagataaatatcttcttcgaaacaaagtatcttcttctctctgggaaaaatccagagtgcgacaaaacagccacagatattttctcagatttcttcaaaaatccttgacattagccttaaatcacaacaatatcatgtaaaatcggaaaaaaaaaaaaaaaaatcgatgaacgcgaagtcactcctaccacgagaaaaacgctgtgaaacggtttactccagtagtagtcaacaaaaattcaaattaggtaagactaaagaagacgaagaataagaacaacaggagacaaagcgaccaacactgcgaaattttaatttaaacaaaacagtaattaaaatttttattcgtaagcttttctcgaaatccgaaactcgtttcgtagtcggttgaagagaaaatcgagacgagaaacaagttctacctggagagaaaattccggtaagttcgccggaaaatgtgactagtcctcgccgggaaactaatagaatgctttatctctctaaagtttgggataaaacagtagtgagcaaatatatagatctagggttaataggtaagtaaataaaagttcttgggccggttatgggtaaatttttaattgtttggaaactaaactacgtggcacgcgctaattaaatgctggtggcatcaaatttcctttttagttttattctcattaaaaaaatctgtggattattgtgttaaaaaaaaaaaaaaaaaactgtggattattattttaagttaaatggaatctatctaaccaaaagaaaaagaaaaaaaaacagaagtaaagaaggttagcaaaagctttccttcatattttttaccaatttaaatcatggtactatttaaattatttaataacatttaaggaactgaaattttataaatatatgtgtcatatcatctaataattaagtaaaaattatattaaaaaaatgaaaattgaaatatatcataacattgaataaaagtttggcttacgtgtacagtggtggagtcacattaagtattatgtattatgtattattacgttatttcgcatgttacttgtatggtctcttcttttacaattattttggaaatttgcatttactaacaaatagacaaaaaaaacataagtaaaaaaattgcatattctggtgtcttaacccacaaaattatcttcgactatttcagagttcgagcccacatattgaatttttacacactgtaaagagtattttgaactttggactactagagtatggcattgtttacttgtgaatacatgttagttagtatgttttcaacttttcattatcgtatactgttaatagagccttggtagaagtaattaactaacaccaacgcacgttttgtctttatgcaccgactacttcaatagtatacaacaaacattacgaataattcgtttatagtcaccattctgattaattgttttataactctatccactaaaaattgccgaatcgataaaaggtaaattgcgtttcaaaaaaacgcggaaacatggaaagtgaaacggaacgttcaaaaaacgtcgtgttgaatgatgaaaaaattgtttgtatttgggagacgttaataagaagcgattcctactcaatatcatgttcatttccacgtatgcaaagcgaataaacgattcacaaagaatataattcaactaaaaataaaatttactttacttaaagaggttgttgtaattatatagaaaagatcataatggggtctccttttttaaattacgcgtagatgagtccctgtaaagcttttcgacaccactaagtatgaacacctgtaaagtgtaacaaaataaattaagatttgtgacggaatatctcaattattagaataatcgtcagatattattattaaatttacaaactataataatatgggtgtgtgatagatatacgtatagtccagatgtacggtatatataacaaatatgtcgaataaaaaagtggattagacaggcgagaaaatgctacaaaaataaattaaattaagacagctaggtttcttttaaaattaaaccggtccttgctcttttagactgtttcaattcacctcaattgaggctccgtcatgcaattttgggaagcataagtcttaattgccgaagtctttttattatcaagtgaggtcaagaagacttgaaaatcaattctaaaattgattgtttcttaatgttttatatttttcaagtttttggaaagcaattacaagttaagattgtaagaagtttagagattccacaaacatggctttaagtttgtttttcctgtttaactgatgccggattttgtaaccggaataaggggttcttggggctaagtttatggttatcagtttgtattttgtaagatatttatcttaatatattatctttacagagaaaaaaaaaaggtttcttttcgatttttaacgtcaatattttgtatttactatttaatactttctgacgtgtgaagctgtttggtcttattgagatgacgtgtcgacttactagaagtatgattctttacgtggcattggcaaaccgactgaagttatgaaattaccagaaaaaacgattactcttcggttgagcaaatttttagctcaatagcagtttctaattatggtattcattcattgtgacagaaaactaatcattatacttttagacggtttcttagtttccgaaacaatttaaatggggacaaatgaaaatgacattactagtccattaccatggcatgcagtggaaacaagcatacaaaggtaagatcgatcgtaagaatattaaatatgaccatcgaacaatcacttctttattaaaatacaataaacttattaaaatagatataattctcattcaaaagtaatgtgacatgatttggttaaaagtaacgtatattaggttattgcttctcgttgaatcaaattaatcatcgagaaaccatctgaaaactcgactattggaaaaatgtatttcacacacggtgcaatttgtgtttagcaaacggtaggtgaatacttgttagttgtgaactcgtgacggtcctttggcaaaagatagtcttcgaacaaaagagaataattaagatcgagattggttatatttctttatatgtgctgcctagatttttgtatatatactttcattaatgtataaccatgactttgtaaactgttgatcccgttgatgaaaatgaaaggaaccagaaacgatatttatactttaaaagaatgtttacgagaggacagaggatatataatgctaaggaaaagtcaagagagatagttatgctaaaatgtctttattatgtcatgaattttgtttacttcttcctttgcgtctttcttcttgtcaacgacaatgttcttttctcattggtccattaaggaagcagaaaaaaaatagtaattaacagtttatattcacgtcggccaataggagaattcctattcgttcttatacgaagcaattgaaatgttaatgtacgtatatagtagtaaactttgaagaaccactatattgactattataagaatatgatgatctcttatggacaaactttataaagttttatccagtgcgcattagtatatgacatatccgcatgatttgttcaattcagagaattaactagtcagaaactcaaatttcatgttttattagtagttaatttcgtatatatctatctgttttcaggatagctagtcttttggtttttgtttttaaatattcgtatactaattatttttttctcggttccttataatatttttctattttccgccattttttcatcgtgtggttaatctttaatcacgtcgttgtcatttcatactacttttggtataaagaaataataaagcaggggttaatttcgtaatcaagaagaattattggtaagatgtgacgtaacaaaaattatcaacccaattatagaatttggggaccatctatagttcacaacatcaaacccaaacatacttttgaaattttttcttgtcaacaatattttcttagacattttttaatctgtgttttagcaactacctgatttcttacctactttttttttttatcgtgatcatgaaaacaaacagttaggttaattttaataagaataagtataactaaatttataagaaaaaatgatcatataaatattagaattcttgtaaaatattttcaaacgccttgatctaataccatacaattcgactaaccaataatcagcaattcaatcgtttatcaaatattcaatattgtttacgatgattattaagaaagcaaagagttatatgaagtgtttaagctaatttctgaatgaatgtggtcgtggaacataatttcaattttgattaataataaaaagaaatagatgagaatagaaccaaaaaaaaaaaaagacgagctgacatctatatcccaaattttgttaccactatacgcctacaccattagataatttagattccttttactttcaactatacggtataatctaagaatgaaattatttgtccgagaagctaattggatagttgccacttgccaagatcaatataattgtagatgtaaaaacaaagtttcataacaccatactaggttagatctccagttctccactaatgagatattcaatgactagtgaagacgaatataaaatttaagaataacggaagtctgaggaaaatatatatcatcaactaactccaactactaaattttgtcacaacaaaaaacacaacttcaagcattggatgctttttcacaacatcaaaccaaaatttacaagcggttagttaacataaagaaccgaccgacacaaaataatattttctatataacacgatatttatactaataaaaaatgaaacgaatatcaactttcattaatttattaacaagattgatatataaaggcaaaaacaacactttgcctaatcaaaacgcaagtgacaaatataacaaagatacgcctcgttacttcttatgacaacaatactttccactaaatttgatcagaaagtatcgaataaagcacacaactcactaatcaagtcattaagctataacatgtgcaaaaaataggaggcgatttgtatcccttgaataattggttagaaagcaaatagacataaacatcaaaaacttgtatatgtcggcataaactatcctatttctgacaaaagtacaacaaatatctgtatactacatgtcggctcaaattctatgcacaaacaaaaagtcaatttactcgaggaccggtcagaaactcttcagacacggttcaaacacttgattatcttcgagctaaaccaaaccaatgttttgaaaactggaccggagattgattaatttttaacggttagcaagaaatcatggtgtaagtatatgactcaacaacaagaacaattccttgctcaccataccggtccggttaagttttgaactcaaaactattttccaggatctagcccaactctttaagcaaattctcattttctatgccacacagaaattaaaacaagaatctttgaagtcaatttagtgaacaagaaactgaaactgaatcatgttcatataagtatcaaaggagtgcacagacacaaaacttgagccctattacgggtattgaaatgatcaaagcaaaagaaaagaaaaagataaatcgaaacgaagcaatgtcaaaaaggcagtgttgtctgcttatcaatcattcttcgtcgtctgagttattaaacttagtcgaatgtgactcttgatcgatcaatcctcctctgtagcttcctcgtttcttcttcgtcttctcatgtcggaaatccctaaaccaaaacaaggtgaaatataagagatcaagatatgagcctaaatcagtgatataggacaagtccaaagggtgaggaacatactaggttttactttagttatgaattgtcaaacccgaaataaccaaactgaatcaacaacctagagcctcgttgtctaactctatacaataagtctatagggtgaggagcattaccttcctctcacttgcccgagaacctcttgagctttaagaccatagccaatttcagcaccaccctataagacagtgaagcaaacttcaataaaggcattgataaaacaaagattgctatacaaggagcaatgaagattatatcgaacctttgaatagtacgagttgctattctcagtgtacacaatttcgtcaacgttcaccctctgaaacggtttcttcggctgtaaataaatgaaaaaacacatcagtacacaatcctcgatccccctcaaaaagattcaactgatgcaaacgcaaatacctcttttgagttagaaagcccttttcctgacttctgatttgttgactttgtctcacttttctcagcatttccgttttccttagtttcagtctccttaacaggtgtctcttgaacaccctcatcgttttcaactacattctcttccttcttcctacgttttgattcttcatcatcatcctcagtctcttctttagtctcttcaggctctgatcttttccttttctttgaaactttctccttatcatcatcagcctcaacagatttcgacttgctcttcttcttctttttctccttaactccatcttcaatcacagcatcagtctctttgaccttctcctcctcggttactttcaccttagtttccttcttcttcttcttctccttaactccatcttcaatcacagcatcagtctctttgaccttctcttcctcagttacctccacctttgtttccttgttcttcttcttcttcttatccttctttacattctctacagcttccactacattcgcctcggtatttccattagctgcagcttcatgatctctgcaagacacagaacatgactaatgatacaatgcaactaaattcgaataaagaacatcttgttacatacttgagaagcgaaacaagcgagacaagcttacctcttgttcaaaaactcgctgaaaatttcctctaaatcaggtaaactagtgttcaattccttcttctgaaacaataacaaaacagcagattcattgtcagaatcctacgctatattaacaaagtatcaattccatagtaatctaatctacagtgaagtcatcaattaaggataaagttttggtctttccaccaaacggcaaaagccaagtctcttaaagttcgaaaattgattatacaaacctcgatttcagcttcggagagcaatttcttgaagcatttggaaaaaccacatcgttccaagtattgagctaccgaacggagaagaagagccttctgctccgattccaaagccgaggttttgctctcgttgcccatatctatcctacaggtcaacaattgacgaggcgtgagagctaagagagctgggtttacggaagactctgctgctagggtttaggaagctcgtgttttcaatttgagctcaagacaaaaaaaaattgcctggaaccaaaataaattagggttttttaccgggtgtgcaaattaaacccgacccggattctataccggtttatttcgttatggtttgcaagcttttccttttctcttttttttttgtttcattactagacttaaagcccaatgggtcattacaaaaaaagtatgagtttaatgggtcattaaaaaaatgtatgagcccaatgggcaataacataattacttgtctctaatcaataacaggcaaacaagtaacagctatggtttatttttcttacctgccaaaattagtcaatttatctaagacgcttttgggttatactgtttgtttctttttctacaggtgattttgaaaatgtgtatctctaaaaatagacaagtatctgaacacttttttctcggagattcttcacaaatttctcaaacactatacatggaaacttctatacatttcgtatagaaaatattttctagaagcattacttttagagaatttgaaatttgaaaactgtgttggccaaatatacaagtaagtatccatagacttttagataattttgtatctttttcttttggataccaaagatgctataggaagaaactaaaatttggtgaagtttttttttggataaataaatagtattaagtaatgaaatacagagaaatattgcaaactatacttttcattctgaatacatttttttgggattattagaaattgttttgaggttatatatttctgtttaacgactgatagatggtaattttattactgcattagtgaaaactctacattaaacacttttgatgttacatatgaaatgtctattactgagagttggtgctcctgttgatgttcttagcctgccacacggtattcgcgacgttacggtgttacaaacttacaataatgtgatacgggtgatgacaaaccctagttcattccttgttgaaacaaattttgtgtttctctccaattgccacttgattttcgaaagtacgtacattgaactttcttgttgcagctacgagttatctaatgttatagtacacgcttccgaaataaatacgactttggcccaccctcacgtatgtatataacttcttctacctaattttatcaatacgctttacttttaagaaaaatgtaattcgttcagcacatttatcataagaataacatatagatcattaaaacaattaaaaccttaaaccagcctatacgagggaatcatgaaactatgttgctacaaagagcaaaccgttcacaaatacggctgtggcagtgaggcttctgttttcagattttcacatgtttcagtccaaaaaacgtaacagtggtaatagaataacaacttactgaaactattaacaagattcatatcaaaaatataactagaacagtagaatgatatatataaaaagtgttgttttggttcgaaatctccttgtatatattaaaacaaataaagaattgatataagctataatatactatagataagagctgtttctattattctgttcagtagataagagctgtttataatccccaaaaatataagagctgttctttcattttccctgtattaatttgcttttgaaatgtccacaaaatacagtttctgctctgactaaaaaacaacataattcactggccactgatgtcagtatttgcatttgcatgtgacagaatcagttgtgatctttttctctctctgcgtctcataaataagtcacgagcgaattttacattatcatgagatcatcccaattgaatctctatcttttcttaaactattctcatacatgtatatgtagatttttatttttttcagattcgtatttgatggctgtaaagtataaatgcaagctacacaatgatgttttggactgcccataatcttattcctaatattaaggacctcaaattagtaacgcataaagattaatattctatgccatagacgtttcttaattcttatagttgatgctttaaatgtgcattaatcatcttaatgtgtgaatggtaaatttggaaatagtaatgttgttaccataattaatatacgctaacgccaccacattcaacaccgtttcattaagtcgagtccaatcttatattaccactcaaattcggccgatattgctccttgttttgatattttcccacgcgacaaaattcaaccggaccggtccaataaaaacctctcgcattgaagatcagacttattgacacccgtacttgcatgcaactattactattatctgtatttattatcaaattacacgaccgaaaatcaaattcagttgcaagatcatggagactagctagagatcatagattccttcccgcttcaaacatatctagtgatatagaaaagaaatcgccacaaatacaccaaacttgagattcatcattacactaacaacacgattacatatatttgaaacactttttaatttggaccgacttaagaagacactcgaagacaaaagaaaaagtacattaaggttgaatcgagatagttctataacatttctaaaagatcaatgtcggtttacacgactagatatactaaccgtaccaaataccaccgactaaaattatttcccttgattaaaacgctaattaattgactttaattattaagaaaggaaattaataaaaaaaactacaatattataattttaatgatacaaaacgagacgacgatcacaagaagaacacgagtacttcctcttgatcttgaaacaaagaggaacgaaacagaacatccattttctttcgacatcaagcatttgcactttacctccacaataaggacacgatccaggtgcttgttgtctccctaactctgtctcttcctcatcacataaacacaccaaacacattgtttttctctctcagatctgagtcttgcctctctttttcttttggtagctagggaagttttagttttgtaaaaattctgtaatgggtttattttgtttggaagatcagagaattttgtgagctttagaggaaaattcaattattttcttgagaaaactgtttctgagaaacttcttgcggaggcttatattgaaagagcaaattttgaagtcttatttttttaagtcgctaagataggatatttggttggtgcatgaacgagactttatagagaaaggaggaaaaaaacggctttgctttttgcccgttttattacttgacttctttttttggtttgcctggatattttactatctgaggtatttattgctgacttaattatgttgtcaaatttggttaattactttcaaatcaaaataaaaataaaatggaatataataagctggaatacgcgttattcttgtttcttaattcaacttttttttaagagtaagtttaatttaatcggatgtataacttttttactgatataaatgttaaatatttatattattttaaaatcacgataataattacaaaggaaactaaacgatataaagacctaatcaaacttgcggcatattttagtgggtataacaattgtttcaagaattacttttttcctcaaataagtgtaatctaatgtaagaaatataaaattgtggtagtaatggtaacaatgttttcaagttttgctaacgtactgatttttccaacctttagattgataaagtggttggtttgatggtattcacatttgttaactgttcttgatgaaacatgggacagtttcagaaattttttctataacatattgacaaatacgagagtcaaattaataaaatagagtttgtttcttaaataaaaaattgcttaattaatacaatatagttgcaatcatttaaatgtggaaccacacgcgtgcagtgtgttgatgtaaattgggatgcttcactcaagctgtatagagtacaagtgaaatgaaaagcggaattattgtaagctaatttgtacatttaagagcaaacaaaaagtagaaacaaacaataagtcaataactaatgccgggtctcgtgactcttgttcctaatgtaaaaacacaatcacgtacgttaaagactccaatgcattactacaagacgacaatattctgcgttaccttttactttgatttcatcgccccaatcgttggttttttgcttcttttttttttttgtaacgtgcaaaagaaacatttgatatctcaaatgataggaactctaaaagctgaaggtggtataacctaagttcgaagcgaatgaatcatggccgttagatcagcatctacataggtggatatcggggacacaatatgaacatcgacggctcaaaatactatggacgtgttcgtcataaagttcagtaacttattgtattaacaagccaacatattctatggcccaacgtcccaatgttttaaaacgagtcagaagttttctttggttagatgtctttttttttttactaaagcgtaaatcatttagatgcatttagataaaatatttcaatgatgttattaaaatattttcaattggattaaactacatgagtttgatgaatatgcgatggagaaatatgggagatcagatcatccctttttatttctcatcatattaataatctcataagatataaaatttactctctcattgatttaattgtgtccgtataagttgtttgcgatttggacttattgacgaagtacgaactcataatgtcgacaagtaaaaatcaaataatggacaatggtcgaggacataaatgaacacatgggtagtaagcctactatagattttcgtcgtttttttctagggcttctaaagtgtgtcctagaatacaaataactagattttaacccgcggtatactgcggagacaatttattttttaaagttagtatatataaaaatttgtaaattgtatctatctataaaatatttttattttatagtttacaactgttattaaataacgtcctgccaaacccgtcccgcaaaacccgtcctgcaaaaaatccatttattttattaatattgatcttatttatgaattattgtctaaatattttagtcgatgcgggatgttgaacccacacatttttcgccaattggtcaatatatgttcatttttaaaattttgaatcacaaaatatgacggaaatgtttttgagatttttttaaactatatattatataatgatgttaaatttttttatatattaaactttttataagtttaaatattaataatgttttataaagtttaaatatatatataataatatttaaaaaatatattttttgccttttaggtaatgacataataactctaaaagcaaagatttagaagatttaaatcgttaattaaatattttcatttctaaataattaatgccagtagcatgacattgtaaataagttcaaatatagaatttatttatttaaacaaaaaacgtttagtaagaataatatttatttaaacaaaaaaactttgttttaaaatattgttaacaaatacgtttatgctaattttaagggattgatgtgaagtttgtttggattaaatttgattgataatgtgattgacaatttaaattaagaatttaaagtaaaattaattattttgaaaaaaaaaattaatactaatggtattgggttgtaaataagtccaactttaaaatttatttgttaaaatgactacaaaaatatatatatagatagcaaattattgctgcaagattgtatcttgtgaccaatggcaaaacatactatacggtcttacggatgatccctgagtatgactgttttggactcaaaatcgaatttcgattatgtgacactatgggcttgatgataactgttttcgttttgacccatgttcaatccaataccgaatgtttgtggaacgtcggaccaggactcaaccaatattaagtgggccaataacataacacgtaaaaatgagcctagctcatcctaattcctttttttctttttttttgatttgtggacagggaagtcaaacttcgatagttggaccgtagttaccatcatatctatatttggattaaaacaaatacgccaaaaaagttcaacatctaatcgtgattttcgtttgcaaatcttttttacgaattttgcattagatacaactagtccatgtatagcgaatgggatataataagaatacatatagtataaaattcgtaggaacaaaagcaaagagacattcctactacaaaccctacagaaaaaaagggaatgaaacaaaagttgaaagcaaaagtcagttgtggcccattcacacctcatctgcaatgatgacgaaacagagtgggaaacccaaaaagtttggcttttatttatacattttcactaattaatagactaataccataaagttgattattcactcttctcccatgcaatacactccaaaagactcgatagatagattgatcgttgattcgtaatcgtaccccagccaaaagaaagaaaaaaaaatcaatacataaagacacatcgatctacattaaagtttttattctatggtcttgtttgtatatcatgtcatattttcattaaaccccactcttatcgtttttccgtatattttccaccgaatgatacaaatcattttctctccactgtcgtttctttttaattacatgctttgtatacatgtataacattaataatctagcggcatagatataatatatccttagctcatgattagcctagtcatgaccaaccgaattatgaaaataatttttttttgttataagcgtacgtggataacataacatgccaataattattgtatcaaacaatatatcatcacagtagcagtcgaactagttggagaaacagagaaagatgaaaaatgtgaaaacagaatctactatcttctttttggttgaatattttttaggtgtgatacaaagtgatgggttttagactagcaaagagaatccatgttgggtgcttcaaaaggcgagccatcaaaaagaaagaagagaaagaatataaagatgagagagagagagaatattttcactaagtgtaggctttggtgaatgtgaagtgtctttgtgttttttggtaaattgttgtgtcagcttgatagggcacgcgtttgttcaaactcccaataaattaaaagaaaaaagaagaagaggacatttgtcactttgccctccctgatcacgagagctgaaacactctgtctaaaacagaaggtctgtttccccatgtgattggatccttctatctgacctagagagtttgattctccattcattccttcacgtttcctcttggcctcttcctacatttttattttcctcattccttcaaaatatttatacttatctcaatacaatataaagtgtcatgatccaaatcagttctctgttatctacttactatatatattctaaatattgattcaattcggattgagacgttgaatctttttcgtataagtgtttatgtttacattcgatatgagaagttttatgttttcgacataaaaatttaattcttatattcatataaaaactacatttagattcaaagctactcataataactaacataacacaacaaacttacaaaagtgttttatttctcgtgtgaatttgagttcatgagggcttagaccgtcaagacttttctatcaaacttagagattttaattagtgttagtgcctataagtctaggtttgtgctggttggattatacagttatacatctcaaaagaaaccaaaagcgaagatacgtattttaacttttcttgatacgatgcaaaatccaatgatttttccaatttataaataattactaaataaaaaggataaacgttatttttcttccttagcaaaaaaaaaaaactttttgactgcaatagtggaatgtacacaatacaacagtcactttttacacttaataaaatgcacgtaaagcttttttcttgcctcaaagttacagccagatgtttttttaccagaacctagtaaccaaattagattcatgtctagctatttagccgttgtcttgtctttactatccaattttcttacctcaattgtgttttctttcttttttcagtatttctttaactcaaaagtagttgaaaaccactaaaactgaagctatttacaattaattaattgtacataacttgattatcatcagagaataatacttataaaaagcacacgtcatacgtattatcaacattatttgatttcgttggcatcatagaagaaactcaagaaagacacaaactctattattatatccggaatttcattattttgccatgtcttgtagatatattcatatagatgcgtatatgtaatatatatggactttggaaagtttttacctatacactcactatttacgtagggcatgcttttttgagtcacgtcaatcatttacaaactttagcatctgattacgattaatgtttgggtaaataaagttacctgaacatatgaatcagagcttctgcagtattgaataaaatgtaggcatcaccaacattaataaaaacaatctcaatcaaacaaaaatacttttgaacgttacgttacgttctctatcggaagtaatataattcactatttcagctacactaatacattatgttcgccagaagtttctctgtgtattgtgcttttgaacattagctataatattcatccaaaatttgtgaaattgttgatttgagattttatataaaaaaaaaaccgacatttgactacccaaataaatttggtttagtttgttatcattatacaactcaatcgcttatgataattttttctcagacaaacaagaacctagataaggctacaaattattggcttgtaagtgaacttttttataaaatatatttatgagcagagacacaaacaaatggtgatttctcaatgcctcgaatctgtcaccgtttgagattagaagcgtcatagatatacacgagtatgtttaattcaactgtctatatgtaagctttcttccatcaaatcaactataaaagcttacatagaatctgacaatttcagacaagatattcttttatattcttgtacaaatttgtttgctattggttaatatcgattgacatttgtaataaatattatgatgccttgatccatcatttattggtacatatagaaagtgttagactaacacttctctgcgttgaaacatatatatgaccatgcatgggatgaagataatcaattatggaaccaatcactcccgatcaagtggaaggtttcaaagaaagaaaaaaaaagtggaaaaaaagttgaaaggtttcaaagaaagaaactcttgatcaaagagagggtttggagaaatgaagaattgcgcagtttgattgcacgcaaaaatgcatgttcaacaaatgaaatcatcatcatcatcgactccctcagtacatgtatacatgagatgatgctgcgcctacaaaaccattaattggaggattattttctagatcttagacacgtaatacttatagatgttcaatttcactgtaagaaacactattgtagcatagagctttgtattttaaattttcatattcttcttatgcatgtttttggtaacgaagcattggaaaataaaatctcaaaagctctgcatcctatttacgaaagggagactatgattctttttccttaattcctttgttgtgtcttacccatttcttgaaaacgatgtgctttattttttgaaatttacataacaaaactaccttacaagtaagatacagtttcatttgaagctattcttgctaataaattaaatttcttctcattttcattgatggttcaactctcacattttcgccaaagattatacagaaaaatcatgatattatatatccagacccaaatctaggcaacatattttttgcgtatgtgtttctttgttataataattacgatatcatatcatgaaatcataatcacaaacataaaacgtttaagttttgaccaatgcgcgtacttttaactttaccataaaaaaaattgcataattcacattacatatgcgcgtacttttaagtgtaccataaaaaaatgcgtacttttacattaatcttgatttcatctaaagaaaccagactaaaacaacgatttctatacttcatcatattgattatgattataaatttataatgttaactaaactctgcataataaaatggaaatattgtttaattatctttaacaaaaaaaatatcgtttaattatcaaactaaaaggttatcaagaacatattttttcttgcgcgtatagttttactttttggtagttttttttttaaagcctcgcttaagttctgtttagaagagtattgtaaagatctaacttcacttcaatctcacaaacacacgaatcaacttcagcactaagaatcgaattgatcagaactgaaagaaagtaaaagaaaagctgaacacagagaatttaacgagttcacgttccaaaccggaacgctacatctcgccggagaaacctctccggaaatccactagaacttggaaacttagtctctgttacaatgctttcaagctttctctcactacactcctatctctctttgatctcaacaaactcttatcccgatctaacggaattacagagaagaagaagaagatatagttacatagctcatgcgaaaagaccaaaacgccctcaagcttgttatgactttagtcagctcgcctcacgtgttatgactttagtcagctcgcctcacgtgttatgactttagtcagctcgcctcacgtgttatgactttagtcagctcgcctcacgggttacgcttgaatcacaacagacttcgaaccctctctttcaccgagtttctcccacacttagacccgaagattaaaatctgagtcacttcttacaattctccaccttgactctgattgtcttccttgtctcaacttgttctagttcttggatctcccctccggtacctgagattcacctctcagttctcagtaactcggagcatatgcaatgctccttcaaacttctccacgggcaatacctttgaaaaaatatctgcaggattgcattcacttgcaatcttcaccactttaaccagacctgcatttatgatatcccgaatgaaatgtaacctgatatcaatatgctttgttctttcgtgatgtacagagttctttgccaaagcaatagcactctctgaatcacaattcacctctacactttcctgtgcaaaaccaagttcttcagaaaaacctctcagccacaaagcctctttaacagcatcagttaatgccatatattctgcctctgtagtagatatagctaccaccttctgttgccgtgatttccagctaatggtgtttacaccaatagtgaaaacataacctgtgattgacctccggttatcataatcaccaccatagtcagagtcacagtaacctcttaataagaagtctttattctttctgaagcaaagcttctttttctctgtccccttcatgtacctcaagacccacttagccgcttgccaatgatcctttaatggtctactcatgtagtgactgatcactccaactggataagcaagatctggcctcgtgcctatcattgaatacatgatgcttccaacagtgtttgagtaaggtacaatcttcattctgtcaaattgttcttgatactctttttcagtagctgctcggagcttgaaatggattcctaatggtgttgacacaggtttagcctgatccatctgactagatctcaaaactttcttcacataaccttcctgtgacagagtcaacacacctgcagctctatctttagcaatctccatgcctaaaattttctgagcttcacccaaatccttcatctcaaactctttacccagtaactgttttaactccatgatacttgacttttctttagcagctatcaacatgtcatatacgtataggagtagatacacatatgaccttatcactttgctgcttcaagtatacacagctgtcataagcgctcctagtgaaatcaatactctttataaactcatcaaatctcagattccactgtctaggagattgctttagaccatatagggatcttttcagtaaacataccttttcagggtatttcttatcttcaaaaccttcaggttgagccatcaatatctcttcatcaagaaatccatgtaggaacgctgttttaacgtccatctgatgtagctccatgtcaaattgagccaccattgagagcataaacctgatagacacatgtttaacaactggtgagaagatttcattataatctacaccttctttctgtgtaaaacctttggctaccagccgagctttaaatctaggtgcttccactccgggaataccagctttccttgtgaagacccatctgcaaccaatgattttcgcatttactagtttatctactaagtcccacgtgtggttttttcccatggatgatatctcttctttcatagctccattccataactcccaatcttgatcacttaatgcctcttggtatgttttaggcttagacttacccccatcttctgtattgtaggcaaacccaaccatattagactcattatatcttctgttcaacttaacagtccttttctccctgtctcttactagtaggtagttactgagatccacttcttcagtagaattatcactactgctttcttcttcttcataagtttctgtctgcacttgattctgttcattaataatctgttcttcagtaactccaccttactcaacgctttcttgttctgtaatactttgatctgtgatattagatatcagcggattagaaccttctcctatgttctccatgacttcttcatagaaactgttctgagaatcagttttaaggtctttgtacatcatttcctctctgaatatcacgtttctactaatgacacacttcttttcttcaagtagccaaactttatatcctttaacaccctcaggatagctcgtgaatattcccttctttgctctaggattcaacttcccttgatctgcgtgtacataagccaaacaaccaaaccttctcaatgaactcatatccggtaacgctcctgtccatctttcttctggcagctcaaagttcgttgcagtagagggagatcgatttattaaatacactgctgtagcagcagcttctgcccaaaatctcttttccataccactttcacttaacatgctgcgaactttatccattatagttcgattgagtctctcagcgacaccgttctgttgaggtgtgtaagcaacagtcttgtgccttacaatgccttcctctttacaaaacttctcaaagtaatgattacagtactctaagccattatcagttctgagtttcttaaccttcttatcagactgattttccaccattttcttccattcaacaaatttctcaaaagcttcatctttcttcttcagaaaatatatccacactttcctggaatagtcatcaatgaaggagatgaagtattgacagtttcccaaagatgctggattatgaggagatccccataaatctgaatggatataagctagcttctcctttgtaacatgctgagcagatgggaaactgactctatgattttctgtccttttagaacaatagagcatcctataaccaccttgagaataccatcttgagacttgaaccagcatcctttgtcttctaaggttcctaaagaaattaggttcctagacattgttggcatgtatctcacttctgttaaagtaatatgtgtcccatcagagttcttgattcttatgtttccaattccttttacctaagacaaagaatcatttcccattttaacataaccagatttcacttctctaaaatctgaaaaccaatctctccttggtgtcatgtgaaaagaacagcctgtatctagaacccattcgtctgcagtattccctgaaacaaatagattctcttcttctgccataagaaccattgctggatcatattcagctttagctatactcgcttctcctttgtctgaacttgatcctgatcctttatctttgtttctttcaagccatttgaaacactgtttcttaaagtgtccctctttaccacatatccagcatactcgcttaccatctcgagacttagatcttgatctccctttacccttatttctttggttattgttggaagatccttcttgtcttcctctagcaaaatttccttctgatacagatcgattactctgtgacaactctctttctttgtctcgagctgcaaccatcacatcatctaacctcaacttttctcggctattactatacttcatggtttcaactaaaccatcatatcttgaaggcaacgaacttagcaacagaattgcttgaacctcatcagtcacctcaatctgcaaatgattcaaatcagccacaatctttaagaaatcatcaatattctcatcgattttcttgttttcttgcatcttaaaagtatagaaacttagctgagtaaagactctatgaggtagagatcgaatcatgaacaatcgatctagagttccccaagcttctgctgcagtttgacatagctcgatctttcttaagaccttatctgcaacattaaggaagatcacattcttcgctttatcacatcgctcaagccttgctgcatcatctgcatctcgtttcttctttttctccggatcttcttcttcttctgcagtgagcggcggagacgatgttccgatgacaacatccttaagtccaatgacgcttagatgtgccataatccttgttttccacaaagaaaaatctcctgatccatcaaagatcacgatcggagttcctgccatcttagattcgcactcgctcaacaaccgtgagctctgataccaatttgtaaagatctaacttcacttcaatctcacaaacacacgaatcaacttcagcactaagaatcgaattgatcagaactgaaagaaagtaaaagaaaagctgaacacagagaatttaacgagttcacgttccaaaccggaacgctacgtctcgccggagaaacctctccggaaatccactagaacttggaaacttagtctctgttacaatgctttcaagctttctctcactacactcctctctctctttgatctcaacaaactcttatcccgatctaacggaattacagagaagaagaagaagatatagttacatagctcatgcgaaaagaccaaaacgccctcaagcttgttatgactttagtcagctcgcctcacgtgttatgactttagtcagctcgcctcacgtgttatgactttagtcagctcgcctcacgggttacgcttgaatcacaacagacttcgaaccctctctttcaccgagtttctcccacacttaaacccgaacactaaaatctgagtcatttcttacaagtatctcagctattctcaaaagatcaaaccctctttatgatccggtgggttcctttgtagactcaattttcataaaagcttgatcgatcgagattcatgcttcattgggattagagaagaaaagagagagtaatgatgattagtttctttatcttttccatgcaaaagaagaaaagcattaacatttgaaaaaaaggtaaagaaaataattaacactctttttttttttttgcctttttttatcccttggatttaaccttctctctttacctttttttccccttctcctttaatactttaatgatcactcctgtcccctttagatccgatgaacaccaaaaagcccttttccatataaaattaacatgcgttttttcttctttctaatttcatatctattctacagtctcatacctagctaatatctttttgaataatttattattataaacactaaacctcaaaattaatgcgtacatatatttttcgcagcgatacgtaacacaaagtataaatactttttaagtttttcacgatgacatacatatattagtaatattaagcacgtaagttctatcacaaatgacaatacataatcggcccgtctatactagtttgcgagacactgatttagatccatattcgtaaatatcatagaacaatatataggtctaccctttgcgttgatatacctttaacaagagggatgtgttacatccacatttaaagttaatataggtattgatgtgtcaacactataattaaagttgaatttttactgcaccagataataataatttaaataaataagtacaaaaattaactagcacaaacatttataggcaaaaagtatcttgcataatgtatatatatatattttttaaatgtatatatgttgctctgataagaagtaagtagtagtattgcagaaaattaaaggttcgccttttattcgttaatgcgataaacaaattagtggaaaccgtataatatggaacgtaaagttatgtgctttcattttcacactcccatgcattttcacctttttcaattttttattttagaattttgtaaaccttttcctttgttaattttctcgccaatatatccaaacaaaaaaaatcaaacccgtgtttttatttggcattattggtctgatcatatacttatgctagctaaacctaaacgtgtttttaactttcaaactcgttattaaaataaataaaaaatttcaaactctgatatttttctttcttattgattataatatatcgacaatcatcgttgcgatgtttgatgtagtttcagtttcagagtttgtaaatacttcacaaggtagaaaaagaaataggtgtagtttattattttcttctttaaaatttccaagttcaatattaattataactgtccaaatatcaaatattaacaataatggtcaaaagcactatcaagacaccgaatcgattatgacacctcatgggctttaagtcttaacgattctattgattgatctcaaacttagaatagatttccgttttcgatgaagttgcttatatatcttttaatatatagactcaagatgcatttgcaatgatggggtcatctttgtattccaaactattgctggatatatgtaaggcaaaatgcaaaccaaatcattagaactccaaactttgccactttagctccttatcagtattaaagaaaacttcatttgcatttttcttcatcaatctttctctaaaagtatatactttccttgcaaatagagtagtctcaattaaatatatttatatttggtctttctctcatttcatgggtcctatgggaatattattccccaatgatttggactctctccaccataataagacccatcttggcttctttgattacacaaaagttagaagttatgatcattacactaaactaagagcaaagtagtgctccaatattcattagctaatatcatgtagaaccaaaatctttagctttctctttgccttttttcttttcttaatgttaaacatttttctgtgtttgctattaatcatgagggtatataatctacaaattaattaaatagtttagccaaaagcaacccatgatgtgtattagttttggcatgaattaatttcaactctagacgacatttttgacttcgaaggttagaaacaagatcgagtatgatatcacaaagatgtcttgattatctgtattagcaaagaattatgatagattagatttcttcatgcagtggtaaagcgtatatttttgtttgctatatttgttttcgatgatcagaaaattccaaaaaataaaacacagacttatccactaaaccttttaaaagtgcagtactgttaccagttaaaatgttattcaagtcgcagtgataaaaatctcaaaagtatatgacaattttcattcgtagcacctatatatttgcatttttacatcttccacttcgaatttattgattgaggcttcgacctctactacaaatgttttcacgaatatatccattgcaaaaatttagccacagacgaacaatgccgataccgcattgatgactatactattactaatcttatggtacgtagtatagcacatttgttttaggattatagtttgtaatgaagaactacagctgttggaaaaaaaaaaaaagagttatccgacgatagaaaatgcagcatatagaatttgtaatgaaaaactacgtctttgagacgacgtaatctaaagcaaacactaatcttctatcttgttaatccgtttcattttttttgctgtgagttcttttatcggtcaaacaacaaatgcatggtggggttaacaccaaagtccttttaccacgtggttttaaactaaattacttaattatacacatggataaagacatatatgttgatgaagagaatataataaagcccttttaccatgaagtttctttttcgaattttgaccgaaaagagattcaataagatccgttatatagatgagaagtgttattgggaaataaagcaagagtggcaagtggacgatagtgtgcttgcacaatagtcgagagaaaaacacattattttgagtttaaggagtccattaacaccatgatcaaaccaattactatctattcaaattcaagattaatcactaattttctagctttttgagtaattacattcgcatttgattgttcttcacttaaatcaacttaattttatgatgaaccacaagactatatctatttaagtatttatagtaaaacttcaatgtaagttcttgtaatgaaaacaaagagcgtttttgtccactatctatatgttacaaacttacaatacaattcgtttaagaatgtttggtgggagattttcacatgcaacatatctaatgtgggcaagcaagagattgcttgaaatagaccaatcctcgagcgatatccgcgggcaaccattttaatcttggtccccttagccgctttttgaatcaaaatcttttaaagtttctttatttcatgaaatcaatcaatattaagaattttttggaaacatacaaaatatttatagttacagtagttagttcgtcattaccaatatgcaaagttcgaaacatgtattaacaaagatgattctaaagctaattttgggcgacattctaagtttttgcttctttttatagttcttttagttagtggggaaaaagaagtattaaagtgggttgttgggatttttatggtaaataacattgttgggaatttttgtatcagacaactcaaaaatatattccctctgtttcttaagtactatatgtttttgtgatttttgcacaatttaagtaattatttgcaataccaaattaagtttcaatttattaattgattattataagtttataactaagatttacattaaattgaatttaataggtatgagtaagaaaatgaaatattactgtcacaaaaataaatcttaacccttttttgtttgtaccgaacacatttcattttgttttccttcttcctttacttcttctctttatgcaattcttgaggatcgttctcgtcacacgttagcacttagccttagcagaccagaggagctacaagagtttttttttgacaaatacctttcacttaagaccaaaattgattgaagtttatataaaataataaatgattatgtggtataaacaaaaggagggagagatgagacagaaggttgcttttgcagtattccgggaatgcaatgctgtctctctccgaggattggcgtgagtgagtgagagagagagagagagagtctcattcatctcttttgtccttcttgtaattaattggttttcactattacaataaaaatgatactataattttcgataaaaatatgcctttattggagattaaacaaatgcgagtctaaataacctttttaggaccaacctaagatatacataaaaagatcaagaagatctttgtttggtcactcctacgcacatcaatgcaaaaagagacaaaacttctcttaaccaagaaatgaataaatttttactttttacaaatgtccaattcaattagcatgcattttaaaaacgattttttctccacaagttattaatgtgtaaattagtatatatttgaaaaaaagacagcttttttttatgctcttattcgctaataatgaccaaaaattaaaagagatatgatgagtacactgaagctgcactgttactgtaaaaccaaatgagaggagaggaacaaagaaaagagagaagacaaaaaagttgagtgaaatgcaaaaaatcaaaagcatacaaaagctgctcatttgtccaaaaagaaacccatcataaagtaaaagcattataatgagatcaaaacccttcgaaaaatttaaaaataaaaaccaactttttcttaaaaaataattcaacaataggaacagaaaacacacagcatgaaataagtataaaggaaccagcttggtctaatttccttatctgtctaaaactctcttaaacctctgtctcttctctctctttcttctcttacttatcttcttcttctcttctctcatttcttgagttctctctcaagactcttcttttcttcagtcttcaaacataagaaaggaagttccttttgtttcttctgttttagttctcttgtgggtttatctatttggggtggtggttaaaggagggagctttgggattagaagtttttcagtgaaatcagaaagctttcgagagaggtttttttcaatttcaaaacgtgggggtggggggttagggttagggtttacaagttatgcgaacaggtggttatacgattcaacagacactcactacagaggctgcttctgttttgaagcactctctcactttagctaggagaagaggccatgctcaggtttcttaacaaaaccttcaacattttgttaaagttttgatctttttgatctttcgatgttttattaatggaaaagtttttgtttttattgtttcaggtcactcctctccatgttgcagctacattactgtcatcaaggacaagtcttttgagaagggcgtgcattaaatctcaccctggtttttcaactaattaccagtttgccccttctcgtcttcaacatcatcatcaccataaccaaaaccatcctcttcaatgcagagctctcgagctttgtttcaatgtcgcactcaacaggcttcctactgttcctggtcctatgtttcatggtcagccttctctcgcaaacgctctcgtcgctgcactcaaaagagctcaggctcaccaaagacgcggctgtatcgagcaacaacaacaaacgcaaacgcaccctcaaacgcagcaaacgcagttattggcagtcaaagtagagcttgaacagttggttatatccattcttgatgacccgagtgtgagtcgggtcatgagagaagctggatttaacagcaccgccgtgaaaagctgtgtcgaagattgttccgtttcttccgtcttttacggtggctcagccgtcggagtcttctcttctccaaactctcccgatcaacaacaacaacatcacaacagcatcaaccgacttcaccactaccaaaaccctaaagatttcaactttataaaccctaacttccctttatggcaaacccatttcttaaaccaatctccagaccaaaacccacttctactttcctcctccgcctctcatcatcaccaacaacaacgcctgagagaaatcgatttgaaactcgtcgttgatgttcttatgaggaagaaaacgaagaagaagaacccagtgatcgtcggagactcaatttcgttcactgaaggtttcgtttcagagctaatggcaaagctagagagaggagaaatcgatcaaaccggtgagttaaagcaaacccatttcgtcaagtttcatttttcgccaatggcgtccaagttcatgagaagagaagacgttgagctaaacataaaggagttaaggaagaaagtgctctctttaacaacgagtggcaaaaatgcaattatcttcactggtgacttaaagtggacagtcaaagagattacaaacaacaacagtggtggaatcaatgagatttcttcatcttacagtcctttggatcatcttgttgaagagattgggaaattaatcactgagtgtaacgacgatggtgatgatgatgattgtaaaaccagaaaggtttgggtaatgggaacagcttcgtttcagacatacatgaggtgtcaaatgagacaaccttcgttagaaacactgtgggcacttcatcctgtctctgtcccttcgtcagctaatcttggcttaagccttcatgcgacaaggtaaactctttttcttactttttaccattaattactctaaagtaaaatagtctattttttcacaaaagtgaactcttttttgtgatgttggtcaaaaaggtattgcgtagatagtgacactagctagtatgtctatgtttaaacttacaaaaaaatcgaatctttgtgtctagtttcaaaacaataatgttgtgtttttgcagagcttacttgaaaatggtccttttagagtctgtctttgttctctgacttactcagatcagtgtctcattgaagccaaaaccctctgtgtcctccatgcctgtccattcacacatatacagtctcatttgataaattataaaactggacctacataggagtccacctatgtgtagataaattatagagatgtgacattttatattccttaggaatttttggatattagaatttcatgatatggagataggtaacggattagatatgattggtgtaatattcaatggttattgcttgtagacaaaattaaaacatcgtagagagaatatatcctgcaacaggttgataataaagcttgaaacttttcaattatgtgttttcttgttttgttttgtagcaatgtgtggacacttttaccccttttaccactttggtcaattagtctcaagttttctcttttatgtctgatagctaagagaccgttctatattagggaaacatcttgtctttttgtctacagggcttcttttaacaacaatccaaaatctccttttacttttctgttttgtttttcaaatgttatttgcgatattgccactgacctctggtttttgaccgttcgtttattgcagtggacatgaggcaaggaacatgagtactgtgaatgcaacaaagtcactttctggttatgataaagctgaggaagaagagacaataagccatgttctgagttgttgtcctgaatgtgttactagctttgacagagaagccaaatcccttaaagctaatcaagacaagctcttgccttcttggctccaatctcatgatgcagacagttcttcacagaaggtacaacatttgaaattaagtacacagaaaaatgatggattcagcgatacatcaaaggtctaattcttgtgttttgattgtgttgtaggatgagttaatgggattgaagagaaaatggaacaggttttgtgaaactctacataatcagacaggacaattgagtatgatgggcaactatccctatggcttgccttatggatcatcacatgagtcttcgaaatcaacttctttgattgattcattaggtttgaagccgaatcagcgagccacaaactcgattgctaaattcagacgtcagaattcttgcaccattgagtttgatttgggtggaaacgaacatgagaagggtgagtcgatcaatgaagctgaagatgacaagggaaatgagacggtcactcttgatttggggcgttctctgtttcgatcagattccgtaacagatacgagactgaagctcagcgctttggtcaaagctttggaggagagtattccaaggcaaactgtgacaatgcgtcttatcgctgagagtttaatggattgcgtgtcaaagaagaaagacagttggattataatcgagggcagggacacaaccgcgaagaggagagtagctcgtactgtatctgaatctgttttcggatctttcgagtctctggttcatattgaccttaagaagaaaggaaacgagtcaaaggccagcccggcaacgctacttgcttatgaattgaagaaccctgagaaggttgtgttcttgattgaagacattgatttggcagattcccgcttcttgaaactccttgctgatcggtttgaggacaaacggaggattaaaaccggtatcgatcatcgccaagccatctttattttgacaaaggaggattcaaggaatgtgagaaacagagactctgttttgcaaattggtttggagatcacggcacagagtccagggaaaaagagaaaacccgaatcggatttatcgatcgagaatgggttttggatgaagaaggaagtgtgctctaggcaatcgagtttcaatagctcttacctcgacctgaacataaaagctgaagacgaagaagtagaaggtgagatcagtccaatttcaagcgatttaacaggagaggaggagacagagttctcctcttcaagcaactttctaaaccggattcaaaaccggtttgtcctaaacaggtcatgtgaaccaggtatcgaaaaaggtatgataacagcagctttcagggagatttttcctgagagggaagaaggaggcggagttaggtttagcgtggaggacaagttagtagaggagctttacgggattcaaaacggtgcgtttgaaagatggttaaaggaggtttttcaaacggggttactaacggttaaaaagggagggaaaaaggatacgggtgtaattaggatggtgtttgggggtatagttgacaacaaaggatatggtgggggtgttggtgggtacatggctacatttcttccgaacaaagtccaagtttccaagttcgagtagtagaatctttcggttaaatttcttttgtttctttttctttcgttctttctttttcaatatgtaaaatttccattactaatgtgggggtttgactggtgtaactcttttcttcttcgaatgtaatataaatgcgttttaaatttgggaaaatatttttattaggattatgtaagaaaaataacatcttgcatggatgctgttaatgactatggtaatggaacaaaataacatttgcatagatgttaatggtacaaaagaagtttcaacgtaacaaagattggttacgaaaaaaaaaaaaaagtaacaaattggttaaaaaaagcaatagtatattgggctgagtatgaagccaaaaagcccaataggcttaaaaccgccataaacacgaaatagaatctaccaaacgcaacgctattttcgagtatgcgattgcaaacgcgataacgaacttgaaatcaaattttggaaagttaacaagatttttatcttcgttgtctccgtttaacgaactggcgaataacaaagagaggatgaattgttcaatcggaaactggaaacacactgttctctacttaaccctaatcgtatctcttctctacttcatcgaatccctaatctcacacaaattacacatcaactacaacaaaatccgcctgaaaagatctccgaatcttcctctacgattccgtgacgatggcacattcaaaatcctccaggtcatgatttgtttcatcctctatcatcataaattgtgcaattcgctgctcattgatatgattaatttgatatctaacaggtcgcggatatgcatttcggaatggggatgattactcgatgtagagatgtgttggattcagaattcgaatattgttctgatctcaacactactcggtttcttcgtaggatgattgaatctgagagacctgatttgattgctttcactggtaaaaattcatgaactaattgatatgttcagagaaggtttaaagactaaattgattctgtttgttgattatgaattaggggataatatatttggatcaagtactactgatgcagctgaatctcttcttgaagctattggtccagctattgaatatggaatcccatgggctgctgttttaggaaatcatgaccatgaatctactttgaaccgtttagaattgatgactttcctttctcttatggatttttctgtttctcaaatcaatccacttgttgaagatgaaactaaaggagatacaatgaggttaatcgatggatttgggaattaccgagtgagagtttacggtgctcctggttctgtgttggcgaatagtaccgtctttgatctcttcttttttgatagtggagatagagaaatagtacaaggtaaacgaacttatggatggatcaaggaatcacaacttcgttggcttcaagatacttctatacaggtaatgaggttaagcatctgtcaatatatttagtggaaacctcacatagattcattacctctaagtagactcactgactagtgactaaacagggtcatagccagaggattcatgttaatccgccagcgttagccttcttccacatcccaatattggaagttcgggaactgtggtacacgccctttatcggtcagtttcaggaaggagtggcatgctctattgttcagtctggagtcttacagacatttgtgtcaatgggaaatgtaaaagctgcgttcatgggacacgaccatgttaatgatttctgtggaactctaaaaggggtatggttttgttacggtggaggattcggataccatgcttatggacgaccaaattggcatagaagagcaagagtgatagaagctaagcttgggaaaggaagagacacatgggaaggaatcaaacttatcaagacttggaaacgtcttgacgacgaatacttgagcaaaatagacgaacaagtcttatgggaaacttccgactcatttctgaagtgaatctaaggacaaaacatataaggtattaatctcgttctttcataaatggccaccttttgatgttttgtgtgagaattttctgagtctctggaatctattgttgtgaaaaacgtttttctaatggtcatcacaatcacaaattcgttatacgatttaacgtcaatttcattaggacaaaaccctgtcgaaacatatgtgaaatgaaggaccgtattttcgttttgggatgcttttgaaatggtctcttcgttgctgtttcggtgtgttctctttgactatttggcattttttttttttttttttttttgctgctctttaattagctaatatgcaatcataagattctcgttacaaatatttccagcgtcaaatcatttcttatttttatctttatgctttttgtttgtatcattattttgccattttttcgcttttttatatttatgtagtcatatttctgaacttttcttttgtttttctttgggtctcggttctaaactttgattgttcactattctaatatttttcaggccaatttttttcagtgtcttcactgttttatattgacaagtgtgaaaatataataaagtttccttggtaatcagaaatccgttagactaatcaaaaagacctcgtgtcgaatatcatcataaattaataaaataatattctgctggagctggtcattttttttttttttttttaattaggaaatatctagatttttatattgaccaattagtcaattactgatttactctagatcttatttttatatatatctaagaatagacattataattattttcttgcagtaagatacaacggcggtgtcgtgtgtgtataactggaaaattacgttgttgtctcccgagactttggtttgtctcattccccattcgcgttcttatataaagctcacagttcgagagagacaagagaccaacgaaacgaactagagacagtttgattcgaaaatcttgtcggaaaatggaggatatcgtcgaccaagaattaagcaattactgggaacctagctccttcctccaaaacgaagacttcgaatacgacaggttctttctttcgtcctttttttttccttactttgctttccatcttgagattttgatatttgtttctttaaaaaaaaagaagctggcctttggaagaagccatttctgggtcgtatgattcgagttcgccggatggagctgcttcgtcgccggcttctaagaatattgtgtcggagagaaacagaagacagaaacttaaccagagactcttcgctcttcgatcagttgttcccaatatcactaaggtttctctttttccccttgttttttgtcttctaattccaggattcaaacttattatagactctgtttttgttttctgatagatggataaagcctcaataatcaaagatgctattagttacatagaaggattacaatatgaagaaaagaagctcgaagctgagatcagagaacttgaatctacaccaaagagtagccttagtttcagcaaagattttgatcgtgatttacttgttcctgtcacatccaagaagatgaagcagcttgattctggttcttccacttctctcatcgaagttctcgaagtaagtttcagttccttttttcatttagaaatcataagatttaggagaagaatttttcattgaaaattgtgtgtatttgggtgtgattgaagttgaaggtaacattcatgggagagaggacaatggtggtgagtgtaacatgtaataagaggacagatacaatggtgaaactgtgtgaagtctttgagtcattgaatctcaaaatcctcacttccaatctcacctctttctctggcatgatcttccacactgtctttattgaggtcagcatctttctctctctatctctcttgtctctctaatttgtaattagttaattactaattagaagcaatgattgcaattagtcaagagtggatagtaagctttccaagaaaaagtaaaagggaaccattcaaatagtagatatatgattgctttagtaaacttttctaaaagtctccatcaaattaatactaattatgtaataacatgatagtaatttctcttatttctcaaatctttcttaaattttaccaaagtgtattttttttttttttgtagtttatcttagctttgcagtttatttgctaatatgggtggcgttggaatttatttaactagattgtggaatataaagggattttctgtggcttaagtcttttgctcgtgtcaaatactcaaacttattttaagaataaatgtctcattcgtgacgctggcaatgagcgttgtattattactttatttgtttacctgacaatataaatatagttttacagattaattataagatttcttgatttgatactgatttagacgacatggacctttctggttgatttaaagcaagattttattgagtaaactaatgattaagttagcatcaatattccacttagtctatcttcttagttaatacaatttttttttttgttggccacttaaaatgtgttgtttattttataattttggtcactatgtacattgcatgatattgaaaactaagtaaaaagtatattcgttagttccaatatcatgcagtttttgccaatttgtgttaattaaaaagattatgaatttttatttctttttgtcaatttatgtatacttattacaaagtttttgtagttgaaaatatttcttatggttaaattaaatgtttaacgtatgggaagcttccagttgcgaccaaacatttattgggttgtgtggtttttagtttttatgtctatttttggtcccacaattattgtaatttggtccatttggtttattaaaaagaaaataatattatctctgtggtaagtagaatctgattgctttgatattaaaatattgttcaactgctcgaattaaatacaataggataagaaattatagaaatgatagaatatagctaattctgccaaatacatcatatattgtctgtctggagataataaaagatagctgattctatcaaatacctcacatagaaaaacaaacataaagagtcaataattattggatcttttagagataagattatgattgcatttgctaattttttttttttttggcagcagattgcaattgctaattaaataatagtacatgtacttgattcctttatctttaatggggggagtatgggaccagtctcttctttggctcatggctattatgtatttccatttgtagttgtactgtctcgtttaaagcattgatagaaattccttttagtaaaaaattaagaaaatataatgaaagtaactttacttaaactaaattaattttggattatttatctaacaggcggatgaagaagaacaagaggtgttgcggttaaaaatagaaacaggaataggagcttataatgaaactcaaagccctactttgagcatcgactctctttactaataatactttttttcttccttttttggttcattttggcttctctctttacaataatgtatgtctctcttttcatttttatgatctcctacgtttgtttgtccatcacgaagcctttcttctttcaccttttctctactgtctacaataaatgtacgccttgtttaccagtaaaataaataaattatggccacaccaaaagagataaaaaaggatttaagagttacaaaacatgtacataacataagagctttgttacatggttcgaaatggtagagtatcaccagtctttgagcagttctccggcaacatcccggtagctgactttctttttcttcactagaggaggaactacgtctgattctgcgcctgcgttcacagatgtattatcagtctcagcgtcgagttttcttttctctgaagactcacattcaccagaaacattagcctttctatattccccagtggttcggtttgatgtctctgtggttttttgactgggaatagggaacattttcattaacatagcttgtagtggatcctcatggatttgtaacttctctttcatatccatctccgtctttgcatttctagaatcttgtaaggcctcttcaactgctactgtgttgtctctttgctgtgattctgtgtacttcgctatgtcaggctctcgggtttcttcgttttccacagatctaccagctgcattaccctcttccgcatctgctgacacattgttattgccatctaattcatcattttcatcagactcatctcctcctatcttcgcagctttcttgcctctgcgtgatctctgtactctttgggtttgtcccacacgagactttcctctcttcgcacattttcctctgctagagtttctttgagcctcaccaaacgaatccgtctcttctgctatatcactgagtcttgttgaaaccttttcttcagaagcatcactttcctctgtttcatctccgcttatcttagacggctgcttgcctctgcgtctctgtactcgttgcagtgagtttgtagaagaccttccccttttaacagctcgagtatttgaccgtcctcttgaactcgtaattgcaattttagaggaagctggctctttggtttgagcactaccttgggaagctacttccgttgtatcatgttcggatttactgaagcaaacagatataaataatcattggaaactttttatattagcacgcccttaaatagatgagagactaaatttcatatcatttgtagatacggactcataaaaaagtggtgactcactctgattcttcagtatcagactcttccatatacttaggcctcagagtgtagacatcctcgcacagtttttcctctctttgcaagctttcctctaaccagtgcgagctaacaacatgaagccttttcttcagcaaaagacgtttctccatttcgctgaaactattgaagagagaccaaataaatagagtcttaattctcattataatgtggtgctaaactcaatagcagaaacagacaaaatttggaataccttttcgaaactaaagtaaaatccaaaggttcttctgccatagcaagaactacaaggtgcgacgcatgagcaagattattgctaactttaccaccagccattaagacttcaagcattaatctcttagccataattcccaatagggcttcctcttcagtgctccttcatgttaaaaagacacattgaggatgatgagtattgctttaggtaactgacatggttaaacaacataagaaagaaacaagaggggccttacaatgtttgactatacgggtaaaagtaaacacagcagcttaagaggcaggaccatcttttttcaggacataactttttcttgtagtagtcaatagattttgaatcttcagattgcttggcattgcttaagacctggaaatgaagcgaaagggattgcaaatcgattgtatgatctcactgaatggtctcaataaggaatacaatacatacctgtttgagaccttcaaggtctaaatcccagtaataagaatcagaaaattcatcaatatcatcctgtaattttgtccttgaagcatcagtgaggtggaggaagtaccttcaaaagtggccgcaaaagctttttagttagacacgacaagcaaaagaaaccctaaagggttgaataccataagaaaaagttgataggactcactttggcagcaaaggaagcatcttatttcgtgaacaacaatctaagacccatgaaaagtggatgacatctcgctgacgctttgctgcctgatactttattcctgaaatagtatctcattgtcatgctcgtattattaaaattgttttgagactcactcatgtgtacaaaagggttggggaaaaatcaatatgtaatggtaagaaagtacgtaccactgctttctgctgcaatgcaatgagtcactgagttgtttaagttcattgaaaacttccctccgttttcaaccaccattttgtggaatgtctcaagagaatgggaccgaggcacgttaacaaaatctgttagatttgtcaaggtggtaaagaacaatatagtatgacaaagatatcaaagtttgtaagttaaagcaatttcagaaacttatccatgtgaaaaggtgtctaattctaatagagaaagacagctgaagatgcaatcagtaagaaaacggtacccatgtgataatgaaacagagagaagaaaactcattttaaaacatgtcaaggatacaaaatatcatatttgagaagattgaggtcttgcccttgatatccgatacatcagtttgaataaactgagagggaacaagagagacattctttttctctcctctcttggaggatttattgactttcggattgtcctgtgtgctttcagactccttctgtttctgtgtggtgccgttactcgaattcaccaattccacaaaagctgcaaagtcaacatcagtcggacatataaagtgaaagcaaatcggttatttcaactttcatgaaaatgggaacattggagaatttctttagttcttttactcaccctgcacatcaagacattcatgccaaggcttgtcatatcttactttatcaatacgaggaaacctcagactgtaaggtgcaacaaacacctgaaaagagcagagttttacataaaatagagcatatgcattttaagcgacaaatctgcattgcaagaattaaattaagaaatgtaagagttaactggctaatcttcacatcacatcttatagacatacctcagaccttatcgtcctgatatcactagtgattgaaagtattattgatctgcaaaaaaaggaagagaaaagatatgagcgcgaataatagtattcagtgatcccaattcttctgcttcagatgagcaaaaggaggtaattgacagaaaactgacttttccgggctgtcaatccaaacatccggtctctctttggagtgattagtgacctgatagaagcttggtggagccttctttgggtgctcattttttctgaaagacaagtaaaatgaaaaaagaggcagtgttctcattcttagaatatcataccacaaaaacatattattttatatttcttttgttttaatgagatgagaaagcaagtaaatgattacgtctttcacctgaaataaggcttcagtttgcttacaacagtgttaagctcatcatcagaaagcccagtgccaactctacaaaaggacataaatctgcaaaaaagagaatagcttatcattgataattagatttggaatgtctaggcaaacaactaacaattccgataacatgaaaagccctaaggtcttcatggcgcatgttctctcatggctgtttctactgacaatctgatttcatcttatacgagaaatgtgaaaccatataaatacttaccgcctgggatatacatttgcctctgcccggtcagccaaggctacaagaaactgtgctacctctcctccacgacgtccggagccatagtatcctcctggcaaagatgtaaaattcccaataagatccaatggaaatgaccttcatctttaaacaagtaaaagtaaacataatattaagtacagacctattataagaacatccaggtcagcaccagcccggatatattcaggcttcaatttcatccacttgccactacgatctccaggttcccattttgattccaggtctttaagcacaattccttcatctctgaggacaaagaagaaggattggaaataagaacgcgcatctgtgaagaaaaccatataatgtctctgtactagaggttagattctgtcaagcaagtatcactgttcacacgaggccaagaaggcaccatccaaacgttttgcacaaatcatgaatagtggatagagaaactttggctgcattaagaattaaaaagaaacctgttttcaactgtttctttgaaaaatcgctcaacatcagcagcagcatgaacaacaatagaccaactaggttcccctgcaaaaggattgttcacgtatccattgatttaactctgtcgcacttgtgaacctcgcacagtcaactagaatcttagtagtccttacctgaagggcggtgaacattgagaccaccttcaggtactaaaacttcgagccgaccttttaaaggtttgaccactttcttcagcagttcatgccgttccttcaaactctggtggatgacgctagtatcgccaacataaagaacatcaaaggcaacatctagtacagggtcaaggaaaataatatttctaaagtcgttttgtcagggaattcttaagtgtgggcattaacttctcctcgtaaggatacaacacaactgcattagcagataaaagaacatcagagtttgtagtcggatcctcaaacaacaaaagtaaacaggtgggacttcgcatatgaacctgtttatggctgtcaagaccctcccttgctgccttggctgtgaacaagagtacaagaatcaaatctactggaagcaagactaagcttttcaacataaggatattgattagacgccaaacctatttcctgattcgaaccaaactcagcaaaccgattcagagatgtatcccagaccaacatttcaccatcaaggatacacctatatggcaaacaaaaagaaaatgaaagattgtatatctcataattccaagcttctaaaaccttccagagcctaaaaaagagcagcaactggattcttacttgtccaccaatatattttgtacaataagatccgacatggcatgtgcgtattcagaatggtcaaggaagttcctgcaccatcactaacaaaagtaagtgcaaattccctatctatcaaatttctagagaacttgaaacacctacagtatttgaccaaaaaagggtattccggacaccaagtcacaatatagtcatgaacgttgccatatgcaaataagatcttttatcaaaacatttatagcagggtagacgaagatatgactcacctagagaagtaatgtatgtcagtcccatttttgtgtatttgtatgcgatccccatcaaatttgcattcagcaactacatctttcccatgcagctgtgtcgaggaagagactcatgcattggttaatgaaataaaacaccaatacaacaacattaacaaacaaacaaaatactgcacatggaaatggagtaagctgacaatagagttgatggaatttaccttcttccaagcagcatttacgtcaccaatacgcatagctaactggggtcgtacggcttttccaacctctatatcctacaagagaagcacagtttttatgcttatcagtttaagatgatttcaataaatcgattgtatctcgaggaaatgaaacagtagtttgtaagttgtcattcaagaatttctaaatacaaaacctggcgcttgtgccgttggtgtcgatccctcaacttttcacagactagtttcaaatcacatgtgacattaaacaagtcctcagcatctggatggaactcctgaaaaatgctcttctcactcattcccagtttcaaatctgtaaaccatttcccaacaaaatcagattgatctcaataactttaaagaaaaaagatggaaactttatgtgaagaaactgcaaagttcctaccttttagaataatcctaatgacccacttcatctcctgagcatttgtcttctgaatcaatgtagaaagaaccaaagttttctccgctctagatcccaaaagaaaacaagataagagagtaaacagaaacaaaattgattctttatgattagagaagcacctgttctcacttgaagccaaacgatcaagcaaatcattcaattccttaatagtcaaaccgccagaagccattccttgtctacgttgcaatacctatgagcacaaaactgttcaaaaaccctaaatcccccaaaaaccaaaacccagaaagaaagtcaaacaaatcctaaaacctcagcagcaattaaggagaagtttccagcattggctccagctttagcagttcctcctttacgccaattgagaagacgaacagcatcaggagcatcacgcgagataccaagtgcgtcgatcagacacgtggcgagcactgactctttaaggccgtagctacctcgttctcgatcaagcgacggaatgattaaacggacggcgacgaagtagtcggagggtttgcagtaagtgtcgagaaacttgcggaatttggatcgtttctgagatgaggttttgcttttttgaatccagttaaagagagataccagtacgctgaatttgatctcctccgtcatcttactttgccggaattatagattcttccggagaagatggttaatcagggaaatagtgacggagaatcactgagcagcggcgtgaattgcttgccggagaaggaagtcgcgtttgaaaagttgcacggccggttttggtaagacctgccaagttacagtgactcggtcttctctcccagtaactatttattctatattacacatttgtcctgtaacttaattaatcaatcaattcagtccaatgtgtactatattaatttagaaaatcgtcaaagtggatttatgggctacaatttttttttgggctgcagtttacatttttagtagtattgacaaaattatgagatcatatcacacaagtgacaaactaggcccaaaagcagtttaaatacgaaatatattggctttgagggaggtaaaattataaattatggttcagaattacagcttttgaaatgaataagcaaacagttctaacccaaatatcattacaaggttgaattcgcctcttttcagaaagttgatccattgtaaccgaagaaaggtcgctgccaaagaaaagcaaaacaaagaatttaactaacattctattcattgatcaagtttataagaactaaagaacatcgtgctttcatctaagtgtgtatccatatattaatttatatagcccatcatcagcatctagctttaatctaaatcagcattctatatataagttcttgagaatgagatctttcttatgcaaagctttgaatttgaagcaaaaggggacttaccggagaatcgtagaatttgatataaaagcgagagctgtctatggagagcttaatttggagaatctcagatatcgtctcgctaagcttcccgtttacgccaggtcctaatcccccaatagatatcaattctccatatgcagcaggttcctcggtaccggcaaatgcaatgggcactccactgttaagcagtatcatcacatactgaaaacaaagaagaaaacagacgtagcccacaagttaagaccacaacacaagcttaagaatcctttagtgatattgtcaacatactgtattattggtttccacaaagttccatgaattagtaaattggtaatctaaagggaactctcaagagttaagttatgaggaattgcaattcagagaggaattccatcgaacacttcatgtgcataatacaaccaacgtcatgaaccttatcaacaaaaggaaatttctattctactctgctttcatgtaatcaaaacactaaacaggaacaaaatttgaagttttaatttatgaattagcgtagaaatggccgaaacagagggttagagttggttacggattcaggtttgccgatgattttagcgacggccttagtggcgtccttgaggatgtctgagcaagtgacggcgtcgactggtatgttagtgaagagattcaaagtgggcatctttttgaagtttctccttttcccgacaaaaccaaaaccagtgtctttcagtttggatatggaagttgggataacggtaagagcagaaccaaaaccagtggcttaccagttcatttacttttatctttaaaattgaaattaaaaatcgatataaaattgggcaatataaagttatcaaaccggaatcccatgggcctacaatgcaaatttcagcccaaatgtaaaatatcaattttattttttttacattttggaggggaccaatagagagttatgtttttcctaatttcgattttttattttattttggaatgagcatggagaatcatgcaatcgcataactctttcacttttgtctttccatgcttatgataagcttttaacgtttttcggatccaatgaatgagtaaggaacgagagaataagtgactatctagataaccataagaaaagaatttatgatttctttctaatgacaattggcttgaattagtattagcatcacttatactcgaacaatcaaaatcggcttaaagacaattgttgtataagcaatcacaatatgtaagcccacactagctaaatcccattttctaaatactaccaatattactaaaactgtgtttttcattttttttatttttttgttatttatgaatcctgactcctgacctcaaaattgtatgtgtatataatgatttgtatcatagtatctttatttcatatttcatttattgaaacataagacattaagtcacaataaagtgtattatagatttgtccgtacatactcgaagtatgtttttttttttttcttactctcaatctatcaatctaacatttatcttttgaattgtctatatttatctagttagttacttgtcttatttgtttgttttccttctttggatatcaacagtttatcataagcatggaaggcaatctatgaaagagttgtgctattgcattattacccatgctgataataaaaaaaaaattagaatttgaaatatagagcaagacatagatagttttaatggtcccctccaatctgtaagagaagaaatagttcacttgttgtttgtaactatttgggttacttactcttgagccatgacccatttgataaaaatctataagttcacattttcagatctgcctagtctcatgtagatttttttcttagctataagtgttttcattttacttggtttttcaatatccaaatgaatggttaaatagggttttataagatgagatatgttttctgtagagttgtttttctttttgctgcctacaacatgtatttcatttttgtgtatcatctatgatatatattctcgtgtggtttatgttaacttatagtataagaacaaaaaatggtaagacccattagatgtggccgaaataactacatggtaagataattgtaaacaagttgtctacaatgtctgattgtacaaatgaaatatttttgaattttataggacagtcagaattatggtattcgagggttttaagttttaacatagccgcattctttctaattacgtataaaggtcatcaagctgtgaattataaacactgaaaacgacagctgagatattcttcaaaatcattttttcttttatttcaacaatttcttcttctactatatataaacaaataaatgtcacttttttcattcttcgtgttagtcatgttatctaatccataatccttttaaaatccacataaataaatactcaaaatacgactcacaacaggggagccacatagttttatctctgtagtcacatatttttatctctttagtcacagagttttatctatttagttttatctctccttaatgtccttgacgtagcagtatccgggtataaagtacatcaatcacacatgctgcaacgattgaaattattaatgtacttttatccaacaaaacttttacgggaaaatggtaaagaattagtaaagaaatggaagagaggtcacatgttgacataagaataacataagaacaaaacttactttggagcagtgccataacaaggtttatcctgttttttcttgaggttcaaattccctccagcacaacttctttagataagaaaaattctctacatttcaaagttctacgaagatttttttttgtctaccgacttttcttgcaagttcctttttaatttaatttatttgggtttatttcgttttaagtatatgtaatcacaatgttttaatacaatttcaattttgatatagacggatgactcgtgggtatcatatctcatataatggaatatctaacataaaataaacaaacatatctaaatagaaaatcagatatctaaccaggagtcattgaacctaatgaggtaaacgtaggtttagctttcgccacaaattacttcaaatgatcccaaaaaggttccaatcattttttctctctcacatacacaaatccactagcccaccacttttctctttccacacttttgtttttaaactaaattaattattatttaataactatattgtaaatacgacaattttgtaagcttgcttctactaatatagccaattagctatagatattatattacggccgttacttttctaatgtttcttttgcagaaacgtttgaaagtttaacataaaactaaccttgaaaaagtaagtcaatgaaagaaataaattttcaattatcatgtctatatatatatccaaaaaattatctaaaatatagataagaaagtatcaatttatgctaatatttttttcccaaatatgctaaattagtaaatttgaaaaaaaaaaaaaatcttactaataaagggaaattagtaaaataataaagtcggttttttaagaacacgtgaaaacgtctccgaccaggcgaccataatcagttaattgagaaagcaccacgtcatcaaagaaatctagtagagccaatgggtatgtgccacgtcaatggataaggtgacctttcctcgttttctctttaagatcccaaaaagattttgcagatttggatgatgatgatgtggtttttacatctttttagaaaataatccaaaaacagaatcacatttccctccagtcaaaaaggatcattaatgactattactcactaaacaacctggattaaactcttgagcatcttttcttggttaaactttattcaagaagaacagaaatcggatatcacaaccaaatcaataaattaaaactgagaaatcttattaaaactattactattatcaaaaatatatatcaaattttaaataaaatcttctacaaaacctgtaaaaaaatataacttcgaattctatttaaaatctagatatcataaactaaaatataaaccaatatatggcttcacttctagctacaattaatcagggtcggctcaaaataataaaggacccagagctgaaaaaaaaattagttctcatttcctatgttttgttatgtaaatcttttttttggatcgtaattgtattagatttacttcaaaaaaaagagaaattttgggttgactctgtgcctcgctcctccggcacatgtgtagagccggacctgcaattaatagaaacaaaaattaaactaatatatggtgactctaaattgaaactaaaactaatagtggataaatttgtttaactctatactagtttaaagagctgaaattaaatattgtgaatggtagaactcgatttttggtatcaactaagaagaaaaatcctcaacctcaactaatataatactgccacaggctggattagacaattgatcggcgctacatcattacttaccacttaatcgatgatgtgattaatatttttcaatcatgagtaatttcgataaatcacactcaaaatatttatccccctttcaaattaatgactgatcgctgttatattacttactcaccacaagatcgatatgcaaaataatatcttaaatttttgggtaaaaattattgtgtaacaagtggataatatcaataaatcaatacataaaagatttactcaatttgaattaatgacttactgtcgttatattaatgtaatacataaaaatttaactttaagaatgaacgatcgtcgctacattacattattaccaaatcgtcacaaaattaatattttatattttgagtaaatgttaatgaacaaataaatttgttaaatcaacacataacaaatttaattcaatcgtattatgaccgatcgttgccacaatcatatcgctttattataggtttaacaattgatttttcattattttgttttcaatctccaaatcatttctcaataactctcaaacattgtttaaagctttttttcttaattaacattataacaaaaaaataaatagagaaatttactttgattcaaacaccagtcattgtagattagccaagagttttcagtaacaaaatttaccttataaaccttttgaatggctatttctgaaatggaatagaaatctttagtcgtggaagtatctctatccataagaaaactcgttttacaaagtaattttaaatcaatacaaaaagtgaaaaaatccactggtggaccccattcattccagaattgccgattacgagctatcttgtcccttcttcaccattcgctcactctctctctctctctctcgtcttcttcttcccaccactctctctgtttctccacaacttctcttctcaaagttaaaattacccctaaaccaaaaaaaaaaaaaacgctcttcactatttatttactaaactctcctttgtttgttactaagctctcactaaaaccctaatctttctcctcttatatatctcgtgactcttctttctcctccaatctctctctccctcttcacaaaccaattagcttctttctgtaaaacctcactcgttggccaattcttttggttttcatacacataaatctcagattccaaatgggttttcttagctctttctttcaaatgatgaacatttgttagcagaatcttcctctttccctaaagttttgatctttttttcccccttcaattttgtattttctcaccaaataaaaaaaggtttcttcagtgggttttaagggtttattattatcttaaaattaaacacaattctttaatcaaaaggcaaaaatcttaatttcatcactctcttctcactcacaaaagttcttacaatcttcaaagttttggtcttgtttcttttccgatttcaccggacaaaaaaaatgtcggcgtgtttaagcagcggaggaggaggagcagcagcatatagtttcgagttagaaaaagtgaaatcaccaccaccatcatcctcaacaacaacaacaagagctacttcaccatcatcaacaatctccgaatcatcaaattcaccactcgcaatctcaacgagaaagccaagaacacaacgcaaaagaccaaaccagacttacaacgaagcagctactcttctctctactgcttatcccaacatcttctcctcaaacttgtcctctaagcaaaaaactcactcttcatcaaactctcacttctacgggccattgcttagtgacaacgacgacgcttctgatttgcttcttccttatgaatcaatcgaagaacctgattttctgtttcatccaacgattcaaacgaaaacagagtttttctcagaccagaaggaagttaactccggtggagattgctacggtggtgaaatcgaaaagtttgatttctccgacgaattcgatgctgaatcgattctcgatgaggatattgaagaaggaatcgatagtataatggggactgtggtggaatcgaattcaaattcggggatttatgaatctagggttccgggaatgatcaatcgcggtggaagaagttcttctaatcggattggtaaactagaacagatgatgatgatcaattcatggaatcgaagctctaacggattcaatttcccgttagggcttggattacgaagtgctctcagagaaaacgacgacacaaaattgtggaagattcataccgttgatttcgaacagatctcgccgcgaattcaaactgtcaaaaccgaaactgcaatctccaccgttgatgaggagaaatccgacggtaagaaggtggtaatctctggagagaagagtaataagaagaagaagaagaagaaaatgacggtgacgacgacattgattacggaatcgaaaagcttggaagatacggaggagacgagtttgaagagaacaggtccgttgttgaagcttgattacgacggcgttttggaagcttggtctgataaaacgtcgccgtttcccgacgagattcagggatcggaagctgtcgatgtcaatgtatgtttaacactaatctcttcttaatctcaaatccctcgccgttaaaattcgatattttctatgtttatttttctttagttaatggttagtttgaaataattaattattcgggattctgttttggccattagtattctgccacgtggctgttgaggagtgtgttctcattaatgctgaattagtaatttattagctatgatatagtttgaagtatctgacaagaatttattaaattttgtggaaagttcttattaataatttttcctgtaacgtattttgaagaataattattaaccctttgactttggtacatagtcttctttttattataaataacatttttttctgtgatgactttcaatcaattaagaaaaaaaaaagctgctttttatttgtccaatgaaaactttatagactgtgcacgtgaattttcacgtataggataaatgaggaggttcaaaatttattttgtagatatccgtttcgtcgaatactccttttagcataaagtctagtagtctacaaaataagttaactagaaattcatttttgtcaattgattagtattttgtgttattaataatgttgaacatgaactaatgtggcgtgtgtgttttggggcaggctagattagctcagattgatttgttcggagacagtggaatgcgagaagcaagtgttttgaggtacaaagagaaacgtcgaactcgtcttttttcgaagaaaattcgataccaagttcgcaaactcaatgctgatcaacgtcctcgaatgaaggtatctaacccatcttagtcagtggttaaaaacatgtaggttttttttaccatccttcaaaatttgttttgaatcagcataataagactagctttagttttcagatttaaagtagatgagaaaactcttgttgagtttttctattcgttttttttcttcaagaagatgaaataagctttcttttgggtatctttattccaaatgaaccaaaccgaacaagtaaaggaaactacgtaccacaagccaaacaaaaagatttaaaaccaaaccaaaggttaaatatattaagaattgtcatctaaaggaaacaaaactaactaataacgttagattgaggtcaagggctagggatatatacattagatttgattaagacaagaacctaatattaatgttttcttttctttttgtggttggtgatgggatgtgggaacagggacgattcgtgagaaggcccaatgagagcactccaagtggacaaagataacaaggataaaagagcctagatttatcttatctttttttttttatcttttgtttattccttgttttatttttgtttctaaaattttggcaccctccttttttgtttcttttaagttatggtcccttttggtttataatttagattttttgatgagggggagatttgattgagaaagtgagggatcaaaactaataaaagtttttgttattaatagaagaaacagagctcttgagattttaatgactcaagaagcaagtcagagacttggctcaacaacaacagtagcaaaaaacaagacatggattattcaccaatcccaatggctcaaactatgttgcagccttgtacacctgttgtttcgttgcccattgcttctttgagtcatcaaaaccggtgacaaatcattgatacctctcaatatctgtttttgccgagccaaatttcctttcccaataaaaacattatagagaaaaagcatattgaattaagggcaaaaatagcttctaggacgtgttatatgatttttgaatggtagcttcttctagataccattttatctttgaccaagaatcgagtgttattttacaaggcttgacggaatggcaaaaacagaactctctgcacaaggaatgtgttgagctcattacttgtatacatgatacaagagatatcgtttggtttatatacagagttattatgcacgaaacaagaggaaaatcaaatcaaaccaaattggtctctggtaatcagttcagtggcaaagattttcagatcaatgtagacctagcaaatgtccttgtggagacacctaattgcattccaacactcactaatgtctctaaagacctaccactgttaaccaagagatcattatcgatcccgatcgcgtcctgcataattcaaatggaaggttcatattgaaagaaaacaacagtgaagatatcattttaaaagcataaaactgttcttaagattttaagattaagatataataagtcactaaccttttcaaagacacatataactgtgcttccaccaaacgaaaaataaccaagctgcaagataaattgaagttaggaaatattctcttgaagtgtttcttatgaaaagttgaaactgcttacttcatctcctttcttcacatgctctccttcctttctaacaaaatttatgctaccaaccattgttgcaccgattgcaacaaaagcaacctgttacatacttattagctaaccttgaatttatacagtacacactattattctgatccatttgtaaactggattcagcatctaacctttccaaattctgctgttgatataattgcaacggttcgtttattttccgtgaatacattacagtacttgctattgaccgcaattggattaacctattcaacaaggaaacaaaagtgagtctcatgagaaaacatgagggagatgagaggaaatcttggactaaagtaaatgcagaggagatgcataactacatactgtatataagcttccagaaacatccacaaactgttcaatgactccagagacagggacatgaaaccgatgataatcctgtaacatccaagaaatatgtcagagtaactaaagaacaaacaacaactgtgtaattcaataggagaaatccagtctcgtcgcacctgtggtgctagtctgaatataaccaaagatccatcaaggaaggcatttggattcacattcttcccaaggaggcctcttattgaaaactttttgccctatcattgcagaatcaatgcaaaaaaataaggatgtgttgcattatatcagctacatcatttgttttgagaattctctaatcttgaataatattgattaagtatatagtaagctactctagaaaccattttaccttgatccagaatctggtactatcttccaccgactgaaatgccattaatcgacaatcagcggcacatacagcaacatcattgcggttcatgcaagcaattggtcttgcaccaggtttcaactctcggataaagaactcattgaacgtctgcaagtaaaaacaaaatcatcattcttgaaaatgctataaatcatattgtgaaacttagtactatacacatttagatttaatgttgacgctataaaacagatcccatgcataccttaaaatgctgcagaggatacttgacttcagccatgtttatttgatcctgaaacagacaaaacatctcaactccaaacccaacagcaaagcaaaacatcatagcttagttaatagtaactttacatgccttaaagaactcgagaaagcgtggtattttttgtgcggattcaactgagctcattttcttcccctgcttctcagaaagtctctgcagaatctcctttgcccctaaatcaagaaaatcaataaagcatacaaaagtgtgttcttttgttaggtaagggtcttatagtttgtttaccttgatccataagtcttagtccaatttttgactggtaaatagctctcatggacagaacaatctttgaatcaatcaactcttccacaagtcttttactcttccggtcaattacctatagcaagaagcaaaacaccaagaaactagtaaagtgaatacatttgttctccatgaggagacgcacataagacaccaactaaagagagcaaaaagaacagaataccacaatatatgaagcacttgaaccagtattcaaaccaacgtcataagttgataagtgtgtccattcacttagtttgaacatccatctgaacaaaaggttgaaaaatatgatgttaagtaagagatgtctagttatttagcttaaaagaagaggtttctcacccataagaagcttgtctatcagtcaaaaaccctccggtcatcacttgattacccgttccttcgtcaaaacaaagagtcatatgaatcatcgcgttgagcttgtcagagacctgaagagcctcaccacacaccggacaattgtttataattggctctctgcattagagaattcgaattactaggattctaggaggtctaaatagacttgttatgaaaataagaatgaagtatatttgaaaacatgaagtgatccaaaggtcattactgttcttgttgaagagcaagaagcgcagctaactcgtcaatcgtcacaacaccgtccccattcaggtcagcagctttaaacaactcctctttctggtaaataagtgagtaacatcattctgacactgattgaaaatgagagaaaaactcatgcatccactaatgacatagatgcttaaagccgaaccttgttcgcagccactaagtttccaaaagcctttattagatcagagaactccgaaaacgagagttgtccatcttcattgtagtcctgcacattgtcaaagaactcttaactatcaaattgtttgtttgttcaagaatagcaagaaacattgaagtgtgtcatacagagaacagaatacataagagtggaacattaaggtaaagcataccactatggacaagatacgctttgcaaaccgcctctcagtttcaacaggatcctacaaatattaagtaaccaaagatcagacaccaatgctcttctattttcacagagttttctctagtcgacatggtacctcaatagcgcaagaaaggaaaatggagccaacaacattggatgatgtgggatctaacaagttaaatgacttacaagtcgactcaggttcctgtatcacgccaaagaaagcaaataagcagagagacaataatcttacaatgaaacaagaatttctataaacatatacaaagataagattagaactgctgacctgcactacaaaatcgaatatatcaagctcacaataaccgatgattttgttcctcgctaccctattggtctgcaaaaatacaaggatgattcttttagctgactattaatcaaaaaacagtatcatgattgatgactaaactcaaaaatcaggatgaaacctcaaatactgagaccctagcaagacttggtccatttttctccaacaaaagcttcttctcctatatacagagaaacacaactgtaattaccaattagcagaagtgttgaaacagaaccaaagtattcaaaagacatggttttgatcaacttactgagttccaaattggcttctgtgtactgcaaattcatcagaaacaaaactctgttactatcaataatccttggatctttacgagtagagaattacaaaatgaatatttggcagacttacgtatctgagatttcagttctgaaagtctgttcaccgaaagaaacacaagcgagccacttgtccttaaacttcatttccgcctgaagaaagaaacaagccagaaccaagactaaaacataacatcactactcacaaacgtaagaacgaaaaaaaaaaaaaaaaaacgtaagacgtacgccaatgagagtgagaagcgcaatgccggagaaatcctcggcggaaacagttcgttgtatcaccattcctgccgagtttcgagaactacgaagatgacgacggtgaatgcgaaacttttgtagcttatgtcgtagccttgaccgtctcgattccttagcctcccttgagtttccgtttcccatctctgtgtgacccctaacgcaccaggaagataaacggatcggagaagaaaacagagaaacagagagagaggaattaaggttttttgtttttattttgttctcttaattttcttgttaatgaatattacgttgaccaaaatgtgaccgtctatagtattatttatatgcaaagttttattaatggacacttcttctttttattcgtctctttggttcaaagattcggctctgttttttaaatattaaaaagaattgttacataaaaatagggaatgttttatcaatggttattcctctcccactttctacgttacagaatgtttttgcaatatttttttttttcaaacgacacgttgtaattatgaattatctatacttcatgagcagttgagcgagcatataaaaaaattcgtggaaccttttttttttatatataaaagttcaacctaaagttgaaggataaaaatgtgagtggaatttaatcatagtaaaggtatgattggtgttttcaaaaccaaaaatatcctctctttattctctgaagattagtataagtattttcactttgcacttaacaaacaaagctttgatggtgatc

SEQ ID NO: 917 - DNA, 58589 bp, Arabidopsis thaliana
cctttatatcaagaggtatgtattatggtcccaaaaaaagaaaactactaaggtctagttagtgttaacattttagcagtcaacatttgaaatcaagtgatacttgtttagtttttgatataaaagctcaaattgaaaaaaggtttgaaaatgttatattgacctggtctaaatatatagtcttggtgtttccattattgtaatgcgtgtgattaggtaggctctttgaatccgatactattcatggtcaaagctctccattgttgattctatcgaacaaaaggataagtggatcggatgagatacgttttagataataattaaatagatagattaacactcaataagacaaaaaaaaatacacactcaatttaagagacgagtagtttgaattgaaacaaagcagaacaagaatggatcgatatgatcttcccttaaacgggtactagctaatcataaactgtatagtccaatcatcaaacataggtagattgcaaagagtaggcattggattaatagaaacttgatccaaatcatgactgcatgtaaatgagatttgcaagtaactcataaagaactttaaaaatgcataaataaaagatgaagtcacaactcacaacttaacttctcatcatgaaggacgaatccccaaaaagaatgtagtttccgtcttctgatccatttgaacttcataacagaaagaaaaagctgcttcacaccatgttttgcatacaacggaagctagtatgttggcttttaatacgaggcgtgatagtatctcttgcaggagctctgttggaatattttgatcccacaatcttgtaatacactttttctttgctctacgatttcctctagcctttataatactgcatccaaacaattggaagaagaacaagaatatttaggttaaatatcaaaagagatattacaatggtgctcaacgttttcaatgatgttcgaatgttagaaaacgtaacaacacaaacctaaaccctaattcaaatattacaaacctaaaccctaattgaagtatcacaaacctaggaatttcgattgaaaaactagaacactcacggtggtggaacaacgagtttgatatcgaggcctttggggagtaatgacgccggattggagtttccgccgccgtgcatgttggacggcaagtcctcattatctccaactgtaactttgacgccacgagagccaggtcactggtagttgtaagttttttttatacaatcaggcaaaatctgcaaatgatggtattttcgtaaatactgttttttttatcgcatagtaaaaaaatgtgaaataaaataacatggtaaattccaaaaatatttataaattcaatgctctttatttttctttgccaatttgccccaaaattacgttaataacccaaaagaagaatctattattattataaatattttttaagataaacgaaaaaggaaataatccagatcgttagtattctgttacgcacgttttgagggtgacgaagaagaagaagcttattgtaagagaaattaaaaaacaaagtctgttatcgttgttgtgtttcaatttattgcacagccattaaagaaaacatcatcactaatcatcatcaaatcttctctcattttctctatcgtcttcgatcaaatcaaatcattaccatatatcttttccattacaaaactcagatcacaaatccgcattttttctcacaaaagtgtcgatcaatgggaacgttcacgagctttcgaaaagcctatggagcgctcaaagatacaaccaccgttggtctcgctaaggtcaacagcgaattcaaggtcagattcttgatttgtttacatcaccattgtgtaaagctttaaatttaagattcggatttaaacgatcgatgcatgttttttttggaatggatcgttataggatttagatattgcgatcgtcaaagcgacgaatcatgttgaatctccaccaaaagaacgtcatgttcgtagtaagttcctctgtttttttaaccaaatttcgacaattcaacgatgattcggagatttgaacgatgattttttacgcagaaatattctcggcgacatctgtgatacaaccacgagcagatgtagcttattgcattcatgcattatctaaaagattatcgaaaactcgcaattgggttgtaagtttttcttcttggttttccggattttaaatcgcattttctttcgatagatatagtgaaaaaattgtgatgaatttgatgacaatcacacaggttgcaatgaaagtgttaatagtaattcacagaacattaagagaaggtgatccaacatttagagaagagcttctaaattactcacatagaagacatatactcagaatatctaacttcaaagatgacacaagtcctcttggtgaataaactaattctttatcttgatatatgcaaatgttttcagttcttgtaaacttgaccaattcatatatttgtttcttgatgcagcgtgggattgttctgcttgggttagaacatacgcgctctttctagaagagcggcttgaatgttatcgggttttaaagtatgacatcgaggcagagcgtttaccaaaagcttcaggtgcagcttcaaaggtttgtctcctaacttctcatcatgaagaaacagaacacattttcagaaacttttgttcaatatggtttttgtagacgcatagaacaaggatgttgtctggtgaagatttgttagaacagttacctgcattgcaacagcttctttaccggcttatcggatgtcaggtaaagtcatatgcaaactccaaaacagttttatactttttgctgttttttgtacgttggagaagatttcttcttatttgttttcagctttgcagcctgaaggagcagcttatagcaactatctaatccaatatgctcttgcattggtgcttaaagaaagcttcaaaatctattgtgctataaacgatggaatcattaatcttgtagacatggtatgttaagacaaaaagttcctttttctctctaattcgctctaagctttctaactaaagattgtatatttctgtgtgtcattgtagttctttgagatgtcaagacatgatgcagttaaagctctaaacatatacaaacgggctggtcaacaggtgaagcaactacgctgattcctacgcttttcgcatatagtaagatcatattcatagatattaagctttgcttgttgatgtttttcttttgcataggctgaaaatctagctgagttttatgattactgcaaaggactagagcttgctagaaactttcagttcccaactttaagacaggttagttcttagcttttgggatcacgtttatactgtatttgtaagagtgatgtgtgattcacttctcacttatcgaaaaaccggtttcagcctcctccttcgtttctggcgacaatggaagagtacattaaagaagcgcctcaaagtggttctgtacagaaaaagctggtatcatatcctcaagttggttcagagtaatgttgatgaatactgtcttcttaggatttgacattttgttctgtttttttttattaacaggagtatcaggaaaaagaggaagaagaacaagaacaagaagaagaacagcctgaagaaccagcagaagaagaaaaccaaaacgaaaacaccgaaaatgatcagccgcttatcgaagaagaggaagaagagcctaaagaggagatagaagtggaagaagctaaaccttcaccactgatagacactgatgacttactagtgagtcttcttcatctctatacattgcagtagataccaaacctcaatactcattgaccctttttcctgtgattggtgcagggtctgcatgaaataaacccgaaagccgcagagatagagcaaaacaacgcattctctctcgcgatatatccaccaggtagagaagtaaaaaaaactaacccattaagtaaaatcttacatttccattatatcaacatttatgaacattttatctgcaggacatgaaacttcagccccatctaatagtctaagcttaatagaagcagggggaagtggttgggaacttgcactagtcacaccacagaacaacaacaacaataacaacaatcctcgtcccgttatagcaacaaaactcgtaagtctctcattcgaatataaactcgatttttctattcctactcatatgttgcctatgtttacagggcggaggattcgacaatcttctactagacagtctttacgaagacgatacagcaagaagacagattcagttaacaaacgccggttacggatttggagccacggctatacccggagcactagcttcatcgaacccaaacccgttcggggtgcaacaagatcctttcgcaatgtcaaacaacatggctccaccaaccaatgttcaaatggcaatgcaacaacaacaaatgatgatgatgaataaccaaagtccatataataacaactattcaccatatcatcatcatcaattctcaccaaatccttcaacttcttcatctcctaacccttttggtgaccctttccttgctctcccagctcctccttcatctactacacagcagcaatacagtcctaatcatatgcttctctagaatggtaatcataatgacttgttttttcttcttcttctacttaatctcgatttgattcaggttattattattctttcattcttttctagtataagactcttctacacttgtcaggattttttcttctcttttgttttcccttaattttagtacttatttaagcttaatattccttaatcctttgtatttttcctctatcaacggtaagaattaacggtcagcgcaaaaagtggagggaaatttataatttgtgtactttgttttatctctcgtcactaaaaaccgttaaaaacccgttagggctaacaaagtccaaagaaactcaggtcccttgtgctagaagaaactgctaaaagaaaaacaaaactcttcaaaatttctcatatatacattacactctctcagtctctctcacacacatacacagagaaaaatgaattttcataatacacaatgaaattacgtaagccgagtctgcaatgaactttacatttccgacaataacatatttccaagtctacgaagttctctaagagcttcttcaactgttagttttccgttttcagtcatattctctggtgaacttagctccaacaccgactctatcacctgataccgaaacattcaaaaaaatgagtcaagtcatgcttaatttgggttcacaacaatcaaatccatcatcagataacattcgtgaactttttaccttaatatgttcaagcatggaccgtcctgtattctttaatgaatcgccaggacctgaagttgaatctgaatcggtttttccgtcttcagaatctacctgtttagcttctttagtctcagaggtctcttcgccagacaagtttctacctagcctccatagcctctggaatttacccgaaagaatcttcctctctctgaaaatattcatccctgatttcgcctctggctcgttctccgggatagaaagaggcagatccatgtggttctcacttttgcctttatcagaactgttatcctcatactctgcactgggagtatcagatactgtagatgagcgttcgatatcggtgtctgggtttgggaactcgggaggctcaatctctttttcccctagttgtcgggataaatcatcgagcaaactacgtctaatatgaggcttgttcccgcttctctttgcttcagcgggagacggatcggattctgtccttgaaagccttagcttcactctttccgaccaactcttcttccctgcttttggtctctgcaacgcttttttcctccgttcttcttcttctgcgctgtttaaaactctccacttctcttcccagtagctctcaggttctattcccacaggagaagaaccaagtgagatcgaatcaactgataagctgtgacctctcatcggttttctcggtcctttcggaatcaaatcacgacgagcattgatttccaaagcaagactctgcaatgtcttagccttttcgataactttactcagatcaatgtcctccggaaaattgagcaacttcttaagagaagaagtcgcgttttcagttgctagcagcgatgatctaagataaagtatcatcgaaaccgccattcccgcgaccagagctccccgaggagagctaaggatcctgaattcacaccctagatcagcctcaacgcctctctctacttcagaattgtcagcggaaaatatctcatcccacacgatcaatagattactcagtggaaattctcgcccaaacagaacccgtaaccaacgaagcgcaaagtactgcggttcaacaccgagttcaacgagatggctgtgaagagaagcatcaactaaagaaagtagatgatacaatgccccagaagcttcaattacaggaggcagtcccgtgatggaatcgttgggagcagaatagatgaagaaattggctacagaaaccgaaccaagggaggatccaccgtacataagagcgtcaaacatagtgtaagcgtcgtgttccataaatttatcagagaggacgattcctaattcgccttctcctccatacgcatcactcaacaacacagcggtctgcgtctcggtatcgagttcatcgaaactctttggttttttcttctttgtgcttccagagggtggaccatcttcttcttcatcttccatggaatcatccaaaaccttttttatatcgaaatcataagctccagaatcgcgttcttgaaacgctaattcgtcaaacaaatcaacaaactgatcttcatagtttgacctcacttccgtaagatattgcacatcaacttgaagaacataaagcaaaggagccaatagttcatgcatccctaaaaccaaaaaacaccattaaaaatcacaaaccatattcgcaatgtaatacactcgaaaaatcaagtatctactaaccttgtctataaccaatctcaggatgcttcaaacaccacaaaagaagtatccttctaagcatcccttgacatccagaggattgaaagtaacttccatgttctggatacaaccgagaaagatcttgatcaagcgttttctcgagctctgcattacgaaagaatctcccccaagtactatctacacaatccagaaagctttacattatcattacattggagagaaatttgcaaattgaatgtatctgagaaatgagatagtaaagttttgatttttaccaggattttgtgataaaggattatcaatagtaagatctggagaatttgttcctttcttaggcaaatgtggatcaattaagagtcttcttctcaaagcagcatacctaataaacaacaacatctaaaaatcaaaactttacaaattcttttgtttctgagtctgaatctggagctaccaaatcgagaaatgcaaaccctaaaagcaaaaacttcaatgtaggggaaagtcaaaaccttcttctggaatcagctgttactctgcgaagctcatcaatggtggaggaaggagaagacggtaagattccgaggttgattcgccatcggacgccacgaagcttctcgaaccgatgatcttgaggcggcgaggcatcattagaagtgcaaggagggtcttgtgttgttgatatctgggtttcttcatgaatcgccatgttttacacaattcatcaaatcttcgatttcgtgccaaatcgattcttgtttcgaaaaaacaatttgggtttactttttgtttatgagaaaacataaaattatgctaaaaacttttgtcactttttctttcgacaaaaatcgaatcaaaaattgtattcattttttttttcatgaggctgagaatctgtgattggcttggagacaagaatggttcatgacttcatgttttccaaaacgacgtagtttcattctcaagcttcatcttttttcatcaaaaaataagatagaacagtgaaaattattactgttattttttctgtgccactattgttattgttgaattttgtttttcttcaatagattcttctaaaatgaagagaatccgaggatcatttttgaacaagaagacaaaaatccaaaagaatgaatcactcaaagtaaagtatcaaactcgacgtgagagaaatgtgtaagtctattttttctcctctcattatgcctcttttttaaaagagggtcagtcactcttcatactttacataaacatatatatatgaggcatgatttttgttactataacgcgttacaaattattgacaacatccacttgtatgttattcttctataaatattataattttatgcatcaaaaactcatcaaattgccaaatgtttgataaaacatactttatcaactcggtaaaaatattatagtccacagactagctcaccgttcaatggacaaaaattagtagaatgtaaatcctgtttttaatggatctaatatcttaaacgctttctataacgcgacggataggtttcgatatgcagattttagtatcttttaacatgtcttataaagaaataaacatttgaaactggcattttgaccaagcaaagagtagaaaagatcttgatgcaaagtcttcaatcttgatcaatatgtcagcatgattttttttttttgggtctaatgttaaatatgtcagcatgattattggcactagtatgacaagaattagaaggaaaaaatactgcaaaatataagtaaggaaaaagagaaaaaaaagtttgatcagtaattttcaataactagggatattttcataaaatatggatagatgcatatatgaggaacttttacaggcaatagacagaaattcttttgatatctgtagtgagtagtgaccatatcaaattatcaataaatgggatattcccataaaatacggatagatacagaaatgatacgagtcaataatatgtctaccgttttcctgaccatcacacattttcttagatttgttagtcaaacagtctaatctcacaaaattactaccaacctcgtcagaaatattttattcttatttataggaattttaggtacaaaataaatgataataaatgtaaaagggcactttataatttggttcagagttaaaaaattcatatgcaaattttgtatcgtgtgtaaaatttagcttagaaaataatatgactgatttgaccgtgccgccaaacaataagagagagtgattttctcagaaataattgaatcaagcaaagactttaccagtaaggtccattgaaatgaattggggcatgcttacgaaacctaacttataatagaaagaaataaacgctccaatttggaccagaaaagccgacttaagatggcgggtcaactctactacctctcctcgttccatttatctatctttagatattttgacattttgtattcgtcttgctcttggctttttattttatcgatatgtattctacaattatctgaatattcaacgtttgattattcgctaaaacttaaataattaattttatattcgatttattccataagaaattgattacataatgtgactgttactgttaatgtttctctcttaatatcatcaaaagtatgtaattgatgagaaatgaaaacaaaatggtagaaaatgagaagctcgaagaaacagaaatgtggatgaaaaattgtattgcttttacagtttactctttgctaaagtagtatagctgaaacatttattttgtattactttatttggctaaaaataaaataaatttggacataaattatttcaattattttagattacgctaacaaaacaatctagtcacactaactcacgatcaaatccaaaagcattagcaccatttcttattttcttaaaaaatatatattttatctaatcatatttacctattttggttttggacgtcaaaagtattccgaaaacaaactcatatttagtttctaaagacttttttaatcgttttcttgtgggatatatagaagcaacgcaagagaaatggtcaaaaatacggattatttactatacatatgcaggaatctagtttagttattttctaatggttgaataatttacactacatacagttgtcgacagttcaacgtaaccaacattttttacaacgaacaaatccaaccgcttaattaaaagattctataaatcttacccaattttttctataatattattcatatctattctatagagttggaaatagtgtcatagattatatgttaatttagagtgaagcatcgtgcgtggttgaaaatgatctagttcacatcgtgtgttataagagtgaaacatcgtgcatcaccaaaggtgatctgatttagattttgtatatctcaattatcaagttacacggattttctaagacaatttatttcatatacagcatgttcttatcaaaataaaattaaaatatatatacaccatgtttttacacacatagactgaagaatcaaataatactaaaagttgacgatcgagatacacagtggcgggcgcacaccgcttagagttgcacgcattgcgattggacagacaacctaaattggctgtacaatcagaatttttgtgcagcttttacgatttatatcttcttttttttgtcaactatcatctacatataataattatatatttctaggataagatacgaactttcgtcgtcaccttcgatgaacaaatattataggttgatcaaaagcataaacttaacgagcagccatgtttgagaagtcgtaattggaatgttgtcattaatagcttgaaagaaacatgtaagtaacgcagtgagttcatgtttattcttgtcgaattccttattgagtctttacaaaagaaatgtcatggtggacctttttggaaaacaaggtgggtacatttgcctatattttttaatcaaagcagaatatttatcgaaagacaaagtaaaaacaagtggtattgtgtgaactaatgcaagttgatcagtgactatagttaaagacaattcgaatccgattcattctgtaattatctgaaaatcaattacttttatttactttgtgtgtcggtcgcggttattgaatcgtatatatttatatattttgtcggatattgaatcgtatataataaggtggatatcacatattttcttttaccatattaatagttatgttgcatctatttatcggacgggagatgcagaaaagtatatgatttgaaatctgttgaaattcaatataaagcatttatatatccaaatttcctatttctaaatagaatagttgtaagtgatcgaaaaaaaataaaaatagaatagttgtaagcttataacaaatcaaatcagttatttacacgaaagtactattttatatatatattttagatacaatatacatattttgggatatattcaattaattatttaattttaatcagtattggtaatatttttaaacaaaaattataacaactttagtttttgttaaaaatcatctaaacctaaaatcatttacagaaactgaactaaccctataatattttagcctagtgaccaatactaacatccaccttgcatcgaagtactgtatcaaaccaaatctaatattgaaatggtcaaggagaatccatttattagtggaccttcataatacaacaaagaaagaaagaaaacgaaactcaaagagacaaattaaaagagtcaaagttcaaaatatgtactctttattttattgtgtttaataactttgtatttattataaaccaatccatatatatatacacatagaccatccaccattttcactcaaaccttctcacaaaaaccaacccaaattctttctatatattaaaaaaaaatcaacacaaaggaaaaaaaaatggattacgttttgattgttttgccacttgcattgtttctcatagcttacaaattcttattctcatccaaaacgcagggcttcaatctcccaccaggaccaactccgtttcctatcgtcggccatctccacctagtgaaaccaccggtccaccgtctcttccgccgcttcgctgaaaaatacggcgacatcttctccctccgttacggctctcgccaagtcgtagtgatctcttcattgcctctcgtaagagaatccttcaccggtcaaaacgacgtcattttaacaaacagaccgcattttctgaccgcgaaatacgtcgcttacgattacaccactataggaaccgccgcttacggtgaccattggcgtaatctccgccgtatttgctctctagaaatcctctcctctaaccgtctcaccggattcctctccgtacgtaaagacgagattcgtcggctgctcacaaaactctcacgtgaatatgacggccgtgttgtcgagcttgaacctcttcttgcagatttgacgttcaataatattgtccgcatggtcacagggagacgctactacggagaccaggttcgttatataattaattcgcttaatatcaacattttcactaacctttatacactttctaccattcttgtaattaaaagtttttactaaccttattaaatatttattccttaaaggttcataacaaggaagaagcgaatctattcaagaaactagtgacggacatcaatgacaacagtggtgcgagccatccaggagattatctaccgattcttaaagtgttcggacacggctacgagaaaaaagtgaaagcactaggcgaagccatggacgctttcttacaacgactgctcgatgaatgtcgaataaatggagagagcaacacaatggttagtcacttgttgtctttacaactagaccaacccaagtattacagtgacgtcatcatcaaagggctcatgctcgtaagtattctcatacatataaaccttaaatataattttttttccttggactcactaaatgcaaacataaaactgaaagaagaaagatggtttatgtttttacatttatattataaagatattatatgtgtacatgtgtagatgaactaacaacttgtgtgtgaatttaatgtatatagagtatgatgctagctggaacggatactgcggccgtaacattggaatgggcgatggcaaatttattaaaaaaacctgaagtgttgaaaaaggcaaaagctgagatagacgagaagattggagaagagagattggtcgatgaacctgacattgcgaatctaccttatctccaaaacatagtttccgagacttttcggttgtgtccagctgcaccacttcttgttccacgttctccatctgaagatctcaagattggtggatacgacataccacgtggcactatcgtgctagtgaacgcttgggccatccatagagacccaagactttgggatgagcccgagaagtttatgcctgagcggttcgaagaccaagaagcttcaaagaaactaatggtgtttggtaacggacgaagaacgtgtcctggtgcgactttaggccagaggatggtattgttggctttaggttcgttgattcaatgctttgactgggaaaaagtcaacggtgaagatgttgacatgacagagaatcctggaatggctatgcgtaaactcgtgcaattacgagccgtttgccataaacgtcccattatgactaatctcttggcttaaatatcacattttattgaccaccattttgaagtttaccggtttaagcatttttttgggtttagattttttatatataaatacatgattgttttgaagtttggaaattttaataatgtaagattccatgaaaaatgttgtaatataaaattcgaatcatgaaattaataattcggatcataaaataaaaaagttggttatagcattagtttatatatattattattaaatttggattaaagatgcaaaaaataaaataaaaaaatccgtataataaaatgaaaatatataaacccaaaaaaaaagcccaccattgtcgaagaagcagagattcaaacattcctctgcagattagtgaaagcaaatcggaagaagcagcgaatcagcttcaggtgttatttctcttcataaacttttgtatatgattgattcgaattcgtttcactagaaaagatagaagttagcgaattgaaatttctctgcttttcatatgatcatccgattgtgaaatgtgagacaaaagatttactttttttctttctgggtttttgtttggtgggcgaaatttaaactccttatgcgtttcatttgaagtttgaatacgtttatggaaatcacgagtgcttttaacttatctggtggttagaacagaggatgtttattttgagtgcactcatgttgttcgatgaaatgcctgaaagaacaatttaagcttatattgatgagttacatctttgcattggctttggtaactggtggacatcgacttataatgcaaaaaatctcttattagtgattaagaattgataagttaccttcttgagtattttgtctgttttcacctaataagcaatggtattctcttgaatctgattcatttggtatatgctcagatgggagattcaacatttctcgatagaatgcttctccagcttcgctccacttgcaagtaatgagttcgtttcgttaattctataactgtgtagaaaaccaatcatgataatgggttgatctttctgttaaaatgaaggtattacagcggttaccctaaggatctcgggccatcgcgggttctccattttacatcagaaagagagtttgtccaactccttcaccagggctatcctgtggttgtcgcattcaccataaggtaacttagcatttcccaaaacctttcaaactacactatattcaatcacgtgcgtcttcttctataaaacaggagtaactacacacaacatcttgaccggatgcttgaggaagctgctgctgagttctatcccaacataaaatttatgcgtgtgagtcgatgtaaagctgtataaaagaatacaaagaaaatagctggtaaaccatgaagtgactgttgtgtttggattgtttcaggttgagtgtcccaagtatcccggattctgcataactcgccagaaaaatgaatatcctttcattgaaatattccatagcccacaacatgtatagttctaaagtcttgtatttccggtacttaacctgtttaaatcacgaaatctcctttgttgttgtatctcgttaaatgaaaatccatctgatgcaggccggtaatgaaggaaaagtacaggatccaaatatcactcggtattcagtgaaagttgtacctgtaagttgaagcatcacacattgtcttttatacatattcatctattgcagagtctaaaagacgatatttttccttgtttgtttcgcttggcagtacaattatgatatgagtccctacggattcagagaattctttaagcgccagggggttcgtacttcggatcccaaatgaagcaacttgaaggttggttcgtattcacaagcttttatgagtgtatcaatgacttctgtgatctaccaacgactgaactattgtattactaaatttcctttttgccttcagaagaagaataaaattcttatgatatatgtctgagaatgttccaagttctactatttccatgaatcaataatcagagcggtgtaaaatttaaatgttaaagtaaaaaaaaaggcattagatatgactcttatacatggtatgtgaatttcaaacttagtcttatatccagatttcacacttttaaccattcaaacatcgaaattcagcctcgtaatcagttctagaacatcctaaacatcatttcccactcctaaataagaggcgaaccttctgaaataataattttaaaacttaatacaattagtgactatatatatagttaatgattttagttggtaacgagcgatgttaggttaaaaactttagtgcgaatcgtgcgatcagtaactatatagagttaataaatttagttgataatgggtggtgattttagttggaatggggttgatgttagattttatttgatacttttttttttgtcatcgatttaatttaatacgataaaatggttttatatagttaggaattttagttgagaacggatggtgttgtgtcgagtcatcgtctctttatttcaaccattatctctttagctctatacttctatccatgccataaatgatttacgtaggaagatccattattttcttcaggtctatagtttttgttcttatattagtatggctgacaacaacaaaaaacgaatatgcatgaatctttgagagcaattccctaacagtctaaaatttaatacagccatgttcttatcgatgggatcacattaatgatacaaagaaaatgtcaaaaaaattggatctgcctactgctttgatctaaccactactgcttcttccccataacactatttactacgtactcgaataattgaatgttcccttgacctatatgtctttttcattttcaatgttttatggatttcgtggccaatacaatagtagaaagttatataattttaattttaaataaaaaaaattgtggaaaggaaaaacaacgaaactgtttgatagagcttaaaacaatgaaacctagaacttgtaaagttttatgttctacacatatatagttcgtgactacgtgtatataacaaagcgcattaaaaatgaaattgtagaatcaggtaaaaatgatttacgtatcgtattggtgagaatgatttagctataactatgatatattggtaccattattttgtgtcattcttcttatatattaaaacatgattatcttctaaatccgtttctgatatttttctgtttggcgttttcttctttcgatagacatccgtcttttaacttgtctttcacttacaagcaacttacttttgctttgctaatggatttaagatgattaaaaccccatacttcatagttatatactagtagtattaatttattttccggtgagtattataaggttgtgagactgtcaatttgtcatgctcctttaaaagtaaaaaaaattttacaaagtaatattttgtatacgacaaatcgtcattctcatactactatatatacaacacacacatcgaggcttgagcaaaatagtctacgcgtttccttttcccttgtaatatttgctttttaaaaagattttgctttatcaggtaaacctctttggatgttttcgttctatcaatagcacccaatgcctaattttaatatacctttctagtttcttttatttgttcatcattaaggttcgatttctctctacttacaatcaacaacatcaaaaaagacttgacaaaacgctttagatcactcttcttcttattttgtttcattggttttgtttctgtgtgcaaacgcgcagaaaaaaaggagaagaaatgaaaaagcacgttatgttggtgaagcctttctcgttggaagatgagaaagactctgaaaacacacctcccaatctcatccaacggatcttaagcctcttcaaaaacgtacggccaggatccgatctcactaattttcaggtacatatttatctgttttgcaccttcagcctttcaggtgataaaaatgtaaaagtatctaaaatctttgaagatgtactatatttagtttctttcttgggatctgaaattgcaccattctatttctacatactttggttacaaaaagaaaactctattttttgccccaagttttacatataatagaaacttactttcttttatgtggaatcacacagtttcatttacacataaaaccatacataatagttaaacttgaatacgacgtgtttcattttgaataataacatgagtgtgtgaataattatacttacctatttttcttaaaaataataaaaaagtttcatttaccatgaaagcttccacctcaaatgaacctagcgagatcgcagctccaatgctacggcgagatagtatacagtttcgacggtcacgatctactcggagaatgtagtcgtcgtgacaaaccaatcgaacggatgaaagcaatggtgacgtggtacatctcaacactccggcctttgatctttggcttggctccatacaatcctgtcatcggcgaaactcaccacgtgtccaatggtcacattaacgttctcgcagagcaagcaagtgttttattcttcttctataattagtgttttagattacttgttagtgtatattgaaagaatttttagtatagcgactaatttatgttacgttttgattttttcttcttcttcagatatcgcatcatccaccagtttctgctcttcatgcaactcacgagaaagaaaacgtagacgttttgttatgtcaatatttcacgcctaaatttcgtggtacgtataaaacaaatttaactcaactttaacaaaacatacaacaataaactaaaaagtgggttttgaaatttaaaaggtgcttacgtggacgttgaggtgaagggtaaaagagtggtgaaacttctgaatcacaaagagacttacgaaatgaaccaaccaaaacttctcatgacgtttttgccggcaatgggagctcactgggccggaaagatcgtgataaagtgtccggagacaggactcggagccgaattgcagttactatccgattcttttctcagtagattcacaggaaacaataaaagagccattaaaggcaagatctttgaatcttcctctaggaaacagctctatgaaatctctggacactgggacaggtaacaaacacaagaagcagaatccatctttcaaagtttattgcagttgaacatataatttacagtgaggtaatgcatttcagaactgttaccgcgaaaaatacaaagactggacagcttgaggttatatacaaagcgagtgaaaacattgcaaagctcaaaactcccattgtcgagaacctgcaggttactgttataaactttctcgggagattatttgttttgttcgatattcgtaattcagttatttctggtttgcaggaggtgagtgagagcgagtcggcggtggtgtggggtgaggtgagtgaaggaatcgtgacgaacaactgggagaaagcaagagaagccaagagagatgtggaggagaagcagagggagtctttgaggaaaagaaaggcttctggacaatcatggattccaaaacatttctctgtagctcgaactggtaaggactgggactgtgttcctctacagcctacggttcctcgagctcctatagttgttcctctctgattctgctgattctctgtagtagaggttcctacaagaagtaagaactcatgagaagtgtaaagcacagagaaaataagttataagtacaaagttgtcagaaattctcaaactgcaaagacacaagctatgagaattttaacttaccagtttatcttacagaaaagctgctaatcaactgccaagagtattccaattcgatgaatgaacccattaaatgtctaaccacatggataatccaattcgaataactctgattatttccggttggcttttggtgacttgagaagtcaagtaaacatactgacctatctaggcatacaagagagcacagacataacgaactcattagcttgctccagcttcccactggtgcagagtgagctaacagttgagtgcaggctatgaaaatcatgaacatagtctttcttctttatctcttcttcattcacatcattcaagaactgcaacctttggtaagaacccaggtttttaccagacggatagattgttgaacttatctcatctaggattttgatagcctgagggacccttccttgttcgcacagctcgacgaggaagcctctgatcgattcagattcagctaattccgcatcaactctgttaatcagcttaacaacagattctgaaacaagcatttctctcaagaggccccttgcttcttccattcgccctttcgtgcagaagcctttgatcagaaacagaaaaccaaagaaatcggcagagatatttttatccttgaactctgtaaacacactgagagcttcttccatgtcaccttttttacagtaacctttgatcatagaactgaccgtgaatgcatctggtgttacccttcccatcattttccgtgatacaactctcatggcgtcctctgtttgccccagcttgcagtacccgtcaactatcgaattataaatgataatgtttggcacaagtcccttagataccatactgtccaatagtttctcagcatcaagaaacaacccttctttgcataaattgtcaatcaaaatgccgtaggtgacctcagatgggactaaaccaatattctcaagcgaatcaaatagacggagagcttctacaagacaaccttgctggcaaagtccatttatgagtgaattatatgttatggtattgagagtgacacctctgcttttggcaaaactgcacaaatttaaggcctttactagaaatccttccttgcagagaccattgatgatgattgtgtaatcgatcacatccattgaagacagagtagtttctccagcattaacaacgagtagataagcatccaatgatctgagattgtccactagtgtttttagaattgtagaagggaaagtaacagttaaaccttttctcctcataatcatataaacttcaatcgctgcctcgaaagaacctctcttgcataaaagtaagatagcatcattgagcatcccaagacaaacatctgaattcaactgttccagtccataaaccaaaccgagtattcctttgtcacctccgttagcatggattgaatgtaacaaggtccgagatgtatggatgtccaaatataaacctttctcccacagctcgataagaacttctgtggctgtgtccagcatcccttttttgcagagtgcatcaataatgcgattataacatacagctgcagaaactgagcttttcctcaactcattaaacatctcaagtgcctcttcgatttgacccgttttgcaataccccttaatcatcgttgcgtatgtggctgtatctggagtcagatccatttctggcattgccctgtaaagtgcatcagcttctccatatgcacccatcaatagaaatgctttcaggagaatgttgcacataaccaagtccatagggattttagcttctaaaaatctacgcctaatctctaatacagcatcaatattctgcacctttatataactatccaataaagtactataagtaatgacatctcccacaactccttttgaaacttcatctgcctccgacactctccctgccatgcaaagtccattaatcacagtgttatacgtaagaatgcttggttgtatccctctctgctccatatcccccaacatagagaaagctcgattcaaattccctttcctacaaattccatctatcaaagtcacatacagaaactcatccacttcgattccaacacttagaattctattgaacaacacaaatgcctcttcaagtttacccattttgcagagtcccctaataatagctgtataagtaatcaaattcggctctactccttcctttatcatcttccctaataaccccaacgcttcttcaacattcccctccttcgacaacccatctattagtatcgaatagctaacaacgtctcgattcattcccttctccaccatttccctgtcctgcataagtgcatccaccaatgcacctcccttaaagtacccatgaatccaattactatagaacacacagtcaaactcaaatccttcatcttccaatctcctaactaaatccctaacttcatcaaccttacctaactgacaaagagcactcacaagcgtagtataagttacaaggttcggcactagaacacctgaatcgacagcactttcgaaaaaccctaacgcaagttccggtttaccaatcttacaaaacccagaaatcacagcactacatacgaaattatcaaatgggtaatttacattcttgttcgtcatcatctctaaaacctcaatagcattatccatctctcctttctcaacgaaccgataaatcagtgaacagaacgttaaggaagaaggaaacgcaccgtgattccgtaaacaatctcggagaatcagaagacccttacttggatcatcacgtgtgatgctaaatccatgaattagagaatctaacatatgggtcctgggaaaaatcgaagcttttgaaatatggatgttgataaacttctctgcgtcttcgtatcgattcaaattgagaaatgcccatgaaacgattgagtaaatccggtgattgatgttgatttgcttcgaatctagctgagagtagaattgaagaatgcaattaaacttctgaagacggtagagatatcgaagaaatctgtcgatagagtttaacgttggagagaagccacttttgagaagagattggagagaaaagagtcctgaagaagttcgaggataaagcttcatggagatttcgcaaaaaaggcgtctcctttctcttgctaaggaaactaaacgaatatagaagagtcggtttacaacagtgaaccggtttgattctgattgaaccggtttatttggtttaaccattacattacttatgagaagtaaaaggtcatgtttacttacacaagtgttacactaaagatttcacaggaacaagtaaaaggtcatgtttcttatgagaagtgagtccagaagcttcatccatgtaaatatcttcaacggcaacaccttctggtaacttccaatcaaagtgatacaagagattagcaagaccaaactcaactgttgttatccccatgtacactgctggacaaattcttcgaccacttccaaatggtaacaactcatagtcttgtcctttaacatcaatgtcacagtccataaacctctctgggagaaactcttctggatctttccatatctcgggatcacgtccgatagcccatacgttgacatgaagccttgtcttcggttgaatcgtgtagccgttgatcttgaattcagatatcacttctcttgggactagaagaggtgctactggatgtaaccggcatgtttctttgataaccatatttaggtaactgagatgatttatctcatctaaacttatgattcttgttttgttgtttttccctatttgggctctgatttcggattgaactttcttcatcactcgtgggtttcttatgagttccgccattgcccatgtcatggttattgcagaagtattgattccccccaaaagaatgttctacatacaaaagatagataatatgttttacaatatactaatcttaaaggttttaatgagatatgtcttaccatcaagattgctttgatgtggtttcttgtgagtttgccatatccaagaacagcttcttccttttccaacctcaagagcaagtccacaaaatcatcttcactttcttctctgtttttctgtagatgtaaatcaatcatttgttcatagaaagcatcaagatctcgtacgcttctctccctccgagcgtgtaaacccgtgaaccaatcgacaatccaaccgacatacgggaagaaatccgaagcagagaagctccccaacatctcaagtgcctcgtggactaaatcttggaacttatcattgttaagcacagttccttggaaattcacaccaaatactgccttgcaaattacgttaacgtttaaagaaagaaacgtatcactcaagttaaccagagttttctgagaagcagattcagcaattgagtcaatcagtttctccatctccgcctccttgattggttgaatcgagttaattcgtttattacaaaagagttcttcaacacaaagcttccttaattctttccaataatcatcaaatctagagaaagcaatgtctagatagttgtaagaaagctttcttgtaccttccaagcttggacggctacaacagtggaggtcatagtctttaagaacttgttttgctgtttcaggagtagaaactataactgttggaactcttccaagtttcagtaacattacaggaccatacttctttgagagcttacatagagattgatgtggtaattctccaagctggtgcaagtttccaatgattggtaagcctggaggagacggtggttgccggacccatcgccgcttagagtgtttgacggcaacgagaaggatagagatgagtaagataagtgatacaaaccaaagcacagtcatattttacacgtttcacgtttgtggttgcgactttgtgtgtgacatgatgaagcaaagctcttgtcttttcttatatacaaacatttgaccaccgtttcgtaaagatataaaattcttttaacaaacaatagaattatctatatataaccgacgcttgaattcagggaaaaaaaatccaaaaacaataaggttcataagtcagtcactggtgttgtcactatgacggcaccgacgttcaattctgttttacgttacgggcttgaaagccggacattaagaaaataattgtaaactaaatcaattttaacatttgtcaaagaacatatatatattttttactacgagcaaaaagtatttttcatattggtatcattatgtttagatgtcaaagaactgaacacagccaaaattcttaacccgttgtgctaaactacttatagcttttacaacaacatataccgcttaacactaaccgaacaatggctaaaatcacgataaccaaatctctccttgaccaaaaaatttctgcttctaactttcttcttatactaaaccttaataaaagtagagtaccatgtaaagagacactaaatctcagcaagagaaagcaaaaatttacagtaaattgcgatccaatctcggcatatctggaagtgtttagttccggtttcaagaatcgtatggtttagtttcaagaatttgtctctggcttagaccactgtgcttgtgtaatttggaaagagtctgaccagtttgtaaagagcatctgagtgaagcttccttgcaaatagataacatggtcgtctaattcccttccatgtacaaggccaacgcagctcttctccgcgctaagataagaaaaacgcagaagataaatcaagaaaagcatttcacattttggagtgttttctaatgcagtaaacgagtaatgtaccttgccaacgcttgttacatgtacactcatgtcgtcagactgcaataaacaatggaaggaaaatatttagttaaccacttctaagtgactagtaacaaccatctggttgggctaacaggataaaccggatgatgatcctgctttactctgtgatagcatacgagcttgattgatgtgttgaataaagtgttgtaacattaccgtgatatttttcaagagcttgagtgagacatcgcgtgctctatatgtctttggatgccatctacgctcagaccaatcaacatatgtgactgaccagttcgagattcctccaggatcaagcatctttaaggaacaaagatttcattaagggacaagaatcacagtgaaagcttttaaaagagagaaagttgttataatctcctcacatgaaagaatgttggcaggtaatgttcatccgcgatgcagttcttgtttgcttctactccaggctgaggattttcaaatcagaatcagagtaagacaaaactgaaacttttctcaagtttttgaaaaccctgaggactcttgatattagcaaaagagatatgcttgagatgaaccaaagcttggtgtctttatgaacaatttcttacaacggaactcagtcatatatggtaggctgtaacatgcaaacaaaaactttggtataaaggaataccgaacttactctgcaatactcccggaatttcgagtagtagagaccatcagccatcactattacagcgtgttgacgcttcattgtgaaccactaccaccagaagagaaaagtgggaattacacatttacgtaatttcaacaataccattaccaaacagacttagagaagcaacaacttaagaacaatccacaactgagagattaagttaacagtttttcacctgtgcaccctttctgaaatcttgccttgggatctcaggtaacatgtgatccatgtgtctgccagtcccatgaggaccaagatcctcaaaacttgagagagagaaacaagtattggtgaatattaatggagaagtcaaatttagcaatagaaagaatagatacacaaagtttctgagagtcatttatttacctatcaatgaagctgacatttgcgtgcatcaaatatcgataggtgtagtcaaatgtatgcaacggtatacaactgcaacattaaaagagatacatcaagtaaacagaacgtagctggaaattaaagtaatgactttgtgcaaattcaataagtttatgaaataacctttctgaaagaagaacaaagtgctggttatcaggatcttcaagagcatttgctagaagccgtctctcagcatcaaccatagaaatccttccccaagtgacatgatcactatgaatttcacggtctgaaaagtgacggctaatgtgaactggtcgtaacctggaagggtggatgtaaatagagaatcttccttcttgacccttcacaatacagagcaaaaccgtcaaataccataacacagcaatcaaataaaatcaagaaatgtctcggaacttgttccaacctggaaaaacttatcccaaagcttctcaaatggcaaagtaccaggagtcaaaaacataaaagcgattttcgatttagcggttagagcaggaggtagtctcagtatatctttgatcacaactcgagctgctacttcttcatcagtgaatttcctgacatgaacaggaagccatccagagagcgcagcttgacagcctctactagacaaacccgcacaagcagagctcttactgttgttgtgttgtggatacatgtaagtgatcaccaaaagcacacttgtgatacagactaacaaaacaatcaacaatggcttctttagagaagatcggtgtcgtggagacaaatgcagattctctcccattgtgaaaaaaaagtttgaatctttaacttctttacattgagcaaaacctgaaaaaattccaatcaaagaacattaaagcttgaatctttgtcacttaccaacactcttgagaaacaagggagtataattcgaagtctcccacacgtttggtgaatcaaaatcaacggatttaaagaaaagaaaacctaatttaaaggagaaaagaaattcacgttgttcttgtgattgagaaagatactcacccccacgtacgagagcaattatgcttcactgcaaaaccaaaatctgaattaataagcaaaactctatcagattcgatttttttacagaaattgtaatgaagagtggaccaaatgcatttaatcagtgaagagagttattattacagttacctgagaatttggagctggggagagaataaaaaaaaaagaatctttgtctgagcccagatctcaaaatgaaagctttgatgatccttctttatatcaaagagtgaagagaaagataacgagacagtgttggattttgtttgcttttggaataagtatattaatgtgttgtaatgaagaacatacaaaacaaagtaaagtgtttgacgattcagatcctcgatttgttttctctctctttgcttagaaataaagaaatcgatgaacgagtgtgtttacaccattttcttcttaaaaaagaaaaaggtctaaaactgttttaattatcttcttctgagatgtatataaacaaacccctcaacaccagtcgatttttccaatcatggtggaatcagaagaaactagagatagaaaggtatatgcacgcataatttttattttatttttgttgataataattactatgtagtaagaaaaaacaaatcttaaaatttttttcctatcttttatgctttggaggcttttcttctccgtaatttttttgtttttcacaaaaaaataataatctaaaagttaaatttggaaatgacgatttaattactaaccggatcacttgtctctatggacataatttcactcataaagcttaaattatagtgcacaaaaaaaaaaacagcttaaattattctgggactaactaaacaaataattgaatgccaaaaataagaaattcaatttttgtgcctaccaaaaaaaagaaattcaatttttgttagttattggcccgttgctttaagaagttttggctcagtttcactgttaagctaaggcccaagacagtaaggctagagcaacaaaccaaaccgaaaaatcggaaaaattcactgatcttgttggttaaccggtggaccacaaccggttaacaaacatcgtttttatttttgttttgggctctaaaccctaaaagaaaccttcaacgccgttcgtttcttcttcttcctcctctgctacagaatcgttttgctctagacgctaattatgtcaaatcgacctgagttactcgcaccgccggagatattctatgacgataccgaagctcggaagtatacttcttcctctcgtatcgtcgaaattcaggttttccaattgtttccccgaatttttttttctttctcctgaatatagcacttttgcttaaaattttatcttttacaggcgaagttatcagagagagctttggagcttctggctttacccgaggatggtgttcctagattcttactcgacattggtaaaaaaaacatccttttaatttactgatgatgagaaatgttaatttttctgctcgtttcctagaaattagtttagtcaatgttgttgtatgattccttttatttgaatattgtagttcaatgcacatatataaacatgtttgattgaaattcttttctaaagttttcatatttttcgatcatcagttagtttagtatctcgatgactgagtacaaaacttagttgtttagctttggttatctcgataattactaatctctattgcggttcaggttgtggatctggattgagtggagaaacactttctgaagacgggcatcattggattggtttagacatttcagcctcaatgcttcgtaagctccattctttttgaagggttacttatcattctctgtctcttgtgatctaagcccattctatctttaacaacgatgtagatgttgctgtggagcgagaagttgagggtgatcttttacttggtgacatggggcaggtatattataacttcactttatccctctcccttaaatttatgtgtggctattggtttatacggtatatagcttcacattattaattgcttatacatgtgttaccacgaccagggcttaggtcttcgttctggagttattgacggagccatcagtatatcggctgttcaggttttacgtctcacttatcattgacttatgttgctcatccaggtgttaccattctgtataacatatatgctacattgaccatatttttgaatctcatcgactgcatttttagaatttgttgtttaatcagctctcttttttttcatgattcagtggttatgcaatgcggataagtcatcgcatgaacctcgtttgaggctaaagtaggtgtaaatcattatactatagatgaattaattagaaaaatgtgttacaaaactgatattttacctatcaattttataagggctttctttggttcactataccgctgcttatcaagaggagcaagagcagtttttcaagtgtaccctgaaaatattgctcagcgtgaattgattcttcgccaggccttacaagctggatttggcggtggacttgttgttgactatccacacaggtatgtgttgccaattccattgataagatcattcttctacagttaagaaaataagtaggtgttgtggacttatgagcttctcagaactctaatgccacgtctgtttcatctagaagctgttttttgttgtttgggttcacacatttgaccgctgaatcacttttaaatacatgcattctctcttatgcagtactaagaaaagaaaagagttcttggtcctcacatgtggcactgttcagacgagtattcagaccagtaaaaatgagtatgatgagagttgctcagaagatgacaacagcgacgatgaagagagtgaagaggtaaagctatagggctactcggaatctcattactgtcttctaacatatcgctatatcgaattctcatttacaattctcggtttttttttctttgtttgtttgcataaaggtgggtgtatcagataggaataggccaaggaaaaggcagagaacgaacacgaaagtgaaaggaagagaatgggttctgaggaagaaagagcaaagtagaagaaaaggaaaaaatgttcctgctgactccaagttcaccagtagaaaacgcaggacgcgtttctagttttgttatgatacctaaacgctagttagagcgttttaaaagttttgtcattaaaataaattctgaacatcattactgttttcgatatttaaacgtgtgtgtactcaacatttttcttgctctctgctcgaaatgcatattgtaatttgtgtttgccttatcaatttttcagtcaatattgtgtttagtagttgacggcattatcaaccactcacgtacactatacttttggcaaacaaaaattcaaagtaacaccaaatttgtcttcacaaagaggtaaaacattaaactttttcttacaccaaatagaccagaagccagaaaacactaccaccagaaacaatagagaataagatgattatataagcaatcacaatttaacaaattgaccaaaaatgacaaaaaattatggatttaaactataagtttttgcagaagaaaagctgaaaccagaaacaaacatatatttctgacattacattatagtctcgaaaatatcagaaaacaaaaagaaaattgagatagaaaaacctcagaacactaacaaagttgttttaggtctcttaaccaaagagatcaaatccaaagtctccctcttcctcttcagattcttccttcttcttctcttcctcctttgtggctgcggcagcctcaccaccaccaccacctccagcagctgcacctcctccggcagcaaatcctccaccaccaccaccaccaatgaccacctactcatataacacaaacaatagaaaaaatgagtttcgataaatgtgtatcatacatttcaataattaagcttcgtatcattcatttcaacaactcatcatacaattcaacaatgaaacaagtatcatgtatgcttcaccaaattgaaaatgagattagagcaaaatgacacacacaatacaatgtagctaaaaaacaatatacattaaaatacaaatcaaattttcagattcttcttcaccaatggaatcataattgaagattctatcacaactagttagctaaacaaattatgatcgcaacaaaattaagtgatcacaagcatcactagattcgagctaaatctataagatctagctatctacgagtaaacacacaactttatcacgatccagaaatgaaagagatgagactgagagataccacgaagacggcggaggtaggagagacaagagagaaagaagactgaacgccgccagatgaatcggcggagagagcagtctgaacaagcttgcgctggagatcgtaggtggaagaagctgaagcttcaagatctccttcgtgttgctttgcggtccattctccgcctttgcttttgcacacgaatgagaaaactcccatctcttcttctttcttcaaacggcggcgagatttctcaactgtgaaaaaaactaaagtctcatggcaaaaatgcgtaattttgtttatatatgatttgatttcacgacgcagtgagaaccctaaaataagtccgggcttatagaagatgggcctgacacaaagcccattttaaaaattggaagcgtaattaatagactcatagtagtaactcaaaaatatgcatgccacacttcatttctacagctattagtcttatcgttatcgacaaaaacttgtgtttatcattactcgtgctatgtattttagtttgcgttatttatgcttaaaatcaaattatgcatattttctgtttttctgggtcaaaaaatcaaacatgccacacttgtttaacttaagaagtatacgaaggtttctgtttctcaataaatggtaacaactaacaaccatcgaagagtacgagtttcagatcttctagttctctctgcatttacatcaagaaaatttacttaaacaagcttttcatgagaggtatatgtcttacatttgaattatttacataaagagccctcatagcttttctccatgatatatgatgaaatgaaacgtatgtacttggaaagcaggtcctttctagtattgtgggtttgtgtttcagtttaatttgaattgagacaaataccccattttgattgttatacttatacatgtagtaatacaacaagtaatcagataaaatcaacaaaatttcctcaaaaatagtgggaatcaacagttaagtagtaagctcttaagcagagccttattttacctaccaacttttacagtttgggttttgaaacagctgaagcaaaagagaaggaaaaaaaaagtcagagctttatggcagagtgaatggcgacaactccaccaacaaggttctcgtactccaccttctcaaatcctgcatctgcgatcattgatgcaaatcgctcctgcactcatttcatgcatctagtgattacaaaacatgcttccgactaaaaaaacgtcttatagactagacatcacctgatcacacacacgatgctcatataatcatagctatcataacttaaaactgatcttcttacaggaatctaacacaaccttaagctatggtattgatcacggcaagttgttgttactaatggttttgacgaagtccacaagttaaaacttaaaagttatcttacatgaatctaacacaaccttcaattgaaagattcggccatgacatttattactaatggtcttgaagaagccatgcagcaaaatcacgaaaacacaggaaaactaatctaaaaattgtgtatattgtataccaaattttcaacaaaggtaacaaaaggttgaatgtttgaacctgagggggaaaccgacgaacgctctcaaccaagtactgataagattccctgtccccggcgattagttcccctaagtttggaatgacctggaaagaatacaaatcgtatctgcaacacaagaaacaaagtgagattatcatcgaaacaaaaaagacttagggacttacttccacaacatgtctaatcatcaaaacttacagatttttgaaaaccggaatttctacatggctgagctcaaggcacaaaaatcttcctccccgtttgagtaccctaacaatgggaagagttttagaatactatacacaaaacgctgacacatgaaaatatacccgaatagaagagggtgtaagtaatttgtaataggtacctataagcctcagctagagccttttcgatgtgtgtgacattccttattccaaatgcaatggtgtatccatccattgaattgtcatcgaaactcaaggcctctgcatctccttcgacccatacgagtgacttgttatctcttagacctattcaagatagtaaatgaagcctgagctcacacatacatagaaaaaaaacataaaggaataacagaggatacaaatttgttgcacaaacaaacatctgatctttcacctctctcagcagctcgttgtttcccaacgtttaacatgttaggattaatgtcacatacgtatatctgagtttcctcaagagaagcctcatcaactttctgcaatgctcttcgtttgacactgtaaacagcatcatagatcctaaaagcaacatcacctgcatattacaaccaatatctataacaaagagcctaaaacattttcaataataacatgtatggactcatgatcagagacagcaaaattccatgtttaaaattgatttgactaacctgttcctccggccacatcaagatgcttcatccctgcaaatggacttagcttcccaacgagtctgaaatcacaagaccaacaaaagtgtcaatttttacacaagagcaattcataacactagtgataaacgtgtcacggagtctaacctttccttccatagcctatgcaaaccaccactcatcacatcattcataatatcataactcgaagctacattggtgaatacattaccaaccaatttgcttttctcttcttcctttacttcttgaaaccctgaaattaaaacattgaagttaaactcacacagtagaaactcaagaagaagccatataatagaaaacaaagcatttcgtatagcatcaaaacagatgatcttgaattgtgaaagtcatccacaagaatgttaccgaaacttgtggcatgagagtgaagcgaagcaacaaaggaacgttgattcaaaattctgctcccgagcctcctgcttactgatcgtagtgccatagctctcaatagaaacagaaattatagtcgtctactccaaactctgttcctacaaccaaatccccacaaattttagatggttagaccacttcatcacctactaaagattaaaacagagaagacaaaaaatgttccaatcacatcaaaattttcagaaaataaaaattatttcgttgagattcaaagtttttttttttctaactacaggaatcatgaaactgaagaagaatcttttgagctgttctatgaatccaccgactcaccggaaaggaaaccgagaccctaatttaatctacccttaaaacttaagctcgaagaatgaagtagtaaactccagaattaacgaaagccataacaatgaggaatagtatagttttaaaacccaaattttatcgactcacagctctgagatcgagtgatgtatcacacgtgttgttcttgccagacacgtcggtgccgggaaccgaccaaaaagtttgacggaggacgaaggaacggtgagtttttttgttattgttctctcctctctccacatagtacgaattgggcttttaattcagtgctgaaaaggcccattatgttatgatcccggttcatattaattttgggttggtttgcttatccgataaattgaattttgagtgggtccaattttaaaactcatcgggaaagtagaaattgacaaattgtgatgatcggaaaaaattagaatccaaaggatcctaaactctgatgtctgatcagataacataaacaaaaccctaattcgatgtttgaagagagtaatcgatacatcttaggaatgagagagcgagactcggattccactgccgcgaaaaccgccgttcaaggctacgattatgaccggaattgtttggatccacgactgagtaagacgaattcgttggaggaaagatggaggagaaagagaaacaaaattacctgcgaatgcgacggaggttattgtgcggtgcgtcgaggagacgaactcgttagtccgttttgttaattgagctgacgatttttatttttatttttattttgactgaaaagagaagtaattatattgggattatacatttcatttcatttaattataactaaaaattggattagccattttttttttatcatcttcttctctcttctattcccgttattttcgaagtgtaaacctgaaaaagcgggaagtcttcaattaccacaaagttcgtttataattttctcggatcatcacatttttcttttcccttttaccagttttttcccccaagagaattttacaactatgaacgcagcattatacgttattattcttgacaaaaatctgtaaaaggtatttcctttgttcctgtttttttttttcaaaagtcccattattatgtatcagcgtcatgcatgtgtgtttgtgtattttcttataatcgtagagctcattcgttttttctccgatggttttcacaagaaactttgtttgcatttgtgatttctcccctgcctctgattcctcccattagagcttgcatgtggttttgccttaaaacaatttacttttctttccaacctggttgaatttctctggtatgaatctacttgttctatattgaattatcctaacgggtttgtgaggatttttgttcttgcttttgttggttttttctggtgaatctcctctgttcttgtctgaaattcgcatctttttttgaggatcacgatttccttttttatgttttggttgagtaaaatgttggtgtttcagaaaaaatatgaatcgatagaagattcatatttcaattacaatggaagtttctgcgattttagtacctacattgtaaccaaacatcggttcttttgtttcaagtacattgtgtagattatataatatattatgtgcttgttacgctcattgagatattgagaagaacctcttgtttctttttaaaaaatcttcatttacaccttcctcctgagtttctggtaaagtgtcaattgatacttgttaataatctttgcaggtttggtttgtttcttgaaatttaagaagcttggggagagtttaaagatttgcaaaaaccagaatgacgttttccatgagagatttagatcaggctcttcaaggagctggccagaaatcgtaaccttctttcactttttattgtttttattgtttttattgtagtccttgctgcgtagcttgtgattcatctggactttatttttggcaaattgtttacacagcgggattgaaatatggcgcatcgagaacttcaaacctgtcactgttccacaagagtctcatgggaaatttttcaccggggattcctatatagtcttaaaggtcagtagttttttcatgttccttctttggtttattgatatatagttcttaatagtgtcttataccttcttatctaactatctcatgccagaccacagcgtcaagaagcggttctttgcatcatgatattcactactggctcggtaaagattccagccaggtacagtctcttcatattctctagtcttttgttttcttttttgtatattcttcgacaaataagaaccatggtgttgtgttgatgaaaataggatgaagcaggtgctgtagccgtcatgactgttgaattagattcagcattaggtggacgtgctgttcagtaccgagaagtacagggtcacgaaaccgagaagtttctttcctacttcaaaccttgcataatacctcaagaaggtggagttgcttcagggttcaaccatgtaaagcccgaggagcatcagacgcgtctgtatatctgcaaaggcaaacatgtcgtccgtgttaaagaggcaagttaattagcatatcttgaaatgtcttttctctcaactggttctttatgtttcatcttggtttgcattgattttcttattcacaggttccgtttgttcgatcgactctcaaccacgaagacgtttttattcttgatacagagtctaaaatttttcaattcagtggttccaagtcgagtattcaagaaagagcaaaagctcttgaggttgttcagtacattaaagacacttaccatgatggaaagtgcgatatcgcagctgttggtaagtgaactaaaccgtaaaaaacaatgaaggctaagattataccaactatattgagtttaatggctttccttttgttgtagaggatgggaggatgatggctgatgctgaagctggagagttttggggcttgtttggtgggtttgctccgcttcctaagaaaccagcagtcaatgatgacgaaaccgctgcatctgatggtatcaaacttttcaggtagaacaccttttactttaatagaggctccctaataattgactaattactgcagcaagatgattatgttctgacttgagacatgtttggtctttcaagtgtcgagaagggacagacagatgccgtagaggctgagtgtttgacgaaagagcttctggacactaacaaatgttatattctcgattgcggtcttgaattgttcgtttggaagggacgaagtacttcaatcgaccaaagaaagagcgcaactgaagctgcagaagtaaatatctcctcatgcactgaaacaaaagtcttgttttgatttgtttcttaatgttcactgtcatattattaattttcattttttcaggaatttttccgttcgtctgaaccgccaaaatcaaacctggtcagtgtgatggaagggtatgaaacagtgatgttccgatctaagtttgattcatggccggcttcaagtaccatagctgagccccaacaaggcagaggcaaagtcgcaggttgagtatactgatactatccacattgatcattactgaaatttttagactttcaattatgagatacttattctctttttgttctttcaccagctcttttgcagcggcaaggagttaacgttcaaggcctggttaagacttcttcttcttcttctaaagacgaaccgaagccatacattgatggtacaggaaatctccaggtagtgacgatgtcttagttgataccgtcattaatgtatttgaatatgtggacataaccaaaacatagtgttttgattgctaactttaaaaaaattcaggtctggcgaatcaattgtgaagaaaagatccttctcgaagcagcagagcaatcaaagttctatagcggggattgttatatactccagtactcatacccaggagaagacagagaggaacatctagtgggtacttggtttggcaagcaaagcgttgaggtaaatttcttcacacacacacacacacatatatatatatatatacccttcttactctctatatgttctcattgattatgagttatataggaagacagagcatctgctatttctttggcaaacaagatggttgaatccatgaagtttgtgccggctcaggtgcttcttcctgttgtttccgttatagatgctaaggtcgatttacgttatggatataacattatgtcgtattccatgcaggctcgcattaatgagggaaaagagccaattcagttttttgtgatcatgcaaagcttcatcacatttaaggtccaatatttttattttccctacagattttcttttaagtactctttatcacaatctctaaaaaaaaagttatcttcgtctcagggtggtgtaagtgatgctttcaaaaagtacatagctgagaacgacatccctgatactacttacgaagcagaaggtgttgcactgtttcgggttcaaggttctggacccgagaacatgcaagccatacagatagaagcggtatgtgtattataaaccgtaatcaaatagctttcttgttcatcagtttatacttggtaattcaaataagtatctggttccaacaggcttccgcaggactaaattcttcgcactgttatatattacacggtgattctactgttttcacttggtgtggcaatcttacttcctcggaagatcaagaacttatggaaagaatgttggatttgattaaggtaatctgttaattatatttgtttctacatttcggaacttacctctcatttctcacatatggtggaacctctgattcttggtttttctgttttgttcagccaaatgaacccactaaggcacaaaaggaaggctcagagtctgaacagttttgggaattattaggaggcaaatcagaatatccgagccaaaagatcaaaagggatggagagagtgatcctcatctcttttcttgcacatatacaaacggtaaaaccattttgcaacatccgttcccgggatttacacttcaacttttctcatttcaataactgttctgaacttttatttgatggtttttgctggtttggttgtccggtgatactctgtggatatcttaccagaaagtctgaaggtagagtatggatttcataatagtcataagccacattcatgttatgatcccacttctcaggttctaaaattgagactcttctttctttctttctttctattaccatataggctacagagatcttcaacttcactcaagatgatttgatgactgaagatatcttcatacttgattgtcacactgaggtctttgtctgggtgggacaacaagttgacccaaagaagaaacctcaagctttggacattggagaggtacttaaagatccattcaactagattaactaactaaactgaaaactgttcttataaacactctgctttattgtcttcatcaacagaactttcttaagcatgatttcctcctagagaatctagcaagtgaaacaccgatatacattgtaacagagggaaacgaacctccatttttcactcggttcttcacctgggactcttctaaatctggagttggacttctctctctcttcacatttgcttttgaaaatcacacctcatggagctaactcgtactaagcgataaagctgcttcttgcagatgcatggagactctttccagagaaagcttgcgatcctgacaaataaaggaaagccgcttctagatgtaaaagcttgtactcatttggttacatttgtctaaaatcaatctcgatctgtcttgatcttgtgtccttttgttgctcagaaacctaaaaggagagtccctgcatacagtagcaggtccaccgttccagacaaatcgcagcctcggtccagaagtatgacttttagtccagacagggcccgcgtgaggggacggtctccagctttcaacgcacttgcagcaaactttgagaaactaaatataagaaaccaatcaactccaccacctatggttagtccaatggtccggaagctttacccgaaatctcatgccccagacctctcgaagatagctcctaaatccgctatagctgcccgtacagcgctttttgaaaaacctactcctacttctcaagaaccacctactagccccagttcttcagaaggtctgtagcaaaaacaaagctccacttttgaaccccaaactatcaatttggtgaataaagttgagatcttgagcttacccttttttgatcattttttatttatgaagctacaaaccaagcagaagcaccaaaatcgacatcagagacaaacgaggaagaagcaatgagcagcatcaatgaagactcaaaagaagaagaagcagaagaagagagcagcctccctactttcccatatgaacgccttaaaaccgactcagaggatcctgtttcagatgtcgacctcactagaagagaggtcagattcttcaaaactctcaacacatattataacattcgtttattaagtttgtgtttcatgagttcagcttggtattttgcaggcatacttgacttcagtagagttcaaggagaagtttgagatgacaaagaatgagttctacaaactgcctaaatggaaacaaaacaagctcaaaatgtctgtcaatctcttctaaacaacactcttcttcaagaactcagttttcttgttcttcatcttaacccaaagacccgtaagtttttcgccttctactctggtttgtttgatcactttggtgcaatcttacacctactgataggcaaggagtatcgctagacctatttaacatagtcttattgatctttgtttctattgcttttgcagctcaagaaacacacaaagagggcatcatacatttattcctttgagctgcttacaaataaataatcaagcacataaattttttgaaaaatcatatattctctttatataattataacatattcaagtttctgttttgataattaggatttttttgtttgtttgttttatgatctcacataatatgtctggctgtaagattctttctttcctggccttgaaattctctaattgcttttatgttattgaagaaccaatgtaaattaaatcttatctttatcatgtgttatattattctatggtcgtcagtaatcttcactaatccataactttatttctcttgtcactttatgatataaactttttgtcatttaaaagtctgtcagaggtaaaaacaaaaacaaaaacaaaaaatcatagtaaaccaaaacaaaatctagaataaacaaaacggagtcgtaagagagaaccggttcgaacaaaaacggcaaaaaaaaaaaaaggggagcagcaacctttttccaattttgcgtgaagcagcagtgaagaaaaaaaggaaaaaaagtgagtgagagaagaagattagaaacgacgatatatacggagaatctcaggatttcgatcctgtttttgttttttctacttttggtactctccatggcgacggagcgtcatcattttgagcttgctaaaggcatcaatggccttgataagatcgttctccgcgagtctcgcggccgctctgcagaggtaaattttcacgcggcgtcgtgctctatctctagttgatctgagatttagatcaatttgattggagatcgatttttgtagtatgattacgatttgcaaatctcttagatccttgggttttagctctagtgttattgagttctgtatttgtttatgcaatttgtgttaatggaagaaccggatctgcgtgtttatcttcgacgaagaatgtgtaaaattaatgtttagtgtaatctatgaatctgttgatgctttctcagaggtgaattgttttttttgaataattgatcatcttattagttattaagtgtgagctctctgcaaatttattgatctccatctttgtctgttctgtatcattacgttttttgtttaatttgagttggtgaacgaatgcaggtatacttgtatggaagtcatgtaacttcttggaagaatgagaacggagaggagttacttcacctcagtagcaaggtactcctccatatctataccatcttccacttgatcacgaaacgggacatttggttcatgattaatgtttccaacttcgttagagatgatatggcctcttatgaagttcaaattgatgctaaacatttatgtatctcatgttatttctctggttgattgtgtctctataacgctaaagacacaatctagaatgattggctcactaaagctgatgaaagatttgggaaaatctttgcctaaattttgctatttacatcgatcattatgtaaactgagaaaggatcttcacttcattttttgcttaatttcctaaagaagtatgtgacagaacagacaacattttactttgaagtctagtaatttgctcatactagaatagtctttcttgctcggttatttgtgtgttttagctacaaataatagaaatgaaaccatgtgttatgaattctgcaggccatattcaagcccccgaaaccaatacgtggagggattcccctatgttttccacaagtacgttattatatttcttcctttggttgttccattttacggttcattatgctcatgaaattctgtttttgtatgtgcagttcagtaactttggtacactcgaatcacatggctttgctagaaataggatctgggaagtcgaggctaacccacctccgttgccattaaattcttgttctagtgcttttgttgacctgatcctaaggccaactgaagacgatctgaaaatctggcctaacaagtaagattcttcaaaactcgctctttatattttctcagaacattatgctcgtatttaagtagaaatatcttacaggtttagagcactactaactttcatctcggtgtgtccatttcagttttgagttcaggctgaggatagccttggggaccgaaggagaattaactctgacatctcgtatcaggaacaccaactctgatggaaagccgtttacattcacatttgcttatcacacctatttctctgtctcagacatcaggttaaatctcattgcatacatttatttacttctttttcaagaagatttggaatacaaacaaagattatgtaataagcattagtttttcttgtgttcagtgaagtacgggttgaaggattggaaacgttggattatcttgacaacttgaaggacagagaacgttttaccgaacaaggcgatgcgataacttttgaatccgaagtaagttttctattccaaactctcctcttttctgaaatatctctttttgtctagtatcatcatcactcataacaaaacacttgttacttggtgaaaaaataggttgacaagatttatctaagcacgccaacaaagattgctattttggatcacgagaaaaagaggactttcgttattcgcaaggacgggcttgctgatgctggtaatcagaatctgagtttgttattgagatcagaatctgagctttgtttaatatgactgaatcatttgataatcgtcttttcagtggtgtggaatccttgggataagaaatcaaagacgatctctgacttgggagatgaagactataagcatatgctttgtgtggaagctgcggctatcgagagaccgatcacattgaaacccggtgaagaatggaaaggaagactcgaactctctgcagttccttctagttactccagtggacagcttgaccccaagaaagtccttgagtgactctttcaaactccaaaaacagcatctttctcccctctttaattgcaggtaacttcagtttactcttttccatttagattgttcttgagaactttttaattaccgtagttacatttgttttctgcagtactataaagaaacgagtgaaggagagcttaaagatcatcggatatactatttaaagaaactgagatattgaataaaaattgttgcttcttagttctcttttgtaaccacagacaataacgatttgcgaactgcgaaccaagcatgcctggtctagcatttgtctggtcagagtccaaaaggaattacaacttataaaatttgtaggttaaacttaaaaggctaactgcacgggacaaaaggttaagggtgggttgttcttattggtctaagagtaaaactaaatgaaataaaatgttatatataccttgaaaacgataaaaactaaccattagtatattaaacttggcaagaagaaactaaaaatatgaataaaggaagtgaattctgacccagaggactagtccttttaagatctcaaaatctgatcaggatctaagaaaccatgatttttccgttttcgtatcttacctcgagtaggataatagttataatcgatgtctctgtcctgagttgatacacccactttgtctaaatgataacaaatgagcattaacttcaagattagcattttaaaaaaaagattgctagtgtagttacaaaagttaatggtttgatatggacatcaataatggaagtgcccataataattgataagtaacttaactaactcgagatcaagtacaagatcaaaaggacgataatagaccaacgtgggatatttacaatttacatctctaacaaagatgctactgttttgtgaaaacgaaaattcattaataataaaataagggcattattttggatccacacaagattacatctggctcgaacatcaagagattcccatagcttttttgcataaaatattttgatatatagaaaataataataattaatggtgttttgtcgttaatgcttttcattggttacaaagtcatattctgaatgcgattcattgtatgtgggagctgaacttgtccttagttgaagtattataaaaaaaaataaagaaacaaatattaaatcatctcgatagtactcatcatctatatttatatcatccaaatttggttaatttgtcttaagatcaaactgggatgaaacttaaggtttttctactagtaaaattagaaaataaaattaatctttaaaataaacaaatgaaaaatcatgtcgtgtaactatcatatataaacaaatagtctttaagttttcttcctgaattgtacattcaagttttattttcgactatactatatatataaagaaagtaacataaataatctatgaaagcagaaagtatctagtagctagtgaagataagctaaagctagtctaatagttgagtgacaagtggagaaaccacatttgacaaaataacccacatgacgaagccccacttttattgtccagatatctgacacgtgttttgttggacccacaaatcgcttgagaaaaccttaatgatgtcgtaattatctgaatatttttatttatttattttcagcttaaaaaatataatttattcattttacttgatgtttagcttttgttaacttgagtgaatatgacaactttcggtccgatcttattcttcagcggaatcatataaatattaataccaccccaattgactggttaacttcttttaccacacaaatcctcccaatttttcaatctaatctttatacaagtataattacttattaatacaaaacataaactaatttacaaagcctagtattaacacgagtgtagtgatagagtagtaatcgacacagaatatagttcgatttctttgcaaacaaactcgttgcatgttgcgttatttggattttgatcttttgtgtcattgtgtggtatctattatattatctaatattgatgaccggatatcggatactaataaaattatagttacagttatttattttaattttttaaggaaatatatagataaaatatacaagattataggtatattatatagattatgctgttcataattcataagttcgttatgtaaataatatgcaaaataaaaaaataaaaatgtggatgtgtcatgtgtgtatagtcactatagtggggtaggaattaggacccagaatgtacgttagaaaggctacaacgcgtgcttactctttttcttattattattacaaaatttaatcccaaatctatctctctctctctctttgcttccacatgccgtcacttcacttttattaactcccttattaacaatattcacatcatatcataatatatgaccaaatcaccacttgttttcactgttttttactttagcgataagtttcatgaattatcatcattattctcacataacatgatttttagttaggagatcataaagtcattatatgattcaaatatctttactttactagtgatatcaaagaaaatgttattaaatcaggttaattcaaatgcgtttttgttgtgagctacttcatgttttgaagaaatcaaatatttttaaatgatttccatttttttaatagttaattgtttaggtataacaacaattaaaaaatgtcattcatattacgaccaaacaaatttgttattcatatatatatcacccatgtcttttgttattggtctgttcttttaatattgtctaatatgcggcggacaaaactgatatgattttctctgattctttctcttttcattaaatttcacgtaatacaatcaaaaattattaggtaaagctatataaatgtattatttaacaaaccaaaaagctaaaaaggaggtaagaataataataattatatacagggtataaaaacatttatctcaatcgcatattaaaatatctacatacaaaactttgtaagtatgggtcgatatatgaccatgtatacacagaatcaacagacaataattcatgtgatgtactactattcgaaatttaaatgttgacctgcacattcaaactttggaactctaaataaatctgatttcattatatttaagcaaagcaattatcgtgtgtcggtaattactgctaagtacttgtacttgatatcatataatgtttggtttcgagtttaggatataattaattattcgaaatgactctttctcgtttccttcttgcttctcgtttcacatggctccgcctaatccagccagctcttttttctctacaataattagactaaatcgttttcttacaattacaaatttaataagatacgcatgcatccgcggaaggaatcatttcatttttctattacaaaaatattgaccgcagatcaatactaaatcgttttcttaattgtttgattgtttaatattaacatacactaatctttttgggatctggatttaaggacggtaatagcaaaccacgatcgatgagatgtgtttcttaatgcaccggcaattagttgaaagattggtgagatctatgaactccaaaataaaatattagtatatacttcacttatcccatatctattgattagattcactgaaaacacatttctatcgttacagttttagcgatagattatgtattgatgaactttagacaaaattataagttctttcgttgcaacatattcggtactttatgatagaagactttttatcaagactaagattttctgtccttttttttttttttctctgtctaaaatctaaaaaattacgataagtcggtgcctaattcattacctgcagttaaactggtgatagaattaatttgatacaattatctttaagtgattagtgaaattaaagagtaatataaccacatttaggtccaataattcaagtataattacgataagtcggtgcgtaatcgaagccccatgttagcacgagatttctttgagaggagaaaacgaaacaagtagaagacaagcaacattaaagtatagaaaaaaatatcttttagttaattagtactattataaaacttaaaaccacttaaatcatgtgctgataatttgtttttagagggttatttaatttggaatcttatgaacaaacttaaattctatttctagggttttgttatggatcctctttgtcattggccatggaattattatttaagtgatgcatgacttgtagatcactgttattaggtaatctaagggttttcatcggttaacgatcggtcttgaattatacattacgtgcatatttttgtggacgaaattttttattaccaacctaaacgtatttggtgttaccaattcaaaataatgtcaaaagtcttaacgaataattcattcacatgtcaggtaaattcatttcaacactagactaacatatactatgaatctaggttttagaatctccgaaaatatcaaccaattaatgttacagaaaaattgaagacatgaaaaagaaaatttaataattgttaaaactgctaacaagtgatatgctataagaggatctatctcattaaacttggtgtcagataaaaatgataatcatgggatattttgggaatggttggataataccagtacggatgtcgatgatggagaatatgtacgttaaaatatacaaattgataaaagaatttatagaaaagggaatcatttgaatttctaaaagtaatacagaaaacaaatcgccatttttttcttacagacacaaaagatacaagctttgtcttcaattggtagttaatataatatttatttgtttttttatatggttacatgcatatcttgatcatgtccagtgaggacttgtcttgaatatattggctaaaaataacattttctgtattattttattgttcatcatttgtccaaatcctcttgatcttctcgatttaatattatatcaacacacccaattatttcaaacccccacttatatgtataaaccaaaaattatacataatatacaaaatctacttccataagacttaggattctatattttatcagtaacacttaatatgtaaattcttgaacatattaatatatcaatcttttgagttaatactacagcatggtaagatactaagatcttttcttttactatttcatatagtggcatttatattaatgatttttttttaaaaacatcaccttctcagagaataaaggactctcaagtaagagattaaaatattacatactagtaaatccacaagaattatataaaattagctattgttttgtctgtctgttagagagagaacaattagatggacatacaaagctaatttagcatatgaaaacctctcagctttttccttgcctccttccttcacaaatatcacagcctgtcaaaattagcctttaagaactatttaacttccatcactatatattatttgtttattaatcctttttaatttaagcatttccttagctgtgaataccccattatccctctctccttctctttcctttctctctgaatatctctctatctcttcttccacacagctttagtcctatatttgattgttgacaaaacaaagcctatagtaatctctcagctattggattatgctttgaagctaaattggtaaagaagcatatagtaaggtaagtgtgcgtcttgaagaatttctcttaagtgagttttgtggcatgagtatagaacatgtgatcaatgagcttctttggagaaaatcacagcttgaccactcttcttttcaggtaatttatatagaatttctttatatgtattcgtgtatatatgtccataaacagattccggatattgctggtgctttctatttagatagatatattttctatatatgtatgtgtgtgactgcgtataaggaaaaaagtcacaaatttggcttttttcagttgattgaaattttaatacctcaagtgtatagagagagctaaaataattttttgatagcgaaatagatattttgtctagaaatatacacacatacattaggaaaaaaaaaagaacgttttcttttaaccaattttattgtccttgtcttatcctattgggtatctaatttggttctctacaattatagctaaatagacatgatcttttcatgtctttgtgtacttgtgagcgtgtgtataatagatacgtaagtacatgtgtcacatatatttatatttatttatttatatgttttagaaaaaaagataggaaacaagtataagtggaaatttaggtgatatagtcctctccgcatgaatgcgaaaacataatgaacgatgtgaccaatttatatacattatgtaattaattccaattttaatagaaaagaaacttaggtgatacagtcttcctcgcatgatcatcaatttacactaaatagttaaaattcctatttgttgactttaaattgactgctcgaccagtgtttgttgttgcttttttccatgtctctatgactctatcttattatgttaatcattctcatatctttaactttaacccacaaaaaaaaaatcattctcaaattctaaataagtcatgcttatccatagaaaaggaaacaaaatcgacaacttgttttttttccaaccttcaccacatattttatatttcttgcaattttacaactcaaatcattctattttaaactttagtagagaaaatgatattattgtactataccgcatcaattatttcactgatttgaaaataaagtattatttccgaatgcttactgcagaagatatcctatctaagtatttttacatcaatattttactataacacaagagataatttagatattttgaattggttatgaatgtggataaattcaaatagaaaagctttgtaatgttatcttactaaaacaagccgtgtctagtgttgtcatgcttggctctacttcgatttgatctgactaattagctaattgaaaataattaatcatcttccatctctatgattaataacaataataaagaaataaaatcataaatccaacaatttgtggtctaactagttctatccattgatttagtgaacataaagacatttgattcgatttaaaaaaaaaaaaaatacttggctttaagacaaaacaccatgagatagagaatctaatcaaattcaaaagtgtgtcccactagtcaaccttcttttgtctataaacccctcacttcacgaactagtggcttctgacgattactccatcaatttcatactcacatgtatacatacacatacacacaacactcactcacatatacaatttaagtagagttagggttttctaatgtgtttcatcactcatcaaatggttatgaaactatatgactacgtttcaggcatgggaacaaagatcgttgagcgaattactacaaaccaaagtggcttaaagagtgttgatcatagtgggttcatcagatttgttgttaatggtcgacaagaatcgtcaaaggagacgttgacagacgaggaagaagaaggagtttttattttaaggtcaatggataggtttcttgaaaagcaaaatgctgaatccatcagacatacaatgcaagcccaagaagatatttttaagcaacaggtacgttatacttgcatatatatatatatatatatattcatcatcatatggatttggtctttcaaacaggaaatatttaaatttatgctttccttcgagcctaattacattttaagcagcttgtcggtttttgaaaaggatgatatatcagtttaacgaattaagaaatgaatgatttagttagtttttttcaatcggttgtcttttactttagtttagattcttggaccgattcaggttatccatagcaaattagctttaaattaataattatccatagcataacaaagtgataatcgcaggtacgagagctacatagagtatataatacacagaaaatgatgatgactcaactcaaacatagaagccaatattggactgttaacaacaaagaccaacccggttcaagagagagaaccggaagttgttcaggcatagacctcgaaaatgtggttagagcaacacaaacgacgacggatcatatcgaagagagcgaactcgaattgacattgagcattggattgtcttcttcatctactactatgaccacgacaacgaacaaggacatggactactcgtcaacaacgtcaatgagatcatcatcggataattgtaataatcagagcaataataatctatataataacagcaataataaccaagaaagtagcggaccaaacacgcctatgagcagctcaagtacgacgtcgttggatcgagagaagaagagacctcattggctctttcaaggacttagtattaaccgaacctcttcttgatttttgttaattcactgactctttcttttttcttcttcgtcttcttcttgatttttttattttctttttgtatctgatttatcgttattattatttacgagatttactgatttcacttttagctaggtctaattattcttcttcgttaacactgataaaccattgacaaaatataccaatgttttctttatatttggttgcttaaagaatttattttcacttgctttcggagaccaatgaggtcatacactagaacctaaaatataaagaatgaaggaaaaacagagaaaatttgtatataaatttagtatttggaggtgttttcaaattgcctctattaactttaagatgggtctttagttacttatttcaagatttccacatatatccgtcttcttccatcatatttttttacacaaaatcgtatgtatgactattgttacataagcctctctccgttttctcctctaatagtcgtcttcgtcatcttcatcatttcttgatcggaaaaagtttctagcgacggctgaagcggctccaaaaaacatgaagagaagtaggaggtcaaagccaccgccaacacctactgccaccgcaggaccaggggcaaaaaaggaaaacggtgaccatccgtaacctccgtaaccatatccatagccaccgatcaaaggtggtgcaacctgaggattcacgtagatgttggtcctgcgaaaacaaagctgcgtttagaatgcaaaggtactaactactaagactaaagtcgtgattatataatgcaaacagaaaagcctaatgcattgaatcaagttattagtgttggtcgttggggtatcttggattcgaattgtaattatggggttcaaaatataaagtgtaatagaaaattataagaggcttaaagtttactaatgggctttaatgtggatatgaggctgctaaaagcccatacatggagtctcttgtaagaaatctcaattaaggtcttaatttaaatatatacttttttcgccagtattttaatcatatacatattaaataattaaaatcgagattagagcttcaagtaaaaaattttaccttgatcgattgttaattctgggaggaggacgaggagctgaagaccgaaacgcttgaccgccgattcttccaccgcttttggccgcaaacgcatccccaacacttcccaaagccaaaacgccaaccgctagcgtcgcgattgccaacttcgccagctgattttcatttttcctaatcaatagataaataaaagattgaataagaccaaacccgagtttagaatcggaaaaaaattttctaaaggtaaataaaaattaccgagaagaatcagtttcgtcgtcgtggtgtgaagatttacaacagattgaattaggacgagtgaggttaacattggatttgggtttaaaactgtgttggaaactgaaattgtttgacaaaaagctttgtcgtgaagaagctatggcggcgaaatacatttttgttttgtttctggtgatttggtctaaagctcttttttctctgttaaagatccttctcgtcttcttggttttgtttttgtagctctgggtttgtgataaaatgcttgccacgtggattataactagtggcctactcaagaacacacatgtattccacggattaatgatatccacggatcaaatcggtctgacgaaattaatcgaaccggttattcatctaaccggacctaaatctgcttttggtttaattagaagatattttaagtagtaaagatgatatcatctcataagaaaattgaaaggtgaatttataaatattgttatgttcacataatatccaaaaacaatatctattgaacttttataaaacataaacgtattaaacctatgatattagtatcttctcttttttattcaagagaggggaaacaaaaacacatggttataattaaagtctaaaaccatgaataaggaaggaagaaaaaccccaggagtttagaggaacttaacatacacagaaaaaaaaccttattctcttgttataaaatcatcatcattatcatctcttaaacaaaaggatcttcttcttccttaatcatcttcttgttaaatctttattaaacggtgtagtgaccagctgtctcaatgtctagtccctttagcttcaccactgactctacatgtcctttaagcgtatgaagttccctaagcctgtaaacaaaaaccctaacgttaacttctctcacaagaaaccgaaattactttttacaaatcatttaccttgcgatctcagctcgtctcttggcttgatttgcaatctcagacagttctctgtaaccacctctctccgggacaacgttggctgtttcagtgttctgaagaccgtgtaaagtcctttgtgcatgagcccattgtgcttccctctcctctattccatagttttgcttagtggtaaacgcagtctgttttttcaaagacacagagagattttgtttaagtcttaaaatcacatttcagaagaagaactaagaagaaagcaaaacgtaccctgttgtcaatgatattcttccaggctgttccggctagtatgtaacggattgcgaatttcattatgtctaatggaaagtagaagacaatactgtaaagccagattactccagcccatccccatcctattcctttgattcttgcaaattcccaattaccgtaaaccgcaatagccgttgcaatctacaaggtcaaagtttatgaatcaatcattcaagagagtttataatcaatcaagaagatacaatgcttaccaattgtgctacccagaaagcaattagcaagaaatatccaggtcgttctgtaaaagaccagcttctagatcgagtgacgaatataagagcttggctcacaatactgacttgtaagtataaagcagacatcatctcatgttcactgcctctcaagtctctcacgtggaatgttctctataggaaacaaacaaagttaatgcttgtgtgacaaggaatctaaagagaggttgtttatatgttacataccgggaagaaatcggttttgtatgcggcccagaagaaaacaacagtcattatagccatgtagcctccaagaacaacgccggttgcgaagatttctttgagtttccagctatctggtgttggagaaggcttgactctgtcctttgagatagtcatgatggttcctgttgcgtaagttaatgatgtgttagtcgattagagccaaaatttagagagagcttttaaagagaagaaaaaaactcaccatcgtttaatatagcaatgatcaaaaccatgaatggtgaaaagtcgaacttccatattagagcaatgagcataaacccaaactgtgaaaaggcacaaagtgagaaatcatatagaaaaagagattatttgatgatattcaagaatacatacaagattgattacttaccactatacgaatggtaattgagactgcatatatctgtttaaaggaacatttaaaaacaccatgagaacaagttatcatggtgtaaagattctaaaaaggttatggtttaagattaagagaacactcactgtgtagttcttcattctctggaagatggctctactggttagaaccgcgctgatgatcacactgagacctggctcggtgaggacaatatcagaagcacctcgtgcagcgtcagttgcatccgccacagcgatacctatatccgctttcttcaatgctggagcgtcattcactccatctccagtcataccacagatatgcttcctttcttgcaacttcttcacaatttcgtatttgtgctctgaatgaatttggtaaagaaaaaaaagagaccaaatgttacagagagaagagcaagtttgtgtttgtggaaacaaaaatggctcttaaacaaacctgggaagactccagcaaagccatcagctttctcaatcaaatcctcaacaggaatgtgagccatggcttcgtctttgtgtttaccgagtaaagaagaggatgggtacatgtttgatcccattccaagtctacgtcctgtctctttcgcaatagcaagttgatcacctataaaaccattggaaacattagtaagaaattcggtgttttcgctatagcgaagagtaatgtttagatataaaccagtaatcatcttgacattgacaccgaggtctagagctcttctaatggtttcggcactatcatgtcttggaggatcaaacagaggcaacacaccaacaaattcccatggactaccagagctttcttttgttttctctggtacagtctgaaacatagacacacaaaatttacattaaactctctctctctttttccttcttcctataacttgttacaaaatgtaagatttcttctcacctgtcttgaaacagctaatgacctaagtccacgctcagcgtacttatcgattgtagagtggactctcttcctcagatcagctctcgcgttacagagatcaagaatctgaaatcatcaaagaatcagtttttttaagaagtcacaacacttaacttagcttaagaaccaaaatcagttttagttacctgctcgggagctcctttgcttactcggtgccagtttccgttgctgtcgataaacgtcaaagcggttcgcttatcaactggattgaatggtaggaagtgaatctctctgattccagctcttgcctgaaagaaacaaacaatgagaaacagaacagaacattttcttcaagaaacaaaacagaggaaaaaacagaattttaaaacagaggaaaaaacagagttatatatattacctcttttggatcagcgagcattccaaccatagcagcatcaatagcatcttggttctcaactcttgaagctctagcagcaaaaagcaaaacttcatctttctcaacgcctttacaataaacctcaataagattcttgtcaacactaagcttgtttagcgtgagagtcccggttttatcgctgcacagaacatccataccagccatttcttcaatggcggtcattcgttttgtgatagctccttgttgagacaacttgtgagatccaatagccattgtgacagacaagacagtaggcattgcaatggggataccaccaatcaaaagaacaagaagattgtcgattccgtctctgtagtgtctgcgctggatcggatacatgacaacgatctcaatcgcaataccaacagctatggaacatatgcagaagtttccaatcgccgtaagaactttctggaaatgtccaacttggtttgtgctgtcgactagatgagccgctttaccgaagaaagtatggactccagtggctatcacaaccgcttcaatctcaccttgcttgcaggtagaaccggagaaaacttcttcccctggacctttcgttgcgggaagagattctccggtcaaagcagattggtcgacttttaaaggatc

SEQ ID NO: 918 - DNA, 34508 bp, Arabidopsis thaliana
accttcaagaagacgtgcatcagcaggaatgatgtcaccaagcttgatgctcacaatatctccaggaacaagaatagaagcttcttgctctgaccatttgccatctcttagaacctggtcataacaaaacaaatattattaaaagcttgtaatgaaattatatgtaaaccaattacttatgccaaacattttcaagttagacaactactaggtgctaagaatctaattatgtaacatagttaaactcgcgtaattcgtatgccaagtatacagtaaacatacacgtaaatgctaatgcaaagaggagtatttgaagggagtttataaagagggaccttagttttgggagcaagaccagccataagagcagcagcagcatttccagcattgttttcttcgacaaaactgatagttgaattgataaccaaaagacaaacgataccgacaaaatcttgccaatccggtggctttccaccgccattagccaaggcaatagccatgattgcagctgcttccatgacccaagagagagggttccacataaaacccaagaacttgagtaacttgctttcctatttattgaaaccaccattacatagttagtgacttagctcatgtatgatgactttgataatggttaaaaccaaactataccttcttctcctcgagtttgttggggccaaagatctggagtctgttttctccttctgctccagataaaccttctctgctgcatttcaactgctggaacacttcctcaataggtattttctcctgcaatataatatgaacacgatgttagactaattcaaatggtgttcaataattatgtatctcctacaccaataaacaaccaagtatgtttttatctgtagtacatcttttttacagatacaaatgttaaccttttacagtactaaaaaaagcaaaaaaaaagaaaaaaatataagcatgcaaattaatagataatcaagattataattatttatcaaagcataaaaatattagatgaccaaaattatggaatgttctgtagctgtcgatgtcagagaatctaaggtgggaccacaaggccttgtactttaattcgcttatataataagcctaaaggcccaataaggcccattgtaacggaagatgtattgataggggcaaatctgtctatataacatggtatcttaaattgagtccagaaaatcaggtgaagattgaagtttagttttatctagggaagtgattaaccgattgataaggcgatattccatgagtatgaaaaatccaaaaacgtagtaattgaaaacagaattgactaaaacttctctaagaaatctcaaagtatactcattaagatagatcatgtgaaagtagagagtactactaatgtaattacttttgctttatttggaaacaacttttacataattgtaactaaatttctggtgactgcaaattgttttaaattagtgcagttgcaaaatctaataaaaaaataaataaagaaaaagtaattttgaaaaaaaagcagaaaaactgaaataattatgataatattaacactttttcatggattcttttctcatcgaaatcaaacaataaaaatctcatgctaaaacatgaagtcaatagttcaacgatgatgtaacgagatttgtgtacaaccctaatttgatcgaatcgttaagtaaaaaacaaaaccaaactaaactttcctctcgtatattcattaaacaagttaaacaaacgaaacaaaaaaatatatacagagtaaaaagaagaaatccataccaaatcaacattctcgttcacgatatcctcgaggccactcgccatcttctctctgtgccttcgttcaaaaccaaaaaatcgttaaaactttgcacaaaactgcggaagaacgaagcaaataaagtaatgataatgaagatatattcgagactttagaaaaagaagaagaacagagaaagagataattcaaagagaaacgaaccagattcttcggaaaaaagagagcaagtgaaggtggactacgttaggctatttggtggctctctatttatatgcctctcgtaactatgcgacgtcggtttaggtcaccccattttttttattcccagtccaagtcgaaaatattttattctggaaaaattatcatctctttttttttttttttttgttaattgaagtattatcgtcttgtcaaggaggaaagatttaatatcatcactttgacttgttatgtcattaaatattaattcattgagatttcaaatttgagctctgttagtgaagttcactgagtaggacagttttgtcatatcatgtcctatagtatatctctctcaatttattaaaaggtttcttctgtttgttgtcaaataaaattttattaatacaaaagagaaagtcttaattctacctatgagaaaccaactacaccattcaatatcattaatttactatagatatgtaatttatcaaaaaacaaataaatagatttccttaaaactattatattatttaatttctttcaagattattatgataaacctaaatttaaatcataaaataatttatgattactttattgaaaatttcagattttaagcgtctttgattatttttttaattaccttgagatcttaaaagatatatattttagtatgacaactttttacttccaatgatatatggttaaaaaaaattaaaatatatctaaactgccgttaaaatggttgttgttgacttgatgaaaacagctaacggcgttattttctggtaaaggtgctactgtgctagtcatattttacggtgatggacctgatggttctgttactaactttagttaccatcaatggtaaaaatcagatgctacaataatatcctgacacgtgtacattcctttagctagtatcgcggaagtgtaaaaagaccgattcttgaaaataataaaattgcatttaaagctttcagtagatttatagacaaacaaggaaaaacaaaataaccttttagtaaattttctttgctctgacatgtaccagaaaaagagagggttaatgacatacgtttatctttttttgtcaacggtgtgaagcataagattattcttttcttcataaatggacaatcaatatacataattgtgttcatataaaacaaatctatttgaaagtttttgttgaattcggttccatatatgtgtaagaaaaagcataaacgttatttaagatcaataaagttcttatagacaaatgaaaaatgcaacttgtggaataacacttgttacttttttattagtgaatcgatatgatccaaacgtatatataaaccgtctacaatatatattaattttcatttatagaagttgacttgttatttcacagtatttttcacttttgacggtttgaatcgcaagcattggtagtatagttacatctatttcgtcagtccgagagattttacttgctatattgtccatatatatgttctatttaatttagtctgtttttactcatagatgctctcaaaactttataatgatatgtttttactcataactcatgttcaaaactttataattatatgttttactcataactcatgttcaaaacttgtctctttttctgtttaagtgcttagtgcacatctgcctacataacaatcacgcatgtttacacatagaaattgtgttcaaaactaaagggtttttctctatagtaatatttctctttaacgtttatccctaggccctagcaagtaatatttcttttcaatatgtaggtattctacttagtttagatacaaatataattatgaaaaagaattagaaataagttggatggtggggacagattacgcagcgttgcaacatatgtaacgtgaaatgatggttcgtacaacctcacgtacacaatccactcaaagtgacgtagtgtctttggactttgccttcgatgcatctcatgttctcctggtcccacgatcctacctcaattttagatcacacaaacccatcccaattgcttcataaaggttgttagttttagtaaacacactcaaaagtgttgaaattataatattacatattttgctcaaaaagagctaaggctttttaaatgtacaaacaaattctcttttgttatatatttctagatttgtctactttaaacgtatgatgtgtttaacacttctttcaacaatatacgtgtatgaataaacatgttttcgacattccacttatgtcaatatcaacacataattttatggctaagcagtaaccaccagctgctgtgtaaaatcacactttaaaaaagtttctttagcctacatctctacgatcatgatgcattggcaataacaagatgacaacaaattttacaaaacaattctcataccatgtggcttaagagaaaaggccagcgaatttattcgaacccaacatatatagtgaagatgtctttttcaatctctttttttaacaagtatactttttttttttggtaaatttcttttagtgaatttactttcatcttgaatcattctttttattttcaattcagttttgttgataatagattttcatgaacgaacaaggttctaagagataataataataaagggggaaacaaaacacatgataataagaatctaataaacaagagaaaaaagagaggtgatgaataaatgtagaagtcgaatcatacaagaggtgcttgttggaaggtcgttggaccaacgcttattgtgatattcatgttcgtattctctatgtaggtttttctttatatcttcccagcatatacgtagttatttaagtttcttagaaaattactatacattgaatatctgaaacaattaatcatgatattatggaattttttttctttcaaaatttgtataaagaaaaaggaattttatagtgggggcattttagcatctcgtcgaagatatgaatgaatagagaattttgcaaagtgtaaagaaaacaaccgaccaaacccacttgttctctcacgtcctttttatgtgttaaattgtcatacacaaaaaaaatatttacaattataatttttctaaagtctttaatgtcaaaattatatgatctatttatatcagtaatacaaatgtaaatcgctatattttatatttttgttaaaaactaaataccataatttaaaagaaatattttctttttctttttatttgcgaagatattgtttagtcgtatggcattgtattagttacttacttagtagttttacagaacgaggtgaagaatgtcggaaaaaagaaagaggtgacgaagaattttgaccaatttgctactttgtaagggaaatataatacaaaaaaattgtatttagcatcattacaaacaatttctccattttgttttaacttttactatcaattttattatttttatacgaaacttataattaataacacgaggtaagcctgttttgttaaattgagtatgtcaattcatttcatgagataataaccttcaaataaagttcataagatagttgccccatatcggtaacttaggcttataaaacagtcttattattggtgatataaaacagtacttaactacttatatataagtacttacaacttattcttattattgttgatataaaacactaaagttgggttaaatcttaattccaattcagctgtttgatgttggtttaaaagtctgtttgcacctatgattctatgatataccgaaccgattcgattaaccagtagttacgagaagttatttgtttcaactaactatctattgatttgatgtaactagtttggtcctctgcgtataaaaggaacattacagaagagattaaatgataggcaattgataattgagacggttcaagaaaagatttagcaaccaacaaccttaacaaattttcatttacgtaactataattatagatcttgctatttttccattttatggcgtcttcttattacgaaactcatactattcagtcacataatctcatttactggactataatgggctttattgtaatgggctttattgtaagacatgagcccacaaatttggaaagtaataagcttcagctcagctaaagagagtctaaaaaccaaagggaaaaatgtcattaaaatccccaacttattgaaaaagttgatttaaatcctcaacttccaacgaaacgaaataaatatcaaacttttgttgattttccaaataaataccaaattttggttgactttccaaataaatatcaaacttttgttcgagtagccatattaagtatgacattaacagaccctgttattagagtccattttttgttaacagactcgttaattgaaaacgacaatattccctataacaataaaacaacgtcgttatgtcataaatgctcaattaaatcccaatttcaaatcatatgaagatttagggttagaattttgcttgatttggagatttaagattggatttgggaatttaattcggtcgttataataaaacgaggtcgctttcttgttataggaaacaataacgttttaaattaacggatctgttaacagaaaattaactccgtgaacgcaatatgttaatctacttaatattatacctaatatgaccatatatacgaaagtttggtatttatttggaaagtcaacaaaaatttgatatttatttcgtttagttggaagttgataatttaaatcaactttttcaataagttggagattttaatgacatttttcccaaaaatcaaggggagttttatggttttatctacttgacccgacagagaaatccggacccggataaaatccgacccgttcgaatgaactcatacggccgagatttttccaccaaactcgacggttaccactcgtttctttgtccaccatcttctctctctctctctctcaacccccgaaaatctccttttcccaaaattttccgattatctcacgccggattgtttttcaatcgccgtcttcataatctccggcgactgaaatcagtctggtaactatttgaattttcatggagtgggacagtggttccgatctaagcgccgatgatgcttcgtcactggcggatgatgaagagggaggtctttttcccggaggtggaccaattccatatcccgttgggaatttgcttcacacggcgccttgtggattcgttgttactgatgccgttgagccggaccaacctattatatatgtcaacaccgtcttcgaaatggttacagggtatcgtgctgaggaagttctcggaggaaattggttagttgtttttttgttatctttgtgattagtgttctaattgatgcgaggaatttctatttttggttattggctcactttaccaaattttggctacttggtggagtttgattaaggtccgtttagtttgaggataggtgaggaatgtttgtgatgatggtaatctgaaggacactctattgatcactagatttagtatggatggatactttggtggagagaaaacaaagatatgtctattgttagataatcattagagtctctgccaaatggcagagaagactcagtggagtctctgtgtgtgcctaagtattctctgccttcagatgtttattcagtgattgtagttttcatattaatcgagctctcatggctgtttttgagctgtttcagctgctccgcatgttaaggaaacttgaaagtgtatatagatgccgagataaagcgagctatccctgtgtagtttctcggggtcgtagcgaacacaataaattctttacaatgttgatgtgcagtgaaccagtgaaaaggctaagtccaatgcgtttagttgtgtgttagttttccatgagagaagtgctagtagcttcctttattaataagctttgatcttacaggaggagctgatcagttcaaatagttgttattcttgaacagaatgaaaatctggttaggttataattatgcttgtttggtgtatttgttttttttttcagtctctacatgcacggccaaatattttgtctattgcttttccgcatcagtaagttggagataaattttgtttttggtcttatattgtttcttaattaatttctcggattctgcagccgcttcttgcaatgtagaggaccgtttgctaaaagaaggcatccattagttgactctatggttgtttccgagataagaaaatgtattgatgagggcattgaatttcaaggcgagttgttgaactttaggaaagatggatctccgttgatgaatagattgcggttgactcctatttatggagacgatgatactattacccatataattggaatccagttctttatcgagacagacattgaccttggacctgttcttggatcttcaacaaaagaaaagtcaattgatgggatatactcagctttagctgctggggagcggaatgtttcccgaggaatgtgtgggttattccagctgagtgacgaggttgtgtctatgaagatattgtcacgcctgacaccaagagacgttgcatctgttagctctgtgtgccgcaggctatatgtgctgacaaagaatgaggatctttggcgaagggtttgtcagaatgcatggggaagtgaaacaacacgggtattagagactgttcctggtgctaaaagactcggttggggccgcttggctagagaactgaccacccttgaagctgcagcttggagaaaactttcggttggaggttctgttgagccttctcgctgtaattttagtgcttgtgctgtcgggaacagagttgttctgtttggaggagaaggtgtgaatatgcagcctatgaatgatacctttgttttagatctgaattctgattaccctgaatggcaacatgtcaaagtgagctcccctcctccaggacgctggggccacacgctcacttgtgtaaatggctccaatctggttgtatttggtggctgtggtcagcaaggtttgctgaacgatgtgtttgtcttgaatctcgatgctaagccgcctacttggagggaaatttcgggtttggctccgcctctaccaagatcatggcacagctcatgcacccttgacggaaccaaactgatagtctctggaggctgtgcagattccggcgttcttctaagtgacacgttcctcctcgacctttcaatagagaaaccagtgtggagagagattccagctgcctggactccgccttcccggttaggccacacactatcggtttatggaggaagaaagatcttgatgtttggtggtcttgctaagagcgggcctttgaaattccgttcgagtgatgtcttcacaatggatctaagcgaagaggagccttgttggaggtgtgtgaccggtagcggaatgcctggagcaggaaacccaggaggagtagcaccaccaccaaggctagatcacgttgcagttaacctccctggaggcagaatcttgatatttggcggctcagtggcagggcttcactcagcgtctcagctttatctacttgacccaacggaggacaaaccgacttggagaatactaaacattccaggaagaccgcctcggtttgcttggggacatggcacttgtgttgtgggaggaacacgagcgatagtgctaggtggtcagaccggagaagaatggatgctaagtgagctacacgaattatcactagcgagctatctcacgtaaccaaagagagcctatgtatgaaagagaacccagccatagaagaagatgaaaaagggttctcggttaggatactggagctttaggggagagcgactcagtggtgggactttggtactgctcatattttttaagtccttcttcttctttcttcctcattaggaggacttttagtgcttatataatatatatagtgaaaatgtcatctctctctttctctctgtagtgcttgtttctgttgttctctttgaagtttgagaagtgcatttgtgttcatattctgtaaattttatttatgattacaaactttaataagatcctttctcttcttatgctattggaccactattttcatttccaatttcatacttttagttcggagacaaaatgagattattattatttttccattgagtatgatgaatataagaaaattggaaaaatagaggataaaaccccaaattttcattttaatagaaaaaattggggaagaaaatttacagtgttgaaattggttaaaccctgacactagcaccttcctcagtcgcatcaccaccatgtcagagcgcgaccgccgcgaacgagagagggataaggaccgtgaaccagaccgtgatagacgccgaggtagagacgaccgtgaccgtgaccgtgatcgagaccgggaaagagatagagagcgcgaccgtgaccgagggcttagaaacaaaaaatcccgatctcgtactccagaccaccacgctcgtgctcgccacgtgcgctctccggagaggtatcgctctcgttcccgctcgattgaccgtgaccgggaccgggaccgtcaacgacaccacaggcgcaggtctccttctccagatgctccgtcgcgaaaacggcctcgccagggttcagtagacgatgagaaagaaaggaatcgcaaaagagtagtgactgattccgttgacgagaatgcgtctactattactaagaagaaggataaacaaccaagtgatgctgctgataatggcggaggcgaagatgaagaaggaatggatgtgaatgagattgagatgatgaagatgttagggattcctactggatttgattccacaaaaggcaaaccagttgctggtgctgatgttagtggtattagagctgtaactaagcgtcagccaagacagtacatgaaccgtcgcggtggatttaaccgtcctctaccggccgagcgtaatcgctagtcttctcaaggttaggctttccactaagcttcccaagtttttgttctatcaattggaagataggtttagctcctatgtgtagtatgattaaattagataggacttagttcttagacttgttggctgcattagaaaatgaactcatcagcatcttttcagataatggattctaagtactcatcaggttcagcattttgctttctctatattactcacttgttttgcttctcaatctagttcactggtggttgtttagttagatctataccagagatctttgtttcaggtgatatcctcacaagctctatatacagatagttcactcggttagttttgttatctgcatgaagaactattttagttaatccagaggaaatggaaccagtcttgtgttttttagttttcttgccttggcacatttgaatctgcatcttacaagatcaagttgtgcgagttactgcgtaaaaccgatcattccacctatgtgctggtatttaccaataggtctcaactctcaacagctgaatttagaatttacttgcccttggatcatttactctgatgagattaagcagtttcggtttttctgattattaactagaatctttcgtgtctctgcatccagtttttgttttcgcattgatcgatttctgctcaccaacctttgaatatatcttgcaggtccctctaacgctgtcttgaacactagtcaaaaagatgagggctagagctgcatttcccagatagtagttactagttactccaattcttccccagactctgttctgatgtcttatagagaacaaacttgtactctctgaatttggttggaaacaactcgtgagttatttctttttcgagatttaaaaatgttaatgtttgtgtgtaatctcccggctctaactgtcagactatggttcatttgaaatcaggcttattcatttttgagtttttcactaagcatcagaaagaaattggaaatgcgtacttacataatttcattccaaaattatcgttatggtttacaatatcaagcgagttaataaatagaccgatttcaaaagcttttaatgccaaagcttgaggcagatcccagcaggtactacaccatttgtcgatgatctcttactcagtatactttctgagaatgtatccacaagctgttgtcccaaagaagacagatcctccataaacgtctcaacaaagatcttcacaactcttacttctcggtgagtagctcttaagctataccatgtcaagaacctttccctaaaactcttgtctatatgtccttcttcctctaaacatctaatcgtcttaacaatatgacccaagtctttatctcctactccatttgcggcattattgatctcaggtttctcgttcaaggatactgttcttgatttgaatcttttattccctccttgctttcctttataaatatctctcttgcagggtgttacaagcaagtctcttccatctatcttgtttgctttcctctttacaagcctctcttcttcaagctcagattctacttctcctgcactacagtgttcagtgttgtccttgtcaccatttcctttgctgcagcttttattgacattattagattcatcttctggtaaagatggattactacaaagaccactgcttgagtttgtcaaagggctttgctggtccccagcttcatctccatcatccttcaacgttgtgaaccgaagctcagactcatctaagtcaccttcctcgttaaaggaaaccactctgagacagaactcggtgtcgggttcaagtccttggatggcagacgtcgtctcaggtagataaacaacacaattcccctgagacgagcattcttcgtccttcgactttcgacaaaacaacctgaaacctgtgatcttgttttgtgtagaagaagacggctcctcggagtctactctcacagtgactgatcttgcttgaatctcttctactctcacggtcatcttgtcacctaacaggaactaaagtcaacatcttcggttttaaaaccaaagtaatgtatgaacacactaaccttgtcctgaaacagattctgatggtgagaccactttgtccagagcttccattgcctgagaacacagcttctggacatgcacacccgaagaaagtctattgacgatgcctcgagccatcttcatggcccaacccgacaacggacccacatcaccttcgagcttcttcaccgcctcatccataagttccaacagattccgatacttcgtggtacctctcaacagcttctgtcctaaagaaagacgataacaaagtacatccacacgccgcgtctctttcgccaccttcacttgttttctccagcatctgtaagcactcgcatacacacacattacattacattctcttttcattgtagtatatccatagatttcaatatctaaagatccttacccgagcaagtcattatctttaccgcaatacgcgcaataaaacctaccatcaagatcatcactcccaatcccatacctatcttgcttcaaaccacattccaaatgacaagacgatccacaagcatcacaagtaagccataaactaggatccttattatcatcaaacttttgacagatgcagcaagaacaccttctgcaaaacgtatcatcgcatccaagcgcagctctacaagctaaattctcacagcaaatgatgtaaccgatcatcttcttctccttcttcctcgagtttctacggtcagaacaagaggtctctccaagaggacgagacacaagattcagaagattctctatgagctttggtttgttaagaccagtgtacttcctttctttacccatctcagcacatatgatcttcatgatctcatttctgctccatgaattcaaaagctccgaagcttcttcaggctggttagacaatgcgtggatcaattctctcctttcacttacattcaaaacgtttggtttacaagtctcaatgcattcattatctgcaccataaaagaccaatcctttagccctagattctcctcaagataaaaaggagaggatcacagattctgactctttttggggtaaaaatgatcaaaagtataaaactttgaatgaatctcaacaacccagaaacgaaatatcaacaatgacgacgaatccaatgcgagaaataaaacgtttgttgatattgtgtaaaaacgtcgtcgtgttaacgacctaaaacgcatgaaactaggaacagtgagagagacgttcacgtcgagaaaatatcgtaccttcaaacgaagaagaatccatgttctctggacccacattaccatcgaaacgccagatctttgagagctgccgagatccgatttcacacaaaaggttcaattatgtcaaagttaaagcaagaaccaaaaaaaataaaccatcacaacaatctgacaataacacttaagtacagacaaaaaaaaaattctcaaagatgtaacacttacgatgatgaagaacacaagatcgaaaaaaaaattcagattttatcgattttcattttgaagttataatctttaaacaaccaaagagaaacccatgaaatacactttgtaagaacctatatttgtaactattagacaaaagattcgaggatgactcagtcttaagaacaaaccattgagaattttctttaattaaaataaacaaatactcagagagtaaatatatatgcaaaattagaattggttgttgttcaccgaatgagaagccttcaaaaaaaaacagcatacaaagaatatttatataaaaaaaaaacgctgtttaccgaagcagcttgcattttttttttgtttgtcgttcttcgtgttcttcgttttttttctcttgatttttttttttgctaggtttattttagagatcttttatggggatttagtgaaaaaggaaaagatgtttctgtgatggatggttcttctctctctctctctccttttgttttttctagatgtttctaaggaggaaaccctctgatggatgaaacttctgctctgatgagagcttttttttttaaagttctttagaattttggttttgtgtattttttaatattaaaaaaaacgttggaaatatcttcacgtgctttggaagatattatatacgcaaatgctttgatttgacctgtaaccaatgctggacttattgtatataccttttctaggatgtcgcttatgactcactactatatgttcgaaatattacgatatgtaaaatcatttttatttactatcataaattttataaatctttttattgaatttaatagtttgtttatatacaagttttttttttttttttttgaaaatattattttttcttttataagaagaggggagaagagattatgataatgttgatatggtgtatgaactatcgtgtacaaacttcgagtaagtcttaaacaacaaagttattagtttataatttcagaattctgagtttagattttgtgacaagggtttttagtttttgtgaagtttacaaaatgcagatctcttaaaaactttcacatatttttgttttgcatcatctacgttaatttgtgatgattagtagtattttattaacaaagttaaacatctagtattagttcaaattttcaaaatccacaaaacgttaacaataaaagaaggttaatattctatatatagattatcatatgaaaatgagaagttccgttagattaaattatgttttctaaaccaactgatgtaaaagattttcttaaataactgattactttagttcatctttttttgttttttggacatctttaaatcgagtagactcgatctatagtcaatggattttttaggtgaaagtttactagaggggataacgcttaatggattcaaatttgggtggagaaaacggagtcaagtaaacttaattcatctttaaaatttagttcatctacaaatactttaatagtacagtttagtaatacaacttgtactagacaagtactaatatagccattaacaattttagtttgcccatgaagacggtcggtccagataccaaaaaaagcgatttgccaaaagttttttttttgaattagcatcccatgtaaagaatttcttcgactaattcttttgggacgagtgactttttgccaaaagaaaattaagaatccacattcgattaaaaattatgttagaattcatgaacgagtgattatgacaaagatacatgcaataattgtaacttaattttgtaatagaattccataaacattcacatgatatatcttaacccaagttatttcaggttagtaagttgtattgtggatcaaaagaggatttgactaaaatgtgcaaaatgagcattatcatgtaaagagacgggacagggtgagaaggggtggtggaggtagggctaaaccagttaaaagtccgcatatttttagttttgacatgttcgatctaagtttttccaactgaataattagagtgtttggagttagggtttagatcataatttattgtttagatataaaaacaaaaaatcatcaaatgaggaagaagaacaatgctattacatggtaaaaacgtaaaaatccatatgaagtttgtaacatatataacatattcaatgaaaggttctaatattgtatcgttggccttcgtggtataagaaacaaataaactgcgctagagcaaataagttagagaaagttcacttgcagtggcatttgaaaacaattggaagagagaaatgtgctaacacttggacatgaagagaacatgaacgaaaaggaaatcatgaaaaaggttaaatgttagttactaaacattatggatgcaattatggtttttcaaaagtgttttatgaccaactaattgtatattcgatcttgataataatttgtgtggtctcgtaaaaatgtgatgaacatttatgatgattgattattgggctagtgtaaatcaagaaacgggcgttctatcacgttgattatttcagtaatctgcagaaaatagtatactcgtacacacacacacactcaacgaaggcaagatatgaagatttgtgtttatcgatttagcccattgaaatgaacaataaagggagaatataagagagacatctataatacttattaggctacgtagatgttgtcaattaattaactactttggatatatgattacttctttaggcggctaatcgatatttaatggacctattatgttcttttccttgacatggtaatcaatttataccgcagttcattactgtatttctgcattaattaccattgcaaaagctaataactttcttttttataaaaaaaaaaagctaataactttgagtatatatagtcttcatatttttaactgtgctaacaaacaaaataaaatgtttctctctctgttttcagattttgacatctgaagtttgtttttccgaccgcaacgacaacagttattgattcaaccgtatttgagctgtagttaatcacattgaccatatttcaacaaccacaaccatttgatgatttttttttctgccaaccacttggtaactaatttaccaaacataatgttttaccgcaattttgtcatcacataagcagaaatagacaaagaacttaaggaccagctcagtttggcatatatcaaaattgttgcaataacaagcgtaacactcacaatgccaaaaggaacaaagaaaaacacaaaagtatattaactgtttattaaaagaaaaaggaaaacacaatgtatgaacaaatacatacacgcacataacatgtatgtatagtcatagatatactaataatcactttgagcagatggatcttgttgtgcattgcattgagaaaaaacaggcctacgctggcctttttcttctagggtaggaagattttcgttggtgatggtcatcgtggtgcattggtttgacatcttacgctaaactgttcgtacgatcttttggacacttttacatctaccatttctcctctgtcaaaaataaacaaacttgaccacaaaatatacgatttatcatcttacgtaatccaaacgaattatcattttatctaattttctttcttctaaaggcgcctttatttggataatatttcgatgcataaatgtcagacagaaatacagttgcaagtagtcgtattcatgcggcacagcggcagttgctagtcctataatagtagaaatttagatctaagagtatacaaaaccaagcctctaagaaagaaaaaaacatttcgtgaacaaaacaattttttctttcgcctttgtgttattgtgtacaaacgaaaatttacgaatgttaggaaaaagaggtctaatcttctaactgatcattctgcgagcgtattagtttgtgaacgcatcatccaccgttcataagcgaagtattattccctaaccattttgttatcactgtatatttggatgaaatttgtaacgtagaaagaaccagatgattatctctttctccgatcacgttgcgaaaaatattgatgaatgaaaagtttacttcataaattatacatgcagttcgagataatacatttgcaatatcagatacaatagtatcaacataaaaaaaaaagatgacgaaaaacaccgtggagacgatacttaagttaccgaagattgtttgattttcgtttattcacatgcaagcagtttccatcttcaatcattcatattgtccacacaacaaaaaaaatgaagaaaaatgaagaaaaaagtaaataaaagttctggaaagtaaaaaaggaacccataaggtcattaaacaaagagttagtactgtcagatccagcaaaattcgtggtcagcagacaaacgtaaaagtgaaacacttaaaaaatattttttttaaactacttaaataatctaagaagaaaatatctgatttcttcaaacagagccttatttttttcctacatatttattttagttctcactaagatgtgaatactcattccaacccaaaaaccggtgtgtgcaaaacagagagatttgattttgcagtttggtaagaacttgaaatgttgttattaatccagtttatgtttccaccatacccttcgttaccgttactcattgtagttgtcgaggacagcggaattgctgagaccgggttcgatgcagcggaatgattgttatacccatcagacccaacaaaactaccaccaaagttgttttcaccttcctgcattaccggcattatagcataaccaggagaagggttatgaagatccgacccaaagtttgctaatggtcgcatttctgctttcgggtttgcctggaatccaaagatgttggaccaataatgatcagccgggtctggtttgattggtataccagtgtggtaaaaagttcctccatggtcattgaccggtgttgccacattgaacgtgagggacggtgtggttagagatggagagtcggatggagaaagatcaacggttttgtcagccgctgcggttgctggagaaggtttaggcattagtccacccacagggagattacagctagcaattgatttgacatcatatcgactgatgtcgaaattggtgactgcatttagaccgcggaatttgatcgctgctatatcataagcttctgcagcttcctcttgagtgcctgaaattccgcatccaaatacttttgtgttaaatcataatcataacaattatttagatcagaattcataaaaatattgatacggactcactaaatgtattcataaaaatgttcaaatgggactcactaaatgtgccaagataaaggtctttgttgcctgcaactcttccaattcgtgcctgccatcgaccatgctgatgatgtctgcattattgcaataaagttgaatcattttattaggaacatacacattaatttaatcattaagaattaaaatcaactggttagagaataaacaaacctagtgacgcctctgtacatggaggcacccctagagaatccactgcttttcctataatataaaaaaatgtattttggttaacaaatagatttgattttcgtggaacaactatgagagaaaaaaaacgtatctatctcaaataaaatgattaccgtcttaaagaagcaacgaactcttgtcgagtcatgtgtttcatttcttcaagttcagattcgtaatttgatatctaatacaagtatttagccagataatgaatcaactaaaatacaatcctgacatattcagacagacatacaaaaatgagagacaaaattaccgggaaattagtcgtagttgtaggaccccaatacttaagagctgcaaggtcgtaagctctagctgctttatcttccttatcataaccacctgaacataacaaacaatttacttcatattaatacaaatttaaatataaagagaatgataacgtttcagaagggaattaaatacacaagaaagaagaaagagatgaaataaattgtttaatagagaatttattggaactcacctaaataaactgcagaaacaattaaaaatcatcacaaatttcagatcgtccacggttgggtaatcatttcacgtcacagagacaaaacacaaacataaaaaaaaaagcgacgttagattttgccatgacctctcataagtaaaaaagtgaaagtaaaaaacataaatacaataagcgcattatagtaaacatcaaatgaatcagtctaacacgcgcattttaaagacgaaaatgtaccttgtcttccttttctgctttggccttctcttcggcaactattatcccatagatgagcttcgtatcttccagtccatctatgtctgttatattaataaaaaaaaatcaattataggttttcacaaattataaactcatgcatttacacatgagtttatatgttacactatcgtctaattaattatttaaagtaaacgaataatttggttatacgcaccttgtgactcctctataaatcgaggtacgttgtccaaaactctctacgttcttcttcggagtaggcgaagcctctgagacagctagaggattcggttgttgtttatgtacgctagagacctccgacgagtgtccaccggagtagtttcctaggaagctagcggctattgacttgagctcagagtcgtagatctcggcggcggacggaggatgaagcggtggctgtaggtcggaagagaagacaacgccgccaagagattgcacttgttgcattggtcttgttgtcgtcgttgaggctcctccgccgaggaagttctcaagtttaggaccgccggggtatacggaaagaaccgccgtggcatcgctgggtgaaactcccggtgacccatcttgccgttcgactgaaaattgttatcgtttacaaagggtattgaggtaattagtgttttactttgaaggagacaatatctagtgaaagattctataggggaaattaatagatactatttaattttataactagatcttatagatacaggattcactagatttgactgattccaagtacaccgaatcgaaaaaaatgatataagagaaacagaagcaattaattaaaaattgactacttactaaatctaaagtaagcaaaactttaattaaaccaaaaaaggtaaggaactggtctaggtgcaacagaacacaaagttggtctgtcctaattcatacaaaatttcaaaagacaaaaacactaataagttgagagagagggggagagaaagaaaacctggagaagtggagaaagcttgaaagagagagaggtgagaagggtgaggatgatgatgatctgatgtggaggaagtgagattagggtttgaggaagaattgaagttgttgttattgttggagagagagaaagagagccagttctggtgggaggaggatgaagaagaaggagacaaagaagaatcatagctagaagaagaagaagatttgttgttattgttcttcatctttgggaataggtttttttttttctttggggactcgtgaagtctttggatgagagagagagaaagatctctggtgatttcacgactttggaaatagtggaaggtctctcgtcttttaactccttcctctagggtttgagagatagatagagagagaaagagagaggacacgacacagatatagaggtcaagatgagagagacgagtgaggaaatgtatatgagagagagaacacgagcgtcgagactctgtagtctatattccaagctaaataaaattattttgataattttggttagaaaatcacatgcagagactacgtataatcaatactagtataaaacaattagaatgtcggatgtatatatttagctaatgatagatctatattaactagttttagtatttaacacaaaaaatacttaaaattaacattcgcacatcttttgttcttcaattaccacatctcttccacttaatctgaagtttttattcctttaagctgataataaaacataagaaaatcaatttatatcagtgttgtcaccagctgctacaaaaaaaagtcacatatttaccaaagaatgtaatgatgaaactaaattatttctcaaaaaagtgtgtaaaatgtataatgaaaatagtagagcagagagagagaggaagacagcaaaagggcaagtggaagcttttgatgggatgaactgggcggcgactgatctcacgtcactttcattttatttttgatttttttatttcattgtgtatttctgttttgtgtttctttcttgcgacgtggaaggacgaacggtctacgtattataacacatacggtgaatcttttgaacatttgttttttgtaagtaaatatatttataaatgtcatgcaagttgggaagcacttccgaaatagaatccaaatgttattatcttatgtaaatgtagcattatttgcagaaattttttctacttcataagattaccaataccatgtcaaattaaaccagtaatcttgattatgggtcttattgtttacatttcctcattgttgtcgatgaggcttagcctcgatcctaggctaattttttaattaattgtggagtttatatatatagagcttaattattactacaaaatagtgcaaggaaagtggaataattggagatggtccaaaaaggtgacgcgtgtcccctctgttctgtatccaattattacaaactttggccttcctcctactcttttcgtcattctttgaccactccaataccatttgatattttcatctcctttttaaaagatttatatgagtaattttggtactttttcactacattctacgattcataaaaataaaattgtttttcaaaaaatgaaaaaagagagacagaactcgagcgtcttgtggattcgctattcatatgaaagctttggcgccaatttccattcttttcatcaccatctgcttttttggggttctttttttttgcaatgatgttgaattgttaataattcggtgatacacatatcgaatttaagaaagcattttacaattttattataaataaacagaattcgccaaatctagcttttgtcgtggcaaaacaaaaggttggtcggtataaaacaattgtgtttctcggaataattgcttatgtaatcctttgattaatctacatttatgttacttccgtttctttttttccgataaatacgtataagacaatactttgcaatgacaataatttatttgatataaatctctaagtatattgaagaaagttaatgcactttgttttaccaaattttgagtgccacgatgtactaatgcagcactgtacaacacaccaacaaaccaaaacaatgttttcttcctatttagttgtggtttagcaacatatgcacgtaaatcacgtatagttggtacgttttcgaagctttccgatgcaccgatgagtatgaccgacaatttcagttgaaactatagcgtttaaagtttagcgttcagagtttgagtcaaacgcgtgggatgaagaattggtgagatctgttaaaaccagtttgtaagctattttaatcacatgtttggaccgataagaagaaatatagacgaggtttaattatgtatgtatgtggtaatggcgattggcgagcacatggtttgcatgtaaaccgcccacacgtgtcagctaccatgcacacgtgtcatctgcatgctgcgttatcccattgtctatctcttcaccctgcaccattatcgtgtttttaccaattatagtatatgcttcctttcaattattgtgttatacgcatcgacattgttttatacaccaaaatgcaaaaacagtcgtctatacatgtcttcttcttttacttacatatatgttctattatatataattttttcaaattgcttgtttaagatgatcatattgatatagtaggaaatatgaatatatcatatgttgatggatatataggtgaaaatacactagatataagaatgtaaaatattaacatcaattatctccttctgttccaagataattgatgttttgggttttgcacaaaaattaagaaaaagtaatttttatatttttaattatttttttggttagtttaataatattaatgttatttctctcctttcactattggttacaaacaaaaatgataatgatagtttttcaaaacatcaattttgatggaataagtaaaaaaactcaaaacatcaagtaacttggaacaaagggagtaacactttaaaagtttttttaacaagaagaaaagaaaaaaaattaacactttaaacgtatcaacaaaataagaaaaagaagaaaaaaacagtttgaaatgtaaaatatatgccagcttttaaagcacgtatttggtctccaggtcgcgtcatggaattcgttgtatcacgtgttaaataatcggtagtctttgtttccttattatcattttgttctattacatcatagtataatgctaccttttccactgaaagcggtcgagggcagagggctggagttatttaatggaatatgcggtcaaaggatgtgaaaccacaagtttattattatgattgttgaacaacaaaactaatataagttgaacaagattccaaaaagagggtcacggtggatggatcgaaagtaatggcatcaaaaccggagtgggtgtagtgtagtttacttttggactaagcaactcacttatctacgaataattattatgtagacagtagacttatctgttctgattatggtaaaaaaaaaatggaatcaatatttatgtttagtataatggtcacacacaaaaaggtacaacaatccacttgatttccatttaatgaaatttatcaaaagaaacgtaatttaattatctatttactcaataactcataacaggttttacacagataatcagagatgtaaaaattaaacaggtatttaaaattgagattttgggtaagaaaaaaccaaattgtataaaagtaatactacttcataatacatatactcaaaatgtcaaatgacgacactattagtatgtgcatttttatcatatggttatatctcttttcttgtgttttttttttgtattttgtatttttaaaaatttgtgaagttgcgtttcagcttgtgatagttttaggtagagaaataaaagatatgttttaaaaagaaacgaggagtaataaaacaagtaacaaaagccgaaagagtactaaaaagataaaaagaaaagaagagtagaaattacaaagagttcggcgccgaaatatattttatttatttgactaccatgcatgttttagatttcaataataattcatgaaagtacacttgcatttttgttaatatatgacacacgaaggtaactgatttaatttaaccgagcgatggaaacattgtgccaaccggtccagattcaaatgcgggtcttcgtataatcgtatcatacaatttaaaaaggtcgtctaaaaacactaactgaatagtgtgaaaaaatacgactacagatataaacaaaacaaaacgaaataagaaaacgaataaatgggtcggattttgaaaagctacatcaaatcattccccacgttcgctttgtcatcctactattttgttataattgcaaaattgtgaattattgtatgacaatactataatacacacaacacgttcagttttgtcttttttttttttactctgaaatattttaataataaatacgatttgctgcttattggacaatgaaataggcgtttgtttttttcttcttcttcattttagtgggagctatctcagtcgttcaaatatgacaatattttcgttggctgaagaatatccaacggctacaatctcttgtatgtttggtccagtgtatcacagtgcacatgagctaatgcagttaagcccgacgtggtactggtacatctaatttatttctaaccgccaaccggtttatattataagctctttgctattcagtaacccaagttgataaagctcatgtcttttttttgtcgaataataagcttactaaacatgatttgttatgtggagatgaaatatttggttttggataacagataggaaatgaatatagccaaaaaaattaattgggggcatttcatgaaatttatagcaaattagtattacggattttattgatattttcatattttgacatatatgccagtgccacctctatctcatatttggattggatctgcccaattgagtatctatatgggcttgagataactggcccagcaatacaataccaataaattgcaatatcaacgctgcaacgctgaaagatgactagtaaactattaagagacccactaaagattaagaaccaacgatccactaaaatcaaactgtcaaaatgaccaaccgaaatatttaaaattaataataaaagaataaaatataataaagatttagaaatgttgatatttgtcaattatcttaatttaggaaatttacttatatctttaaatatattttgtgtatttatgcttagaaaacttaggttaatcaataaaatgtattttatttttatacaagagaatgtaacttgtgtcttctacaagactacaacatacacctacaagctgctaatctatggtttgattggtaaacaaaatggagtaaaagtaagagagagaaaagctgaaaagagaagaaaccaaaagtttgtgtgctagtaaaaaattactctgtttttattgtattagttgaaatatttttctttttctttcaacttgattgaaaattgaaatacacaaagcataagtgagagtaactaataaattacgccacaatgtttactctaattggtactaccaaatcacccgtatctatttgctgtctaatcagaaaagatgaccgcagaatgatataacattcatggtttgatgattgaaacccattttcaaacaaaacaaaaattgatttgatgatcgatccacgatattttagaaacaatgatttacgttcattccataattcccatttcccaaagatgaatgccaatgttgaaaaataattttgccatttcttcattcaaaataaaatacaatcatgaaactacacctaatagtactattctgtagaatttaataaaaatgttatttataatttcaaacttgatagataaaaattaaataaggcagaagaatatgaaatgtttatccaatattcggataactttagatttagtcaaattctgatactaatttttgatttgcttcctgttgctaactattaatctggtacaaaacaatcattttagaaaagattgtttcttgaattccgagatggagaacccctaaaccattgccgtggtgacgcctttatcaatctccgatctttcgaggaagacgacgaagaagaagatgagctcgacctgtagtcattaaacccctcgaatctctccaagtcatcacaagaatttgaattaccgtcacgagcattattattatctgatggatcatacgtgcgaatgtgtatataagagatgctacatatatataaacaatgttcttaaaaaaaattaaaaaataactaaagaatcacattgattatactggtaactatagcttagattatggtttgcataatgacaaaatgattacataatcttttaccaatcacaccatttctacgatatattgttcattgactatgcaagattaatgacaaaaatctagatacttctgcaatttctatatgtgactcacaatagacgcaacttttttaatgactccgttattcattccgaattttacttttcacattccttcatttcatagtgtaatcaatcaaaatctaaattaatcataccaactattataggttagacttgacctctctatctatcttgtgaaatctccaatagataaacgtaacgttttaaattagttacctttattaagcatgctttggctcgaccatctagagaaatatctctttcgaagattcttccatctccaaagcttaatattcgccggaaatagagaatgtttattagaatttccgacgactgagactgagggttcagggaaaccaaggctgagaaacgccggaggaggagtaatcggacgaacgttttcttccggcggagggttgatcggtgttcccggctgcatctcccacttaaaaggaactccttcattgagactacgatgatgatagtaatagaacaatctagaagaaactcccaccgatgagcttcttgagatctctgattctctcttgcatagatcattctccattaacaataatgaagcttttggtattggagttatgttatcgtattcttgattcatggtgatgttcgtttgagagaagagaaagagagaagattcgtgagttatggagacgatgtatagtgcaaatatgtgtatgtgtatatatattttatacatggaaagagagagattcttgcccgggaaattgggtgtaagaatggatataattgatttaatggttagaagagttgactatgtgaatcttagacgcataatgtgttgtgtaatacatgttttgataataatgtcttgttcatagtattatataataattaaagggtttgactttatattgtacatacaaactttatttctctcgttataattaaattatgataatacatcaaaatttatccaaaatagtttttagtttaatgatttcatcgatttagttgatggataagatcgatttatatttagtgcagatttggttgataccgcatttatgtagcgaatccgatatttattctaaactacgattattttccaaaagaagaaataaaccataaccgtctaaacattcattgtatgtacacaccaagaaaatatttatgtaatctgctatacaaagatagttttaaaaatgttatttttggaattagccaaagaatatttgtttcgtgattcggttgcctattgatttttctaggttgaaccgggttatctgtaaaacgatgtctaaaactaattattggaacatgttaaaaaagctatgtgttcttgtcatttaaaaacattcatagtggccaactacaatccctatttgttagatctatttcttgatcattgtaaccgaattatttagagtacataaaaactaaaacaagggtggtttcatcgatttagtcggaggattagactcattttcgtttgtaatgcacatatgattgttgccattggcaactacgattaaagaaacttaattatccaacataagaaatatatcatacctattaagaaactgtatatgtttttggtttataaagaaagcttttagttttttgaaaatttccaacgaaaatattatatttcctttatatagatgtagctagatattaaaatctatgtttactttaaaatgaagcacacgttagtacagtcttaaggacggggctgatttcatatgcgcatgtgatgaggcattgtccaatcccttaagagacgccaaactttgcgtactcctcaatttcatttcgtttagttctttactttaacccatttgtatgaatcatcgcactaatcacgcaattaccacactcaaaccccgcttttacgaatacatcgcattaagtctattttaatgagaacacctattctacttttactgtttgttggtcggtaaaagttgatttccttgtaaaaaagtaaatacgacttgaccaaatcagacaccccctagtatctatcattcagagttatgaaattgaggaagttcagtaaaagaagtccataactcacttcaattgtattggaccgacctaagcaatcaaatcatgaaatggttttcaaagtgatttgattagtttggttggaacttggaacaatgaacatggtgatctctatgacttactgtatgattactaatttcatacttatactagacatgataatgtaattgagactacgaaccttgaatttttggcgttagacaaccatataataagattatgatatcccaaaaggataaaagatctctgatttgtcacaactaaaagttgaatatacatcacttagatatccaaggagagttttggtggtagtgaatacagtactacgactacattttgcgacaagtctcttttagcaacttggatccactgattttgagctcctagacattttcatactccctgtagagatacattatataaatacagatcaagcaagagacattactaatctttttacaaagaaaaaacgtacaggagtaattaaggaagaggaatctataagtatacctcagctgccaacgaagctacagattccctgcaacaagtttcgccactgttaattgttttgcatgatcatctttgtttaagccaaatcaaagaatataaagtgataccttcgctgctctgattttgggagatgtttcgacattatggactcctgcaatagaatttctcttgtcagtttctcaacagaaatcaaaagatatttccaataagtgtagtgtttctcccaaaacataataacgtagagaggaaaagagtctctgagccattagtaaagaaaaatgagaaaagaggacctgttcttggattatgcttcttgcctcgacaagctgagcttcgagttcaagctctctctctgttgcttcagatgtaacagatgctcttttaggtgcatcttgtaactggaccatgctttcctttatttttatgtccaaacagcaaaaataagttaaccacggatacaaaatgtactttgttctgtaaatgcaaaatgttgttaagaaaaaacctttatggaagccatcttagtacgcaaactttcttctatttgacctctagccatccggtaaggtagatcaaacacgtcctgtgtaatgactagttagttagattcgggggcaatccattatataagattataaagaagaaccattcagtgatctaagcttatgcataccgtcttcccacccagtggagattgtgaaggatcagcctcacgtttctcacttccagccaatgtagctgacccatttggagcatttaagaaatcacgcatatctgtctgcaacaaaaccaaagataaaaacttttcttatgaataaaccatgttaagttgcttacgttaagcttagtatggaaatagagcgtacctgcatggatcgaagtaatgctcttagactagtgttctcagccatcaattcttgatttttcgcttcgtacgcatccacctgcagggagggaattagtaagtaatgcccttttgaaactcagcacaacgttattgatatgtagttagatgcttactatctttttatagaagtcggtatcagtcttcttgccattccaggtaccacgttgcctcccttctttctagtatatacatcagataatcagtcaaatagaaaatcccttgagtgcaaaaaaccaagaagctggtaaagaacctgtagcaaattcataatctccattccagatcttgattctttctttttctccattaacacttgattcagccgttcctacaagagaaacaaagcgttcaaaatgcagaattaaacaggatgcagaaaagctagtttcacgagaaaaagatacaaaacctgcaacttaatgtaatccttctcctttttcttcatttcgtgtatctgttgagccttcacttgctattcagaaataaaagaagaaatgcagagaatccatcatcagtacaatttcctctaagataaagtagttaatccaagagcaaacacaatcagacctggttaccaatcaccatcctttggaattcatccctctcctgctgtaacttttcaatctgagacttcaaagctgcagtgtttttggcttcctgtcaacacagtgaattcataatcaaacaagagcctaagcgaaaacaatttcagctgaaactttataggactcacggttctggtaattgttgcaatttctctgtccttctgttggagtagcgcttcaagcctctcaactttagcttcaagtctagctatatccgattgctgtctacacacagtaagggaaatgcacataaaccacaaggaaacattcttccgcaaaatcaaagtagataaaactgctacaatctccagaccaatactaatcctcaaagaacaatttcaattaaccacaatgcaatgcaaagcaaattgaaagaaggaagaaaaacaaaattcacctctgtctcagctcattagcagattctctaaactctatatcacgttgtcgctgctgcagcaacgagtacatacaattgcaggtccttgatatagaaacctaaatcaaacaaaaaccctaattaaaaccccaaaacatccaaacaatttcagcatcaataataagaacctacaggatcattcgaaaagagatcgagcgaggcgggaaatccaaatgtaaccatcgtctgattcaaatacttcgtacaatgctccaagttatcctcattcgcaaatgtgtaatcccttctcaatcaaaaaaacaaaaattccaatcagtactcattggagattttaaagtaaaccctagggggattaagaagaaaactaaccctgctgacgcagattgagataaaacctgtgaagaagaaaccatagaatcagtcaatggagcttgaaattgaaattcgatgaggaaaacaaatcggaaaacagtaatcttactttgagatcgtattcagcatcattcgccggcattttcgaaacggcgatgagagcttccacctccggcgaaaacggcggcgtgagcaaacgatgaaacagagaatcaattcacaggaacagatctaatctaagcagagagagagagagagcgaaaacaaattcaaaaatcaaaaatatctgaaacggaatgtttctggagaagagcgaaaataaaagtttttaaaacctttttcactttgctttttatttcagtaataataatcaaaaggatttgtttttgtgataatgagctttaaggaaatgatcctgtgaagagacacctactggcttcagtgctcctccacgtgattttgacgcgccaactgtttaggctttaagagaaggaagaatgtgggcccatactgttttaattgggcctattaaggctttattgagctgatgtgtaaggcctgtttagacttgtgctaatgttggatgagcatgacaaaatgattatcattgtttggttagaaacagaccaaaacagcgggtaagtgtttgattgttatttaaattttgattattatcggggagtggaataagcaaacattaacgtatgtctgtagaatcgaaaaaaaacaaaaatcgagacaaattaattagatgattaaatataacatgtagacgtagtaatgtgttaaactatagtcctaaattgagatctatgaaaccgaggtaagttttaaatatttccatgcctccatgtcggatcttcgagtcttctaattcgaatcccgagttgaaatttaaatgtatagagtaaattattgtttgcttcaaacttaagaaaatatgcttcttgtgcttcgttttatgtcttcttgggtttgctttagcttattcacctattgcttgttggatccaccgttaatttttcatttaatagtccatatgaaaatcaacattttagcataaaattacaattttaggcacagttatttgactcatacatgatttacctatacatttggtcactcaacttaattatttgcgattttaaaatcgtgtataatgttttaaaatgacttgaattggaatcaactaattttaggtagctcgaacaaacttgttatttatttattttcagataagttccgtacaccaaaatctataaccgaaaagactttggattatattgtatgagtttagagtgcaattcttctttttttccctcttttttgatctaagaaatttctaattaagttcacatattttcttggatctaatcactctaaacaactcctcccaaataacatgagttttcattattattagaggggtgatgtctacattttggaccaaggtctaatactttgttttactttcgtcaaaccgagttaaatccgagaagtatgagatcaaacgttaaacgtattcatgtgtgtgtatgtgatgttacatggataaatggc

SEQ ID NO: 919 - DNA, 83478 bp, Arabidopsis thaliana
tatgcatgtatattctatatgacgttgatgtgtggtcgtgtggatatatgcgtgtgtttaccggttaatacaatttttatattcttcgtatgtatgcttgatgtgtgtattagtgtatgaaaagaaaatgacgtggaactcccgaccaggcgcgagtcaaggaagcgaggcgttcggcgacggcagcgcggtcgtctccgcagcccatgcgttacaatttacaagatctctttttctatgataccttctttcattatttaattaatcaccaatttataatgtctttaattaatttggagttttctagctaattcacatttcttattatattgactctttttcactgtttttatgttttcccatcagctttctttttgtccacgtaaacatttccaaacatttttattttaaaatttctttatacttgtatacataaatacctaataccttgctggtaatatatggtcaaaattagtgaaaccttggaacatttcctgtaacagctcttattactctcacagtcgcagtgatagatatatagtagaataagttagcaaaatacaataattgtaaaaacacatttaatacataagcatgtgagaacatttttacgtgaatccaattgttcattgaataattaaatattaaattgattgttaattgaggattcattgtctaacgagaaatccaaagagcagatgtactttcaaattaaatgaaacatttaagacaacattaaaccaaacgaaaattgaaaaatgaaaaataaaagacacctttttgtttgccacacaatttacgctttctctatctatttatatgtacatacattcactttcaccagaatctcatcaaacacacagtctctctctagcttaacaaaaaaacacgaaacactttgagttccatgtaagcgtccgttgtcttctctaagttacaaaagccctaaaaccctactctcaatatgaatagtttcgagccacaaagccaagactctttgcaaagaaggtttcatcaagacaacagcaccacacaacaacctcgtgacaccacgacacctttcatacccaaaccggcttccaaaaaccataataatagcaactccagctctggagcggccgggagatcattccaaggctttgggcttaacgtagaggacgatcttgtttcatcggtggttcctccggttacggttgtgctagagggacgttctatatgtcaacgcataagcctagacaagcatgggagttatcagagcttggcttcggctctaaggcaaatgtttgtcgatggagctgattcaacggacgatcttgatctgtcaaacgccattcctggccatcttattgcttatgaagacatggagaacgatctccttcttgccggagatcttacttggaagtaattttcctcccctaacattaattttctttattattgtcaggatggccatatatatacaaactatatataaaacgagccttattttaaacataggaaaactatattaattttttttcccctaacggtaaaatactacaaacacaagtttttcaagctgccaagaaaacacatgttctctgcttttctaaaaagacaaatatcaataatttagtgaaatgatattttgttgctatccttattctgtatactcaattttgctggctatagttattttgtttgataccgttatatatctttcttaaaaattacggttttcgttcaatgtttagtataattagattttgaaggtttcgtgatctttaactggcaatattttaatacttggacgttaacgagaaaatttgcttgttgacacagggactttgttcgtgtagcgaagagaattcgaatcttgccggtcaagggaaacacaagacaagttaaaagaaacgagtgaggaggagaaagaccgtttttgcaacgatgtcatacgatgttttgtaacagccgatgtcggttgaatcctaatggcattactgtaaaatcatcattggatgtgtttgcttctttgttcacgtacgaaatgaaaaataaaaaaaaagttgtaatactaaatataacctatttttcttaattatagtgtaaaacatgaaacgttgcagtaacaacacatgttagtgatgcgtaaagaagagagattccaaaccataaagaaggaatcaattcagctataccgacaagaacaaaataagataagccaatgttgaaacttgtgggtaagagtagttgtacaaaaataatttgtttaaacgttgaggcaaatttttttgtttggtctctcgtcatgtcaccacttagtttctttttatgtcttcaatagccagaaaatcatagaacccttgacgacataaagcctcatggcctttgtcatgtacatgccaaaacaatataacaagacaaagaataagcttcatgatttgagtttttatcattaccttgaagacgtttgtatcgtttagttcgaatcttcgaatggaggcaagccccactcttccggtttaaaatcgactagagaggttatgatttgatctgcaacatcttggtgagagatatctagtctaggatccggtaccataaccacgttcctgtagatagacatcaagatgtataaacttgtttctcggtttttattggcttttacatgaagagaaacccacttacattccggcgtttttagcagcaagaactccagatggagcatcttcaaacaccagaaccttttgtgaatccacaggaccgtcctaaggaatccagacgaagaggaaacattagtctacaactcattttaaatatgaactagttagtaatggagaatcttggagactgttgcctgttagttaccttaaatctcctagcagcagcgagaaacccgtcaggagcaggctttccttgcttcacctctggatcatcaccacgaactacgtgatgcatcaatgagaaaagctctctgtgtctttgggttttcagatcataatgccgtgtgtgagtactgcaagcgtacaatcaaacataacaagtcagtttctggattgtaaaggacaatgagaatgcaaactaaatggtatattatgagatgaggtgaagagattacccggtagcaatacatattggaatattctttacatggagatgcttaatgagtctactagcccctgaaaatgtggaagagaattggttcatgaccacatcaaaaacataaatatccgtacatgtaatcttcctgtgaaccaaatgtcatgtgttacaaaaagcagaatctacctggcatgagctcactagtagggaaaaggtcttgcaacattgactctctctcgacaagaaagtcctcagctgaaagagagtcgctaatcccgctttcttcaacaaagatcctggcagcttctattgcttttctacccatcattttagccttgagagaccaatcaaactttttattgaacctagcaagtataatctcttggacctcagtgtaaaacttctcagtatctgcaacagaaaccaaatcagcatgaatgtatgcagcaagagcagataagccaatgaagttgtgagattttgaatacacagaacaaaaactcaatcgctcgatttccgatcagattcaagctaattgctttagcatcttaacatcaattgtatgaaatcaatcctggaaactaaacagtcactactaaaaaaaccatcaaatctaaacaacgatagtgacagtagtacgatctaataaagctggagattgaagatcagatgcaaggagattaccgagaagaagaccgtccatgtcgaatatgacgtgagtgattgatcctctgccggcggtgacggctgcaggattcgacattgttgattcgataccgataacgacgaaccgaatccagtttcagtcggaagttagtttttacgctggagagtgatgtcactatgacgtataacaaaaggttcatgggccgtatcttgtaaatgggccggttcacatagagagtagaagttttgctcatagtgaagagtgctaataagagatgttgaaacttatacattggaactaaatatgtttagtcttcttctatacaaaataaaagtgaagattcgtatacagagcttttgttaatccaaagaccaacaacggccaaaaaatttttcctcttgtagagctccgtcgtgtccttcagatgattcaatggttgtttttagcaacagccttaggcggaatctctcattcttgtatacatcagaggctgaattgatcctctcgaactgcagttgattcctctgccactgaataaccacggaaaaatagaaaacaatcgaagtgttaaagatcttttagctacaagtaatctgttttaactccatttgcttaccaataggacaatgaagtatgttaactagattaattacttatggcacttatgaaggcatgcatcatcatattttgtggtttcagtcattttctggttagaatcgagaaattagctacagagttcaagtgaaaataaatacaaaaaccatatccaccaggatgatcaacactacctattcataaagatattacggccagatataaagatcacatcagcaatttactcaacaaatgaaacgatttgaagatagcaaccaagtgggaaattttcgacttcgtgcaaattcaatgatgcaaagaaaagagaatcagagaacaaagtgagaagcttgcagtagacttaggagctaacaggaatcttttaaaaagctttattatgaataattgaacatagaatgcttataaactaaaaacaagcacatatcacatctaaccaagaggaggaatccgaaaaaataaacctggctttgctgcaacccatctccggatccttctgcaatgtacataaataatggctaatgaacaaatactccaaaaaatccggtgatgcttcgaacaaaaactatcctacatagcacccgagttcacctacgcttgaaccgcacaaatcccctctcgtgtgatcatgaactcgcaagaactcccaggcaaataaggtgaaaacactatgtcaagccgtctcttagcacttctggacacagaacttgaacaattctcgtccttttcacttctatctttaacaatactaccatcacttcgtgaaataaaaaatctggaattcacacaattagcccaagccaagcctaaagaaggaacaactcgtcttccagacgaatacaaatacctcaaattcccaatcctcagcccacttaacccatcagaagtttcaaccaaatccgtaacctgattcgtaatcacaatagccaaatcaaacttgctagccaactgcttcaatttcccagatatcttgaaaaacaaagaagatctcttcttaagatcagacggagtattatcaaactccgatctaaacaatgccgctacagaatcaagcacaatcaacttcaacggaaacctagttttcgaattcccaacaaacccatctatcctaggcattatgtcgaacaggtggtctacagaatggacattttgtacaaacacatgatcacaaggattatcattgtaattcgcgtaaatactagggtttgattgatgaaacgtgtgcgagagctgatggagacgacgaaacggaaatgggaactctgaatggagataaagagaagaaccgttgagtccgccgtgtgaaatcggaagttgggtacagagcgaaagctgaaggcagagctgtgtctttccgcagccactctccgcaacgatttcggttaaagaatcgcaggaaattccgccgcgaagacatccgtcgaggatttcacagcctgtggttagtttacgattcgtcggcgatcgtcggaggagattctccggcttaattttcccattttgcatttcaccgccaaaagctaccaattaaaaaaaaatcgcaaaagttataagcgctacaaaatttaaaaagacctaatcgcgttaaacgacatcgttttatcatattattgggcttcttaccttgacattaggcccaataagttaagaataaacgtctactattgggcttattttcaaaccatcgcattaggtccatgcaggtaggatacgagtaatgaaacaaacgacgtcgttttcgaaagaaacaacgaagatctcatttctctttctccttttcttctccgacgattcttctcagttctcagatctgatcgatttcttcatcagatgtttcaatctaaccattgagattgaatagtcaccattagtagaagcttcgagatcaatttcgaatcgggatcatgtcgtgtttagccctagctctgcaaccagcaaatggatccgacattttgctccaaactagagaatggtttccaccagcaagagccttaatcgctctctcgtattttcgtcaaatgcgtcaagcattagcgtcctcgaagcagcagcatcagcaacaatcgaatcagaaacagaatcaagcttcttcttcttcttcttcttcttcctccgttgcggatcctgacgatgccacggcggcggagtttgtaggtgatgatccactcgctgcttctaatggacaggttattgttggtgttgagagcaagtatcgtgtagtttatagattagtgaactcgatctatatccttggtgttactgtcgcggatcatgataattcgatcaatgtatttgagtgtattcatattgtgaatcaagctgttagtgttattgttactgcttgtcgtggagttgaagttactccggagaagcttggacggaagtatgctgaggtttatatggcgcttgatattgttttgcgtggtgttagtaatatccgtcttgcggcgatgcttggtgctatgcacggagatgggattgcgaagatggttcattcggctcttgatactgagaataagatccgaggagctgatagttggatggctgttgaatcgcatgcggcagagcatcaagcttctgtaaacgcattttctaatgcaagatttgaattgcctccggagactgttgccgctggagatgagttcgcggcgagcttggctccagtggtgcctgaatcagagcaattgaaggaagaaccagagccggagaataaggatccttttgcggctagtgaaacgattaacaaggagaaagaacttgtgggtggattcaagaagactaaggatccgtcctcaacggatttgactttggcattggctggacttgaagtgacgacattacctccagccgaggcaacacagtctacgcacatcaatgtggaaggattcgaagggcagtatggtgggattgagttcagcaatgaacaggctacgattggagaaacttttgaatcgtttagtgatgcttggggaggtgggttggatccttcagagtttatgggaccaaagaagattcagaagaaggaaggactcggtgggcttgagctgttgcacaccagtgatccgaaagcagtggaaggcaaagatggagttaatatcgataacctagttaagaagcctgagatgaaaggtcctgaaatgtatatctctgaggaaattagaaccgagtttagagaatccttgcttgctagagtaggagtaatgggtgtgatctatctgaaaacgatgccacccaaaggctctggtgaagagaaagaaactgagttctcattccgtgttgagggtactactgcagttaagagatttgctatgcagagttctcggatcagtagcttagggaacggtttgtttcacgtgagaactgctccatcagaagaaccaatccctatccttaaatatagcttgcaacctaaactaaccccgttgcctcttagagtccgaatggtgaaacgaatcagcgggactttactctcacttatgatacaatacgtctcaaatccggatctacctcagcctctgaaaaacgtcgactttatcctaaaactcccggttgatcccacattgcttaaggtttcgcctaaagcaatactgaacagaaccgatcgagaactgaaatggcaaattccggagattcctctgaatggaagtcccgggagactaagagcacggatgcctatcgattcagataacagcgaggaagaaccagatatcatctgctatgtgaaattctcggtacagggaaatacttctctgtctggtatcagtctacgtgcagctgctgagggaaatacagatttctttgaggtagatcacaggtacgaaaccggagtctatatgtgcaattgataaaagtttctctctaaaagatttacattgtttataattttctctaatgttcttgagtttggcctttgttgagagttattcttttttttggtatgtgtcatgtaaggttttgtgtacttgtgtatcttgacctctcttcattgttatgttatctgttttactcgatttgcttttacatttttatattattgaaatgcggattacaaaatttaagtttatcaaatatactttgcaaaatggtaaagtggaagattctcctaattgttgtgatgaaagtatcaaaataattgtggtggttgttgaagtacaaaggctattattatgtaaagacaatcacaaacattttgaaattgttgatctctaaatatcatattacattatacataacaaacttaagacagtaaaaagtatagatgttttgattgatcagaacatgtaatatagtcttgagtactaaggttgatatagtgtcataatctagtgcccgtttgcaagttgtcgcaattttttttgatgtaaaatagtgcatgcaatgacctattttttagtgacattaacaataaccactatggttctagtatcatctccctcgaataaggccttaaccccattaaagatttacactatggttttagtatgatctcatctccctagtatacaacacattttgtgtagctttactatacatcatgtttattttaaaaagtgggattgattccacatgattcttaacatatagtcatatagatcttgctcctgtcaattacatgatgcattaaaaaaaatcagctgagtatattaacaattacgaaaaatactaatctcacatcataccagcgcgccgaattaaatccatagaacatgtcattcttaggtcaattatccactatgacatttctttatttaaaatgataatgtcatgtgggtattaagcaccaagtacaatccattcctaactacgggttacaaaattaaaatatcaataataatttacatatttgtctcttatttgtagagtgacatgtctagttgtccagatttaatataataaactagttgattaatagcaattgcttgtaaattactcaaaaagtaagcagaagctgtgggatcctaaacacaaacctctaaagagatgatgaaaaaagagatattgatcaacttggcctaccaaatcgtcaactttaagtctttaacacttcacatttgattaataaaacatataatttgagtgttcattgacatataagaacgtattatattgcaagctaagggatgaattctcaaccccaaccggccatacctaatatatgacagctctatttatcactacacaaaaaggaccaattatttgtttggttttacacctattataacaatcactatattacataaaatggcgagtacatgctatacacgaaggtcagttggagcaagatgtctgaaaacatttttaagtattcattattcaataatgtcttgactcgagaatcatgtgtcttcactcttcaataataatccatagttttatccgtcttgtttatatgcaaaacaatagtagccactgtattttcagtattttagtagatgagattaggtgtttgggttattagcctctttaagactggataacttatgcattaaaattattaaaagttttaattgcttccaaaccttctacaataaacatatcaccatcccacccaaacacctggtatatgtgtataggcaaaatactagtatttaaatattaacatgctattgactaacacatggttatagtttgacaaatatttggtccaaattattttatgcatagtgataaatgctaatggcacccaatgagatccacttttgcatttcccattccccacatagaaaaatcttcatcaaccatttgccttttgaaactcccttttttttttggccaaatcctcttgaacctccttttttaatcactcttctttttacttcaaaacttttctcattgtagcacatttttgtttctttcactttctaacttccgagtttcatactttcatgtttcatctacttgtaacaaccaaaagaagaagaaatatcataacctttgaccattatgttctacattataaaactttaaaagaaaacaacaaaaacacatttcaatcttctctagtcttacaaatgttatcctcaagctcaatctcttcttcatcatgatcctcatcttcattttgactatctattgccctcttctcttgttcctcaacaacttccaattcagtcaaattcccacttccacccctcaatttcccatctttcacatttctctcccctctactttttaaatcctccaacaactccctaatcgccttctctttatccctcctattcttaatcaaagcctcacttacatcagcaggagtcatctcagccttctccacaaccatctccatctccttcaaaacgtcgccgtttatatcttccaccccataccccaaataattcttcaacaaaatcttcaacgatgggaagttacaaaaactcatgtagatatgcatatccattctcccacttctaagcaatgcaggatcaagcttctctatatgattggtcgtaaacacaaagatcctctcacttccacaacaagaccaaagcccatctgtaaaattcaacaaacccgacaacgttatagtattcccattaccaccttcctctcccgaaccacccgaacctgaacccgaaccgtttcttgtctccgcatcataataactccgttgcgacgatacattactactattcttcttcctattagtcaaattaatcgaacaatcaatatcctctataacaataatagacttagaactcgttttcatcaacaacttcctcaactccgagttactatgaacctcagtgagctcaagatcgtaaatatcgtaaccgagataattcgccatcgctgcgatcatactcgacttaccagtacctggtggcccgtacaacaagtaacctctcttccaagccctaccagtcttctgataaaagacttgaccttcagcaaaatctttaagatcatccatgatctgttgcttctttctcggatccatagctaaagtttcgaaagtactcggatgcttaaaaggaacagattcccaaggatgtcctcttgagtcaagagacccacctcttgagttagtataaagcaaccggtcttggtttttccgacgaatctcattagctctctccatgatgtaatcaagataagaattgagtatcaaagttttgtcctttttcttgattcgtagagtgaatccacgtttctcttcaggtaatggtctccaagcaaaagtctgagtttgacgctgtgtaacgacgtgttcccatagaactgtaacgccgttaaaggtgtcgacgattgagtcgttgttggagagaccgaaagtgatggaggaagagttaacggcgcgggttagacttaaacggtttccggctattgagacggaggagcttaagtaaagctgaacggcgttgtagagttcgttggtgttgacgccgtcgatctctgttatgtcgaagtagcagtaagaagagaagacgtggaagattctgttgaagaatttgaggaaagcgaaacggagctccggtgggaatattgattgcattaagctttgacaaaatgctaaaactccgagtagtgaagctaatgatgtccaatactctttcattgtttttgctttgaagttagatcagagcaaaacagagtgaagaaaacagaggatttttgtcaaaacagagtgaaaacagaggattttgatcaaaaacagaggattttggtcaaaaacagagatttattttctagaaggtgagagagatttgtgggtttaagagattaagagagataaaagatgggtttcgttggatttatcgactagagattatttgcaatgaaaacttgagagagaagaaggagaaaggtgaaagctttgagagatcaagaagagagaagaagagaagggtttgtctcaatatataaactttgatagagaaaagaaaatatgaaaagctataatattagcctggtgatggtgaaagagggcaagagggagataggtgggggacattaaaagtgaacaagtgtaaaaataagaaaaagagtatatacaaaatgcaaaattgggatttggagtttatttctttgaatatgaaatgttgaatttaaggctaattagtaatggagttgctggatttgattttgggactttccttcttgttttctttctttttcctaaataatggatttagacttttcctttgcttttttcaagtaacgtctttagactttttatataaataacaaaatttgtaacggattttctagtgtgtgacaaaattgtcatcttttcaatattgattaataatttagtataaatgttttttttttctttttgttttacattttaggagaaatgaagtgattatcattaggcacgcaatctttttgttatatgtctagtaattactgtgtagattgaattaaaaaaaaaacttaagatatccatttaccaaaaaagaaaaatattatttccaggaggtatgaatataaaaaagggtaacgagttgatgtgatgatgtgatagtccacaaaagtgaatgaggttaaaaaagattttggggttgttgcagagtaaaagttatagacaagtacagctaagtaaaacgccccctgaaaaatttaacatgcagaagaaacatatgttggtgtttgtttgtgtttttttcaaaacattacaattttttggagatatattcacgtttcctccaatccaagggaaaccatctactgatccacgtatattttcttttgttaattcgaattgcatatgctttttttttgtgaactacattaacaagtagttttaacacagaacaaaacaagtttttttttgaatcaatagaggcaaacatttcatgtgcggcagttcaaaacaatgcaaataatttggaatagaaaatttaaaatatatgacagtgtgacagatactttgagaacatattgtatgggttggactaattatgtaacgtttattatttccaattttgatatttgggaccccaaaaaaatcgaatttagatatgccaaatatatatatcatagtatcttcacattatcaaaataaaattgacattaagggaaacatgatcagagagtatattacaagacaaaaatcttcatatacaatagtaccaagaatcacctaaactgagtattaccttttttgttatattacctttcgtttacttcgggggtgttattggtttgtgatttatatggaatttttaatgatttgaaatgttgtgaaaaatcttgtgttattcaattaaaattttataagactcttttaaagtttggtgttattagattttgatttgtaaaaagtaatttaaagtcttcataaatcttgagttattagattcatactctaataaagtcattaaaaaatttgtgttattcaactaaaacaaatgaatctatgattgttaatgatttaaattattgtgttactggtttatgattttatacacttttctttacaaactaaaatcatgtaaagtatcataaaaaaagagagattgtgaatgactttgtaactaggaagattttacaagattataggaggattttacaagattttggaaaagtaatcatagagattatacaaaactctctaaaagtcatttaaaatctttcattttatctactttctatatttttttaaagtcattaaaactctttcaaagtcacaatccaataacacccccttcgattcagcgttaaattttttacattaaagagttacgatttctgaaaagtatgcatcggattttcggagaaatatatgggagatattttctcaaactattggaatcagtttttggtcaacgaattattggtatttgaagtttgcaagttatgaagattaaacggaaatgataaaagaatacagaaatgtcaaaggtgttgtaactcatgagaacattaaatattggtcaagatttctgaccttttcaaaaggaactctcgctttcatcgctaaactcatagttcgttcgtatcatcatattaaccatcaaaaacaggatcttggggacttggcctttagacatcaagaatattaaccttttttttaatctctctctcgtttttaggcaagtacaacatacataattagcccatgcatagagttattacttataaggttgcatctaacattttttggtgcagatgggccggcccggcccgtatgaacagtagtgattatttttatttcttcggcatcacaactgttttatatggctcttctatactagaggtgaacaaaggggttcacggtgtcgtacgtttatacagatcgatcgaaccaagtgaaaccaaagtctaaagaaacaaaaaattaatagattccatctaaaaaaaattgggttttgctcactcccttttctttcacatcacaatgaaaaaacaaatattaatgcaaaagtgattcaataaccctacaaaccgttcgtttgggggtgatttttttagcacttggtgaaaaattgaattgtttagtttgtgttttccaaactgataagagctcttttcttgttttatggtttgagggcgagggcgagaccaagctttggtgaagaggtcacagcctttgagtcatactcagctgagaaagtgatgtgcgacttcggtctccattctctctggaccaccatccctgctttcccactgttagaaaatctggtcttaaccactgtgaattgatccacagagtgagagcttccgacggtgaagctgttgttataattggagaagcgacggatcagttctgcaccaaaggatgtggttgggttcactgtgtggacgtaagtagctctcagactctcccctttatcctccctacagtattaacagtctcaattaagccacaaccaaaagcagatggaaaaatggagcatcgtgttgtttcttacagtatgagtgcagcagagacgccttggttgttgaaaccaatccctgcattgtactttgttagtgatgatgaagctgtgtcgaaactgacttcaccaccaaggcaaacattctggcttccgatagttgctgatagatctaacagaggagttgggttgaggccaatgctggaattgagcgtagcatgaggatgaacatattgcacatccagctgaaaacatagcaaagccacaaattactgagtacagaaattaacaaacattagggtataatactcatttctcatatgggctatgcactgaccttgccagacttgtgatcaggtattttgaaactaattacagctttagcggatggcaagagatttttgagagttactttcgtcgacacctgcgtaagatatatatgttcagtaatatggtttaggacagttaaggtgcaaaaaaaatcactagagaaatttgcttacactagagtggctgtcgattttcagatcaacaatggtgttttgacctttatatagtgtgcttatatcgccaaaaaagaaatcatccttcttcaaaccagtagccacaaattcctgtaggaaagaaaataacattgtgcagtataaagttaaataggtataaagcagtttaagaacattaagttaaataggtataaagcagtcaaagagcatgcttctacgaactactgcaaccacttgggattcaaaaagcatgtaataccagtattcataagcacttccctggtaagttgagcatagtctattcaagtaatcttcaacggttcatataagcaaattatgttttcttataagatggattaactccattcaagtaaaaggatccaagttatatcacacttaccgttcctgtagcactcagcattgtgagagtaaacttgtggtcaaaaatgtaatccttgtttaggagatctgcaggttttgaaatacaaatattcaataaatgggaaccacaacaatcacagaaaccaacaccaaagcaatgttgagttacctttggctttcttgccaatatcggcaaacggagctggactgcttcccatcttcggatatagaaaacaaatgcctacaaagtaaagcaaatacacactaatatcaaaaacaaatcacgactattcagaaatgctctgcattaatctaccaatcagatgcttgaagttgtattgatatcaatccaaagcttcaattgcttatagctacagttctctaattccaaaccaaaactatgtcaatctatctatagaatcgaagcaaacacaaatggcgagaaacagatcgaatcgatcgaaaaagccaaatctccagactaattcaaaaactagtccacatgaatcacaatatcccatctcagctccgagaagaagaaccaagaactaacgacaaaaagagaggaagattccttacgaaaatggaagatcgacgaatacaacggaaccgataacaatcaaacggagcttcgtcggacaaaacctaagatactgcttccgtcgccttcgataatggaatccggcgacggcggctgaagacagtaaacactactatttagcagtaaaattaagaaaagagcctcgagaaactcaaaggtgaaggagaagagagaccaacgctctcgatgagagtaatgataatgtcacttgtcgttgatgttcgttaggtcacgctttactttttttttctgattaaagggcttttttgtttattcgtctgtcatttaacttatgtcacagtcaaagctgtatataattcgtgaggcccattcactccccaagccgccttcttttcacctgtttaaatgactattgtacccctaatgttggtgtatgtgacaaaatttgattttaccttcatgtctaatgagtagtttaagtgtaatgtaactatagaagatggacaacaaaaaagaccaaaaattgtagatttgaacgttgcttagtgggctactatgaaaaaaccccaccagattgactattaaacatgtttgaacaatccttaattagtgtactacaaatccctcccaaaaaatcgattattaaagaacatttcttaccaatttcaagagaaacaatgtaaagtataaatataagaatccggtaaaagcaaacaaaaagactatctacggtatgtggtatagtttagaaggcttgagattgctagtaacattgaaatagttcaatgtacgtatccacttctcttggttctttaacaaatgaacggcaatagtgtctggccaaagctcatgtgtgcatctagtcggtggctcagggaaattatacatggaccacttagcgttaaaccggttttttcctcgtcttccttctcgaatccaatcgccaaacactttgtcttcaggaccttctagatgtttcttgggaatttccgagtctttgagccaaaccgcaatatcccatgacactaagtaacccattcctgacatgtaatgaacaaatgggtccatgcttggacatggaattacatagccgtagtaaagatcttctcgagggagtggtctcaaagatgcaacgagactttctagtcttatgtatgtgtcgtcgtcggctttcattacgtaatggtacggtggtttttgtgcatcggtctcattgaatatgtctggtaagcttgagaagtatgtgtaagtcttgcctgtagatatttgcaaaaatcgaattagttgaaaatgttacaattatataccaaaaacttctttaccaagtttctatatgattatgccaaataataatcaagtctatatatgccaaaccaaaagaagaataattggaattctaaaccaagataaaccaattacctttgttcatattctcattgcagttgagtataatgatgtcatcataacgcataatctccaaagcaacaagcactttctggtcttctttagtcaaattacagaacacaaacttcacatcaaccttaacaccgtccggaacattttgtgtcccgtagatcatccggagaaaatggcgacgtgaatactgatcaggaagtgtaaggattccaataagaatcctaatctcatcatcaacaggagaagaagacaacaatggagtctctgatgaaccattattcataggaacatttgacaaagcacatcttccaaaactcaataagctatcgaatctgatctcgttgatgaaagctagtacacaaagagctatgatgaagaagaaagaagggataatgaactttcttccttctgatcttggagaagatttcatattccttgttcaatgaaagcttagagatgttgagaagcagaggaaagtaagaaattaaataaaaacgaaactttttaaccttcaaggaaacgcatttggattttttctttgtgatatttttgttatggggaataaaaaaaaaagagctttagagaagcttaaggaacgtgaggttcaaagtagagtttgtaaacgaagcaagtgtgttgcttcagtatttcacgccatttatcatgctagtgtctctatttatttgtgtaccttttttgggatatttttttagaaagatcatttgagaaataacggtttttattttgaaataatatatgcctaaaagtttttttaaaaccagagtatgagttgaaaaattcgctgtagtttcttacaatcttttaacaaatataagtcaaataagttcaacttgaaaggtcttgtactatatggaattcatggatggatattttagttggaagcataaagtggtggatctaagcctaaagtctggccagaaatattgatataaaaattgtttctttagattttaaaatattcaaatatagcttgcaaaattgaaagtatggtgattggagtcaaatataaatttggtaaaataaaattaaggaacgtggtgggcttcgactttcgtgatccgcaactatctcatcttgccacttcttcttccccaaagttaattaagtcgttgacttcttttagatcttactacacgctttacctttttctcataccccatattttattgtcttatgagatttaagatttgagaaaatattattcataagaaaatttgatctgtatgcaaaagtgtttgggaaataaataaaaagggtaaaagtgttcttggaatttctatcttaaaatttgacttcaatttgaagtctaaacgagaaaaagagtgatttagtcctataaaaaaaagagtgatttagtctgaatttgtttgggcctaaatggtaggtcgacatagccattaagccataaattctaatatccaaactcagcccaattaggccatatccattagaagaatcaagaatgtatgccgatggaccacgaccacgacctcagtggaagattaaaagaagaggatatgatggtcgcaagaaactttaggcatcattaatgattgtggtgcatgaaacatgatttttgtattggatgctctatgtaataaatgacatttgaaaacgtcaacacaaatccgaattccaaattggaaaacctgatgcaccacttagcgactatagagtccaataactctaaaattttatcttatagcagtaatcaaaatgatcttgagaatatttagttgtagttagccaaatagttcaatgaaaagtattaaacagaagctttgaatgcattatcaagcaatacaaagtttaatacatactcgaatcactaacatcatgacattacgtcatcacatttgtctctcatgattacattaataaattataaatgcaaatgaaaaaatgtgactcgctaataacaatggataaagcctatacactacaaaaaaaatagcaggccatttatcatcagctaagatccaatgaaaattataggatcttagtattacaacaaataaacgaatgaataaataaaaaaataggaacattaaggcgatctgtagttgaaactctgattattaccctggcaatatttaagttccaaagagatttgtctctcaatcttaagctgtctgtagaaattagctatgaacatctcagctttgttgtcaatgtcttcatctgaagattgatcataactcacggttctatacaacgctccccttgaagaaccggttgagtccggttcattctctgtaaaagccgctgttaaaccaggtctatcgttgaaacttaaccgaagagacgaagaagaagaggaagaaccaagcatcggtacgagaccccagaggctatttatcttgaaacttaacacgaattttactttattcactgcttgtctcaaccggtttagtagcgaaccgtctttgctctttgtcatgtcagctatagaataccttttgaacttctttttctgcgttggtatggattgttttgtgtgtgagttttgaaatatgtttggaaatgaaaaagtatgatgagtcttatatagacacggataaacacggataatgtcggctgcagccttatgttctccgcagtttttttaagaaaactgtataacatatagtttttaattattataatgtatagatatacataggaataggaaactgattggaagtttacgtaccaatattgaggcgtatcaatatggtatagcgagtgagattttaaaattctttttttattttttcctctgaatgttataaaagagaagtggggtgcaagtctatacacaagatcgtatattcgagtatataatacgatctagtggttacgagttacaaaccatataggttttgaggtccatgcatgggttgagctaaattgagtatgacatttaaaaatttagcaccggaccaataacatattcaaaactccagaaattgacgcctctgatttacatgtgtttttaaaaaaataaaattgaacacatgttatttagaaaatcgaaaacaacctaaatagaaagggaaataagaaccaagaaaagaatgggtcagtcaacattgcgggcgacgacttacttgtatgctttcttaatcgcgttattagttttatagttttatccgatttcgtgtaagacacgaatgataataacgactgttctcttattttatttttggtcaacctattgttctacttatgttttatttattaataggcttatattaagaacataactgggatttatcaaatataaccaatataatattgatagatcatttttacttgttaagaaagaataaatgggattcgtcaatgtaagcttccttatatcttttttttttgttgaattcattatattttaatttggttattttctttatatcaatattcaaactaatttcttaagtataaattatattattatttttgaataaaaaatataaattccaactaatcttaggtttaaatgatcatgtattaattttagtttgataacatagtaaaaaacgactaaaagcatgaaccagaattaaacagaaatgaaattttaagtgaagacaggaaataatgaagcctgttaattactattaagcccatctgaaatgggccatccccattaatgaagcctgtctttaacatttatcaaaaaaaaaaaacctgtcttacacatataacaatcgactagagagagtagagaatagagatatctgtttctgttttgtcggatacatccttatttatataagtattattttacaaattacggcatcatcatatacagtatattgttaatgactgatccaaaacactaaaaagctaaagattataacatctcgtaaccaaaacaaaaaaatagtaaagtgtggagtaaatgacaagacatcagtttcatgttcacgcttgcaacttctgattgtcaactttgcttcactcttttgtctgccacctttttcctttgaatttgatttttttctttctttgtataaagcaattttaattgaaatgcataacaattcatatacattttgattttgttctcttctttttttggtcaagtcctcttctttttaccctccttaatttcattgacaatttcagctaagcattattttaattaaactaattactgtacctggttcttatttaatttcttcatatatgcataatgccttgtctaatgcttatcttgtagtcttttttcatattgtacaatcacaatacataaagagggatacgataaaataattaataatatatgattgaaaattttccagccaatgtagattcataaatacgtattactgtacacattacatgtattggcttatactaaaaccagaaatgactatctcagctcaaattattgccgaatggacgttatgaaacgtaaccaaaaggtccaaaccaattatgatatagcattgtttcatagccaaacatttcatatcactaatctgtcgctattttcgattgtttaaggatgtgttaactaactcttggtggatataaatacaagctttcaatatatatatgacaagatgctaaaagaaagtgacgtggatataaggataagaacacagtaaaatgatgaactgagattgcattatcaatagtatcctcctctccttttaagaatctataattctatatacatgatttttttttttttttatagatttatccactaacaagtaaagttttataacgattgaagcttgtacagtgacttgcaccatatgatacagtttggttttcttaagtgagtgttgctttaggttggtccattgcaaatttcttcgactctttcgattaaatttcttgaggattctgggtcatatggacctaccaatatcgatacagggaatgttgattggcatatatatataataacagtttggaaatgtggttttacttgtttaattatccattagcattctaattttcatatagtgtttaattatattaatgaagaaacttagataatgtagagtaactcttcccctacataaacgtatgcacatatacacatagccgtgcttacagtgttaaaaaagattgagaaacttctaatgcgaactcttgatttagtttaattttctttagataactttttttcttcttccaaatactaaaataatatagccaaattcagtatttcgccattagataactacaaaaggaattaatttgttatatatgaaattctactatacattttcaaactcatcgtaaagcataccattgatggacacaaaccatgtgtatgtattttatttgtgatcacaaatattggatttgatattaaactaagatattgttattagaagtggacaaagaaaaacatgttcacaaccatacccgtctaagttcttacaatatggatatatcatatatacatacatactagcaagaaatcatacatatgcaaatcacagaccaagtattggttacaaagtacaaaagactatatgctttgactgagcataataatattatatcaaattaatgtttactcttatttttttgcctaaatcttaatttagtatctgtatagaactaatcaataaaattaacatgaacatagcaaatcatgtgaaacaaatcttgttgtgttgtgtctgtaataaagagacaaaatgctcagcgcaaacctagccgactgtttagattataatcccacaatcatggtctaatcttgttctaatcattcccttttacttctttttacagaaaaaaaaaattgacttatgaatttattagttttatattgatcagatctgatcctctgaatacttttttatttttgcatctatctatatgtaagtggacatagtgtgtctcattttccctattggttgacgtcgtacgccgaattacagaaaccaattgacgaatatgttttttaaataatcttcaaaattatattaataattatattttcatcgctttataattagtcccattcaggcattcacttcccatgtgccatcttgagtcgctattttgctagaattatttaattaagatacaaattaatttaacaaatcaatactccaacctgctataaatgataaatgttagagctttctaattttttagataacgaggcaatttttttttttttaattgtatttaatttatgtgacatttaaaagttaaccacatttgttggcaattaagaaatttcacttttaagtttaaatatacagctaatttttaaagatatcgacaaaaataaaatatattttaaatgttacctaaatattcgtaatgaaacttaagttataaaaataattaggattcttattttcagatcgaaaaacaaactggttttgtcaacgttatttttcaaaagaaattaattttgaaaatttatatcttaactagtgtttattacaaattaattgactaggtagtaaattagtaatatgtttcatactttaagttaataattgttttaagctctatgagagtagaaaatatgaaggtacatgcatagtataatatgaacgttgtggtccaacaaactacaaaagcgtcataatggacgcaatctatcgtataatacgtctacgttttgtccaattacttccttataaatacatactaacttgataacatagtgatatatatgtaatttgttcaaaaaaaaaggggtgatatatatgtaaaagagtgtatacataagtatattgtattgtagactaatcgtcacatgaagtattaatgtcgtcccatcgtaggacaaatagatttgaggtggacagaaacatagtccaaccttctttttttaattttattttggtcgcctcatcttccacgtctcctcataatcaaatcacataattgcattcagttttcttaacagcaaaataaaataaattccaatatgtcgccgtgttatatttcaaggttttcttgtttcacatttcaagttttggtttataaatgtgatttgtcactaattgagtggtacaaacaaacttacatggactactttttaacgaatataggagtttttgaatatatatatatatatatataagtcctcagcttctccgaatgatccattttgttggagttgcatgcatatggttttttttttttttttttttttttgagcaaaaacacgcatatgataattttaaaattatacgacattcaaacatcttttttttttttgttggttagtagttagctttttaaaaattaataattcatcaatcaatttcacttggctggttagcaaagtaccataaaatttaaaatcgataaaacacaaaaattaattaaagaaagcgaaacaagcttgagagattagtacaaagacgtaacctctctcaatctttaaacgacaaaagtcttaatgaaacatatgtacacatgacattgatgtgtcttcattgatcgaaagtaattaaaaataattgaatttatgtgaaacaattcaaactgaaatgacttctacgattataaactcacgaaaagcaaaacgtgatatatccaaagtgggttcactgtggcgcagtccacatcttatctggtacgaactccttgtgaaccgttggattgagagattgatcgtacggtgggcgatgatttcaattaattggaagttaacatcatcttacatgtttaagctgagtcaaaaagctttatctcgttaagtgttcattgccattactggaaacttgataagagagctttgatcttaacttaagtctttcatttttttcataaattatttaatgaacctaacagctgttttgattgaaactctctattaactttttgtgtagacaattatgccccatgtaaaagaaaaaaaattctctcttgattagatatttggacaaattttatgagttttttttttggacaaattttatgagtttgtcttaccatttataagtactaaagtcagaattaaagaaatttaactccgaatatatatttatgaacgacgtacattactatttaacaactttattcaaattacaaatatagtgattttttttccaaccatatatcataacgatattatcgatctaaatttgtgatatacaattttgtatcttgtcaacaatatgcttatgcatgctttaacacaacaactgatccactagtataaaactactaggttacatgtcgttcctaagttacaatcgaactaatttatttgaatgaaccttttataatcaaattactttagataaaaccattttagtagatgtatttcatagcatgacgacattatcttaaactgactttttattttattttatgatgtctttatagctcatagtatttttggtattaatttaaatttgaagaaaaatagatttcttggttatgcttagaaaactttggtatgaatacatatcgataattcattacaatcatagtaatttacgcaagtctatggtataactatacacttccaattagaaaaaggcatacattaactacaatgctcaaattaaaccagatatcttatgtgtccggtcttaacaactaccacatgggacataattcttgaggtgtttcaacactctaaaacgagaccattggatataataaaatgatgtatcgagaaatatataaaactcggaggtaaataatattagatggaccgacaaagggttcaaagggtgccattaatggaggcgacaacacttggattcccactgattctttcagcttccatgtctcatctctctactctctctccatactttacagttgaagttgcacccaacatgagttttgagcaaacctacgcacctttacaccttaaatataatgcccctcaagcccaaactcttcaaacacacttctctcatctctctaatctctctttctctctctatctctaagaatatataaaggtatggactaccagccaaacacatccctacgtctaagcctaccaagttacaagaaccaccaactaaacctagaacttgttctcgagccttcttccatgtcttcttcttcatcttcttccacgaactcatcatcatgtttggagcagcctagggtattctcatgtaactattgtcaaagaaagttttacagctctcaagctcttggtggtcatcaaaacgctcataagcttgagagaaccttagccaagaagagtcgagaactctttagatcctcaaacactgttgattctgatcagccttacccgttctccggtcgctttgagctttacggccgtggctaccaaggatttctcgaaagtggcggctcgagggacttctccgcccgccgtgtgccggagagtggtcttgatcaggatcaggagaagagtcaccttgacttatccttaaggctctaaaagaatcttatattttgttagtctatatattatcatatcaattgttaatcttaaaattgattgttttacttattagtcatttcctattatctgaaagttttctttgtaagttgtaactatggtcctaaattcaaatccaaatttgattttggaagatggtacctaatgcagtagttaaataagttaaaaaaatgaaggatctataattctctatatagatggttattttaagtatatatagtatgagcacatcatattacaactgcattataaaatgaatgaatgtcgcttgtatataatacattattgatcaatctaacaatgtgccccgacaaggagacatgtgctgtgaaacaatacttagttaagtaaatttctattaataacatttattcacatatgacatcagtataaatacatgtatatacgtatctatccgtatattcactaataattgtatattctttttgagttcattacgtcatctagtcataagatttttcccttcaaatattagtatattactagtgttttcttctctctatatacatttactatatgagcattttcaccatgttcggactttatatcatgtaaatattttattttcttcatgctgaaaccatcacttttaaaagaacaagatattttactatatgttatctacaaaaaattaaaaaatttgatatgaaattgaaaggcataagtctaaatcaaaatgatataacgaaataacagggtaattaagattttgtttttcctatttagtattcgactttttttaagaaatacatatattgtgtaccttcatgactctcaattctcatcaatgaatgacttaccaaaaaaacaaatctcatcaatgaaaggttttattgagtaccaaaaaaaaatccaaagtcgatagaccaagttcatgcatcttaaaacaaaatgcctcgttaaatttcattaaattttagatataacaacatttttgaacaaccgttttcatgtcttgcttattctgcatatgataattctattacaactgttttcattaattttctggggatcaatttagaacatcgcaccaaaacttgtaccgttccaaaagtaagttaattaagagaggacttatcacgaaaaagggttgttgacgtatcgttatttgttgaattgtaaaagttttcagcctcctaatgaggaaatctaatttgtaaagtcattacttgtacttggtactttatttttgatcatgcatttgcttcttatttttaagcatatgacagccggcaaaaccataatttacagtgccataatggaatttgttaattatatttatatggaagaaaaataagagtatactttcaaaattatattacataaggtgttcaatgttacataaagtgaaattctaatttgccttggtataaaattataagtatggctatctaatgtaaatttgatttgttaaccggtatttattgtgagtaattctcgtagctatctaatgtaaatttgatttgttaaccggtatttattgtgagggaaaagttttatgaaaataaaataaaccccagtgaaggtaaattagtggcgtgtatgagatgaggaaagcacgaaattaaaaaaaaatatgttaagatccaataattcaatgtctgaatcgagcaagtcacgatgatcacttcctcgagatagtgtctcccttattcataacccttaaagtaatgttaacttgaacacaagaataattcacaaagaaaatattaatagaaaagctaatgccatattaatcatatactagagtacttcaaattcaaagaacatctaatacgaccaaaatgtatttcaatgtaatttaatatggttacaatgatattatattttgccaaacaatctgattataatgaagcagagagattaaatcctattgttaaaaacatacttcaaatttttatttttttaattatataattagttattagtaatagtaggtattcagtttttcgattgtttatttttatttttatttttatttagatacatgcatgaacttggtctgtacgactttggatgtttttatttcgtactcaacgaaacctttgattgatgagagttttttttttttttttttttttttttttttttttttttttttgtgtgtgtgtgtgtgtctaaagattgatgagagagtaagtgaaggttcatactaagaaaaagtcaattactctatctttgattagataaaattattggacgtgaatcgtaactatatgtgtttatgtctatctttttgggttttctgttactgtatatatatcatattgacatcaacgatttatacttaaccaacctatgacaaactgatagtttaaagttttagatatgtattttttttttgttataattagatgtaataattgtaagctatatatgccttgttcattctctatatacatttagattttaaaattatatatcatctctattataagtaaccaaatttgttttagagtccatattcgaaacagatttagacaggtttatcgttaaaatactcatcatctctttcacgtcgaaatcggtacatggaatcttgataacttttgtggacataacatgattgaagagatgtttaagagatgagtgttatcgtccaaacacaaatgcaaacttctaaactttattagttaccagtcttgtccatcatttacaagagaccaacaagtttatcaacggaactctttgttattatctcatttcaaacgatattcgttttatttttcttgttctataaataccgacttaagagttttggacgtaatgaactaactggtgggtccaaacggtgtcgtatcaatcaaaggtctttttaattagatataccatgatgtttttcaacttataatgtaaaagcaatagatctaagacgttagttagactaattctacaacaatgattatgttttgttttatgatcaatcagacgtcagaagttctaaatttatgttttttttttttttgacataataaggtgaattatcaatggcattctgtaacattcaaacagttcaattatatttagcacttttgtttgcttccgtttttcttctagattctcacagattttacttactactacatgttaagagacggaaatagattacaagtatttacatttgttgttgtatttagtatgttctaattctttcgaacatgcaagggggttagaacttagaagtaaaataatgcaatttattaacagttacatcttggacggtcgttatattatccacggcgaagctgtttccaccaaatgtttgttttctttctcgtgaaatttgttcttatttgtaaaaaaaagaagaaaaaaaaaagaagaaaaaaaaagaatcaaattcatgggtgttttttttggggtcacaaattattggttacagtacagatattaatgggctttcaaaagcccattgtagcacagaattttaccatagggaaaaccatgcgcctaattttgaagttatgttcgatcctcaaaatctgtggaatgaaaataataataacagagaaagcagattcgttaacgtgttgagtgttgacagtacaaagagcactgttatttgctctgttttcaaaagtaacagaatactctgttgtcagaagtaaccgaatgcttgtttttcaaaagtaacagaatgctctgttttcagaagtaacagaatactctgttttgctctgtgttatgacagagaactctgtttcgttactctattatcaggttggtcttgttaagttcgaatcaaattttattatatgataatatatgaaaagaaaaacatcaacaaagaaatcaaattttgacaatggcaaaacaaataatcaattacccaaaatgggaaataaatctttgaaactcaaaaataacaaaatgatgaaatcaacaaatatgagacaaaaaaatgaaagaaggaaagaaaccatatcaacgtgcttgaattttctctgtaatacgatcagttgaggttgcattcagtgggtaaaccttgagggaacctcttgaaatccgtacaatagttatagatcatataatctttttgcacccacttcagctgtccaagctgatttgaattaagtgtagtccacatccacgagttgctattcgcattacacgtaacccagttccatatcgaggtccggctgcagcaatccacatcgttaaagcttctgtaggaagcgctgaatggagcgttggtccaatcggtcttgactttcccgccttgtgtggcccaatcatcagcttcccatagacttgagtagatcttcattggttggcttttcgggtaagccacgccgttagcctcattgttcttgaacacccggattgggataccatcaaccagaaagcttttgagattccaagaaaaacaaaacataatatttagaacagtcgtggatcatattaagatcaagccctaggcggctttaaacgcccgattagcgtctagcgatatttgtctatcttgaataggattgatcggttacttacatgatgttgagagggttccaaagcacggtgtaagtgtggaaatcagcagtgggatcaaaccagagatagaactgcatttcgcggttacctttacctccggtaaagacatttgtatggataacataaggctgtccagtaacgttacccaagaactcgaaatcaatctcatcccatgtctcaccttttgaagaaagctgttaaaacattcttaatgttagattcaagataaatgccacaatatttaattgaatgagcatataagaagttgtacatacgtagtaagctgtgacggttccggcagaatttccgggaacaagttttatcttcatatcgatctttccgaacaaatactctttcttggattgaaaacctgaaccggatgtcttgtcgagagtgcaagtcaagagttgtccactctcaaatatattagcacgaccagctccccaagtgatatcgaagctgtcgtagaaacttccggtggctacgccgatcaagatcagaagagacgccaacaacaagggagactgtttggtcgcaaaagccgccattttttgctgttgttgctgttgtcgttgttgttgttgttgtctaattgttttctgatgtttgaaatgactggagtttggtgtttatatagagagagatattttttaatagtgagtgcattagagaggttcgtggagttccatcatcgacatggtcgtgttacactaggcgattttagttattataaacaaatgaattatgtcagcttacatataaattatgtataaagtcgttaaattcacatataaattatacatgtaggtaatgttttagaaacttttaatcgtttcagcaaaattttgtcttctttatttggtcatgcaatttggctcaatttataagattgtttcagattataattttgagttaaaaatgcttataaaagcgatcaagtagcatttttcgttaacttgtacaattgcaaacaaaaaaacttgaaatatttgtttaggttttggtaaaatggaccgacatgtttctgaaattgagggcggacatgttagccacatacatataagaattgtcacgtataatttataaggcaactacatgaattattcttcgaatctctcccatcatttgcataacaaaattaaaataaaaacatgaatattcatttcaggtggataaaaatctcagtcaatcatagtcaaaacagtcaaaagtttattactgaataaatttgggtcagagttagccattcatacatttcttcagcttcaaattagggtctaaacatatatcagagatacctaccttccatgtttttttttggtttttcgtttttttgggtatcattgttaagtatttataccattttcaaatttgcaacatctaaagaaaaaccgaaatctacaacaaaaactttcaaccacaacaggaaagcacaagcttctttgttcttcccatcttgtccattcccatgcatgcattcacatctatctctactgtttctgtcttcttgcgtttcgttgttattttgcattcatccatacacatcataacggtatctgtcagactgtcaccttcctccagagagatttggtcaacggtttcaattgctatttatttaagcttaattccattatcttttctcccaagaaaacggcggagaattcaaacacagcaactggccatgaacaccttaactttttctgcgaaaccaaccaactctgttttttactctgttttcggaacctagaactctgtttttctttctttcgtgttatggcgaaaaaactctgttctcatgtttatttaaagtggttcagatcacattttattccaacagtttttgctatgaatcaatcgtaaccaaattataaagattacaaaacaaataatcagctaaccaatatgggaaatgaatcaacaaatattgaggtgaaaaggaaaacaaagaaagaaacaaaattgtgtcaagtgcttcagttttctcggtaacatgatcagttgagattgcattccgtaggcaaaccttgagggaacctcttaaaatccgtacaatagttatagatcatataatcatcttgcacccacttcatctgtccatactgatttgagttaagggtagtccacatccacgagttgctattcgcattacatgttacccaattcaacaacgaggtccggctgcagcagtccacatcgttgaaacttttgtaggaagcgctgaatggagcattggtccaatctgtcttgactttcccgccttgtgtagcccaatcatcagcttcccaaagacttgaataaatcttcattggctggctcttcgggtaggccacgccattagcctcgttgttcttgaacactcggattgggattccatccacgagaaagcttttgagatccaacaaaaaaacaaagcacaaagtaaaataagagaacaacaataaagtaagaattagcgcttaatgatgttttcaatagtgtattggactgatcaaatacttacatgatgttgagaggattccacaggacggtgtaggtgtggaaatcagcagtgggatcaaaccagagatagaactgcatttcacggttacctttgcctccggtgaacacatttgtatgaagtacataaggctgtccggtaacattacccaagaactcgaagtcgatttcatcccatgtctcacctttagatgaaagctgtgaaaacattcttaatatcagattcaaacaatcaatgccacaaaaaaatgaagtagtggagatagataaatttttacgtacgtagtaagcagtgacggttcctgctgagtttccggcgactagtttcatcttcatatcgatctttccgaacaaatactccttctttgattgaaaacctgaaccggagattttgtcgagagtgcaagtcaaaagctgtccactctctactatattggcacgaccatttccccaagtgatatcgaaattgtcgtagaaacttcctgcggagaggctgatcaagagcagaagagacaacaacaacagagactgtttggttgtaaaagccgccatttttgttgttggttaaaacttaaaagtaattgttttcagatggtttgaatatgatcgaggattggtgttttatatagggagattttttgaaaaaattgcattagagaggttcgtggagtcccattacctacgtggtagtctaacactaacgatgttttttttttattttgtaattgtatgaatgaattatgccagcttacgtacgtagtcgcccaacgtacatataaacaaacgcgtatagtttaaagttatttatatcatttagatttacaaatttgtttcatttatataataaattttaaatttgatcaatataataaggttctgtttgaccaataaggttctttaaccaatcggctagaattttatttgacaagtaataaaaccgaagcagaccacaaaaggttagtaagtcgaaatattcgtttttttttattttagtgaaatggaccgacatgtttttaaaatataagacggacatgtcaaccacatatgtaagaactgtcatgcatattctttgcataagaataaaacaaaaaccagaataatcatttttcaggttgataaatctaagtcagtccatatgccaaaatacaatagaatctcagtcaatcatagtcaaaacactcatagtacctacaaatgttacaaatatggaataaaaccaacacatcatcaatggcaatgaaaaccatccaaaaatttatttagctgcaatgatggtgaatggagggttagataggttgacctcttctccaaggaaaaggttgcctaccgttggacacaatccgagaaggttactgttcatgaagatatgcaaagccataatctaacatttattgaaccaacataactcacgcccattttattatgagaatatctacatagaaacaggggaaattgcttattacagaacctaaataaacataaacattacatatataatttagacgaacctatacaatactagctttggagtttcggatcacacattaattctcgtagctagtgtctacactcctttggaaatccttgaggaaaccttttggtgtccgtacaatagttatagatcatgtacttcctctgcaccactctcatcttatcttccgctgttagatcaagcctttgagagaaccatctaggtgaaccggcaggacaagatgatcttccgcccgaggaaacacatgcatccgctctaaagtttctgtaagaagcggtgaatggtgccttggaccagtcagtcttaacgagacctccccttgtagcccactggtccgcgttccatagactcgagtataacctcatcggctgcaattttggatactggatacccatatgttgtagattcttgaattctcttaccggaatatcatcaaccatgaaactgtatcaaaacatataaataataaattagttgttaataaactcaaattttgacgttcaatgtgaaaagatttatattttgcggatcagccataattatgatcaaaacgtgttttggacctacaaaaattatgtcagcccaaaggttggaaattatagttagaacaaacaaaaagactaactcatgtttctaagttgtgtatgtatctttatatacttacacgatgtgatgagggttccataaaacagagtaagtgtggaaatcagcggttggatcgaaccagagatgaaattgttgttctctatcacctttgccttgagtatacacattcgtatgcatggtatacggatcaccagttagattaccaagaaactcgaaatcgatttcgtcccacgtatcaccttttgacttcaactgcatggaaaattaaacacaatcacaaactgttctaattaatatccaaataataaaaatttcacatggtaagttagtaacatcgtatatgaccgtctcaaattatttaagaatctctgttgataatttttctttaggaaataggaaatattcaaaaatttatcctttaagaaagaatttttttaattggagctttccacacgttattctaaaaacggccatgttatatatgatatgatgttaagtaacactaacgtagtaggcagtgacggttccggcggagtttccagggacgagtttgagctgcatgtcgattttcccgaacaaatactctttcttggtttgaaaaccagagccggaggctctgtcgagggagagagtgagaagctctccgttgttaagaaccttgccacgaccatcaccccaagtgatatcgaattctgtgtcgaacgttcctgcgaaaaccggagagaagagggtcgtagtcgagacagtgagtgtgaagagtagagataagatgaaagtggaccggtccatgtttatgtgtcaataagatagagaattgaaatcattcattgggaccttatgtgttggggggttttatataagggaggcaagtcttagtctttttgtagtatagttcgccgtttgtgactcttgtgtagttttagctgtgaacagctggtttttgttttgaagtaaagcaagcatgtgcttaattttgcctcatgctacgtgtgcttgttctttgttttggtttaagtctgcctgatccggttcagttgatgccatgtttggtttagagattctggttttcaccttgttaaattggttcttcataagagtggacaaggatatctcagtcttcaggctaattaggtttgcaaaaatgatactccaaatacaatcaaatttggtacggtagttccgccaaactctattattttagttggtttcagtatttttataaaaaataactcaagaatacatatgcaatttgatagaattaaaattaaatttcaataaactataattggttcggttaatactaaaatcgagtaaattttgttttgtggattaaagatttaaagtaacgacaccaatcaaattacatgcaaaattccggtttgatttcgattataaaactaaaaaaaaggttattgctccattgggtttggttttgagtttgactgtggaaccctagaacaaaattaaaacagaagcggccatttttggactgactcggagaatataacggaacgaactacgagagacttaaaaaaacaaaaaagcacattgtaacaaagagaatattataactttaacgaactatagagtatactacaaaacaaatcaataaaattcacgtgatctacaataaaatgaatagaattttataaccacaaagaaaaataaaatcttgttcctctctcaactctttactctctctatgcagctaagcactctttaggaagaccttgagggaacctcttcgcatccgtacaataattatagatcatgtagttcctctgcacccatctcatcctttgttgagctgttgagtcaagctcttgtgacaaccacgagccagtagtagtcccctgtttcgaggcattaggacaagaagacttgccgtttgaccaaacacaagcttcttgttgaaagccacggtaagaagcagtgaaaggagctttagaccaatcggttttgaccaaaccacctctcgttgcccaatcatcagcgttccaaagactcgagtacattctcattggtttgttcttgggaaacagagtgcctagagactccatgttcttgaattctctgatcggagttccatcgacggtgaaaatgattctttgtgggttccagagaatagtgtaagtgtggaaattagctgttggatcaaaccagagtttgaattgttgttctttgtctcctttgccttgtgtgtagacatttgtgtgaagtgtgtaaggttctccacttgaattccctaaaaactcgaaatctatctcgtcccatgttgttccaggtgatttcaactgttcatatacaaaaaaccatttcagatacaagaactttataatatgcaaaaacgaaaaacagagattgttttgttgaacttacgtaaagtgttgtgactgttcctgcggagtttccagggacaagcttcatttgcatggagactttaccaaacaagtactcgtttttggattggaatccagaaccagaggatttatctagagataaagtgagaagctctccattgttcttgatctgtccacgaccatcaccccaagtgatctcaacgtctctttggaaattagctgaaacagaggaggtgatgataagagaaagaaacagaggaagcaagtaagtgatcgccattttctagagattgtagatattcttgtattgagttagattggtttgtggtttttgagggtttatggaggaatgtatatatagtaagtgagtgaagaagatttttaagaggcggttcgtatagaggaaggttcgtatggcgaaagaagaagccgcgtctttgaggcaacagctggtgattgggccatcttgtagtaaaagcctgtgttttatttattggctttggaaatcacgcggtttttgtttagtaatgttacctttttttagtaattaattattacttttatttttttggtttcagatttaattggatttgggagttttttcctcagaaaaagttggatttgagagttggattctttaccaccggcttggaccgaccttgacagaggtagagttttagtctaatagaaccaaattattctgttataaaccaaaaaaagggggaaagtgttggtttttaaaaagttaattaaaatatgataaaacttttgagattttttttatctaaaagtatttatacgattttctgacattattcagtggttttccaattttgtagttcttttgttattactcttgagtgttattattcactaggtagtaatttttaaaaaatgaaattgaactttgagtaatttttgtggtctcatatttgagtttttttttttttttgattgactgacacttaacaaatttagattggttaaggtgctaaagaaaataggataaggatcaacattgtattttatgattttgttttattataaaaaagctttgatgaaaacaaaatttgaaacggggataagaaggaagatgccacgttaaagagtggatatggtagtagttggtaaaatgatgaaattgactgactcaaatgtttaattgtcgtagtggagacagctaatacattcaacttggttggttggttacggtcgtggtcaggaagcttcttttgtccaaatggctagatcctgtgatgagcagtcccaactcttacgcaaagtctagaattcagcatttgatttcattttcttttacttcaattctcttaaatgtttttttgtagatatttttctttacgaaaagttttgttgttttggatttgatatgtaaaggaatttctttttgtatcattataatatatttgctaatttcgggggttataatcctctatcttttaaataattgaaatttacggatatggatttcgaaataatttcatgaccgcggtgaaaatcccaattttaatatgatgagagacacatttcttaagttttgggtgaggaaagattaacaggagatattaaagactatacgtaaaacaatatatcgttatgggcctatttaaataaagcccacgaaacttccgtccgcttaggtgaaaggtttcaaaaacaaaaaaaattggtcattggcgcttcgtctcgtctagttgacttgctcttaaaggttagtcttgattctcttatagagttataggaatggccttattacgattgttaaaatttcgcagtttgtatgttagaatatcgtcatctccggcgatgaagttgctcaatgattttttttacaacctatatctgaccagttcaaccggttagcagattaatgacgaattttcccagtttgaagttaccggtttctagtactaaacccaaaccgaaaaaaagttcggattgtgggttaaccagtaagtctaggtcaggcgtgaaaacactggtaagaactcatattagtaatgtttgagacaagacaatgacattggtttttttgatgtctcacaaactttaagggaaaaatcctaaaagagactcaaaataaatataatttggacgtttaatacccaatatttttttgttggaaaaaaatatctcaaataataaaatacttaatatataaattattgatagaatcaaactcacgttaatagtcgctaagggaagtaacgtagccatttaacgtcgttaaatttaaccatttgaatatatattagatgttttacggtttatacaatgatatatatgtggtccagaggttaactatttccacttctacacatgacaccagggttcgacacctgacaagtttttcttttaatttttttttttttggtctttgtcctcgccgtcgacgacgtcccagagagatgatagcccatgaacaagagcctccaattccaaaatttcaggcttttaaactcttcccctcctagatcgatctccaatcatcacatatcgctacacccacatcattcaatcatagctctcgtatctccaatcatcttttcattcacctaatcttacaataaacgctaaaactctcatacccaatcgcaaaagagaatgaagaagaagctccagcgtctaaagagtacggattttataactgtggccaaatcatcctccaattgtgctatccgggatggtggtcgacggcggctctagggcgaaggaaaaaaaaaattccaaaaattaattccaaaaagactcttgagagtcttgattccccattttccatcttcactgtatttgatgaggattttttttccctttttagttttttttttacttgttgcagatttgactctcttttttttttccaaagacaattaaatcatttaaagggttttgcctctgatgtctgatgtctctctgtctcatcaagttactgttttttttattctgagtgaaattttacatttttcacaggtgattggaaccaagacaaagatctgtatagttatggaatacgtttcaggtggtcagctttcagacagacttggaagacagaaaatgaaagaatcagatgctagaaaacttttccaacaattgattgatgctgttgattattgtcataacagaggagtttatcatagagatcttaaggtaatagaagacaacaacttttgcaaaactctgtttcctctgtttttctaactaattttgtggctaatctgattttgcttttgctttttgcagccacaaaacttgttactagattcaaagggtaatctacaagtttctgactttggattaagtgcagttcctaaagtaacaatttctaattttctagtcacacaaagcaaaatatttgggtttgtaacaatcaaaggatgctaaataagacttttggtttatgtaattcacagtcgggggatatgctctctacagcttgtggctctccatgttatatagcaccagaggtaaccttgctggttatcctccgttccatgagaccatatgctttctgttttgtataagaagatagatactcagagtagattacacgttcccacatggattcactagatctgaactggatcttgcaggaaaatgttgtggagatatataaatgcagcaactgcgtcttcaaatttcataaacgcagtaaacatggatacattgtcgatttaaaattgtgctttcatatgttcgttgggacattagatccaaggcttcatctagtacctataaaatatcaacaaccctaagaataactgattcttagagcaaaaaaaaggtcagctgcagagctgtgggtatgcacgacatgacatgatagcgatccgggaacaagaccgactagagagagagagtaaacgatgctcggtaaaacaagtaaaaggtcattaagaaagaaagaaacagaatcaaagataaaagtgaagataccagattaagcaccacacaggggtgtatatagttattaagagaccagggtaagcctaaaatgttaaagtgtcgaatgttttcaaacagaaaagaactaggccacacaaaaacaacataaatcaatgactgaagccgttcatgctaggattagaaacaatgatactatggatacatcatcggtcatcatgtaactcgataggttttggttcctgacaagcaaacatccataccgattgagacaaacaacatacaaatagtattatcaatctcaatctcttcaggtttgatataattagggccacacgcattaccttttgggatgatgatcactccttactctctgctttccccaactccgcctcctctgttggcaacttgcttaacgctttagcaatggctgcagcctcgacggcaagaatggcctccttttcggcttgcaactccattaacatcttggcaatctctctagcctccccagcaagaatgggctcgtagtaaacagagttttcatacatacaagtcttgaacttggctctgacctccttgcatttcgtgacgtcactttcttcttcgttcttcttttcttcatccgcgcatttctccaatgctatgaatgattccttgcactcacctccctttatgtattcgcataactcactctccactctcttctccttcctctgtttctttcaaatcttcaattaggattctcgattcgtccccatctcgtgccaacggaaccccgtcgctaaaggtcatgcccacagaactcgcaactcccatagatgatcgagagagatcggactcttgatttatccaatttgcttgctcactcccaaaaccctaatcgccgcctctcttattaacaaaaacaaaggtcacacatttacttttgccaacttcacatcaattgttcttcttttcattttctctaaatcattttccataaatggaaactttgaaactctctaatgaatcgaagatttaccaaaccccagtttagggttttcttatgtgcgtttacggttttaacttcttttaaaaataactaaacaataacattccccgctcgacccattttttagcccggctggtgcttaccggcccatatttcaagccgttaaagttcaggttcactgaatcttaaacttttttttttttttttttatgttataaaacttgttcttctttttttttttttacatttatcttttttaaatttattttctcgttacttattagcaaagttcaagaaagtagtcttggcggtccaaatctacgaacaatttttttaccaaactatcccttctttgatgcccgcatcaaacataaagatccgcgaaaatcaaggatattatcgcatttacaaagaagaaatattttaaaacgatgattttagtgagtataacgtattttctctattattagtttaatggttgattttaaaattgtttttcaaattttaataatatagattacaacttatgtgtttatagtcttgatgaattattttattaacatagatccagttttagtcaattaaacaaacatatttctaacttccagtccatttgtgttaacatacaattaaaaaatactgttgtacaataaatgcagcaactaaccgaattgtttagaaagatttaattaatcagccttcgaagagattagtgaccgtgggtctgaaaccaatatctgaggagcccttcgtgctcggatcctactctggccaatgtgctaagacggttgcggattcctttgtcgattattgaacttaaattgaaagccggtgtgggagactcgccgtgagcccgtgacgtcgtccattggattcctctgtttgcaacctgctaaccgccctagcaatggctgcagcctcaccggcaagaatggcctccttttcggcttgcaactccatttaacatcttggcaatcgctctagcctccccagcaagaatgggctcgtagtaaacagggttttcatacatacaagtcttgaacttggctctgacctccttgcattttgtgaagtcactttcttctccgctctcctcggcttcatccacgcattgctccaatgctatgaatgattccttgcactcacctccctttatgaaccggcacaacctgcactctccactctcttcctcttcccctttcccttcccctgtttcattcaaatcttcaattagagttctcgattcgtcctcatcccgcgaaaattgtccctgatttgccgacggatcctcgtcgctataagccatgcttacagagctcgcaattcccatagctattttgctactcagtttgcttgctcactccagaaaaaaaaccctaatcgccgacgctctcttatgaaaaaaggacacacctttcctttgcgaaattcccataaatatgttttttttccttccatttttacttaaatgaatctctgattcataatcccataaatggaaactttgaacaatcgattcctatcttcaccaaaaaataaccccaaattcttagggttttctgattcgggaggccatcttttacgtcatttgcataggccattccccccgttcgttcatagttttggcccatttatgacttccgacccacgtaattattggcccggtccactttatctttcatttactagattttatttttttattttttcacaagttcttttcttctttcttctcaccataaataactactcttcttgaaaacactggtaggaactaatgttagtaatgttagagacaagacagtagcatcggtctttttggtgtctcacaaactttaacattgagagattgcaagagcacaaacagaataaataataaccaaggagacatgacgttaaagtttcgtggaacaaaagccttacagatagtaactcgagtatcatcaaataaaaggaccatacagaaattctacttgttgaatcacatatctaagactgtagaatcagttcttaagaatgctactgtctaaatgagttatcatcaatcaagcatattagaagtctcctgcttcataaaacacacacatccacagatccactgaatctaactgtacacttccttttatacactattcgccatcttcatcatcatcatcaagctctacaatttgtgctcgcctctcagcagctttcctcctgatgaagaacccccatctcattgcggcttttatcttaagccatccaacaacagctctgcctgatcgaccacggtcttcatcataaccttgcataggcgtgtgtagaaacgatgggaaagtatatccatcttctggcaagtgtgttgcagagccattgcctcctcctcccatgctgaataggcggaggaactgttgcatgtcttcactctctagcatttcatggcttctgagtcggatctcttcctctgagaagaaatcatctggtcctctctcacgggggtttgaccagtcttctaaatggttgagatctgcctggtgaacagaagaagggttgatgttttggtatccgcttgtggatgattgtgaaggaccgagagccaggccattcatgtgttgattgtttatggtgctttgagtttgatgtagatttcccatgaactggtcttgcgatgtactgcatgaagcaacctcaaattgtgctcgcgggttggagtttaaaagctggggatgcgaatgatatcttgttgccagagtttgatcataccctgtagattgattgaatcgaacaaatatataagatttagtattaaactataacacaaattatcaagagattgatttcaatatgcaaacctccaatagcaaaatctgaaagcactggagactggttaggcggcattgaagacgaatgccctgccaccatctgcattggatggtcaatggcagcagtcgagtaattttccagattagtgtgagtaatactcaacctctggggctgcttcaagtctaaaagagattttccatcatactctatgactaggttccagttttcatatgctttcttcaccagcccctcaacatatacctttagaacacagaagtgaaagaaagaatcaaatttgataactctcttctttaagtggattcaaaagaagatggtgaatcatagctaataaacttttaatagaagatagtgaatcttaacttaaactaaactataacttgcagcaaagcaaagaatgttgttataagttaagcaacatggagcaaaccttttggctatcagtaagtgaatcagcagagaagtattgatctccagaaataaggccgcttagctcatagatattattgaacacaacaccgacattccttgaatcctcagcatagtagatataaagcttgctgctctggacacacgtctttgcgtgctctactagtgcatcccacattttgtttgacatgccgcttccaagaatctagataaaaacggataaagataaattagccatgaacaatctctttcaagagtaaaaacttgacataataagcacttacagtacgtaattttggagaatccttgaccattactctcagaaaatcttctacagtgtttattccttcagcagtaagctttttatggaatgccccatccttgccgatcttgtccaatctccacacatcatcattcagagcaggtggataatgcttcttgtacactgcacataaaagaaatgtgcatcaaactaaaagaagtaaacaccagatggtacagtgagaagaaaaggggagcttttaagaccatacattcgcccctgtgatccttaacaacaaaagcttccgtcttggcctcacggatacgcatgccatcacaacacccagaaaccacccgtaaaccaagtcggaacttccgacttcgaatccaactcgaattatccgtgaaaactagctcgcccaaagttccaaccccttccttgagtgtaacatacacttctccagtcagcaacggtctctttcctgaacgctcttttacaacatggctttcaaattcttcttgtgtccagtcttcatcatcttcagtgttaaagtcaccctcaagcacaacaatgtgaagctttgccgaagcctctggaccatataccacagcacggccagtgtttgcatcaatcaagacaacatgaatcacagcaccttgctctccttctactttccccccagtgaataacgggagagataacctagatttgaagtgcaactgtaacttccgaccatccggaccttcaattcgctttggagaagagcccgaactgcaaaggaataataaacctcaggaaaccattatctaacgtcacgagccattaagatatataatgagaaatttgtattctaccttccagtaagcctagcagggcctagttttgctaaagcacgttccagttcctcgctgacctgctcagcaacaatcccatattaaggcttgaaacaaaggacagctaatatctaagcaaaggctacaaacatacaactccaagcacaagaagcagacaaagattgagctcaacaaaagcaagagagagaacttacaactcggcggagaataggttccaaagaggagcaaagcttctgcaaactatctactttcagagcctcaacaatcacactggtgcaaaccaaaagataaccaaagtcagagatttttgtagaaacagttgtatatattttcagtaagaagaactagtgaattacctagcaaaagcagggcgttttcgctcaggctgatcatcatcgttcccatccaaattcctcttggctctattcatattattattaccactatccatcatctacctttgcattctcctccccaaaaaaaacctagatctacaaaacacaaacgctacacaattcaatcttaaacagcacaaaagtctataaaatcaaaacccacaaaaacaaactcgagaatgactcgctttacttgaaaacaaaaaccctaaatcaagaaattgaatctgaaaaccaaaacccacgtcggagactacagaagacttctcggtgaccaattgaagaaccaaatcaacgacagagagacataagtaagaggaaagtaccagttaatcggagaccgagaaatcagagagtgtctcgccgattaaaagccaccggcgttgaattggaacaatgattagtagtgaatagagaattggagttttgatgatagtatagtatctctttgttttgagtcgtcgcagttttgggttaatcggtcaactgtggcgactcattgagcttctccagtgcttgtagtgggatttaatcacctgtgttaaggtttacgtgtttttattttatcgtggtctgctatgattgtcgtttttagttaaaaactaacgtctgctagggcccactaagagaaacagtggtcattagtctttgtccgatgaatctcagccgtagatccatgtaggactcatctttacactttaaggcaactttttacttcatcaaaagaattattacagaatatttttcttttttgtctattagtatgaaactgatcttgcattaaatttggtgtccgatatctttatactaatttccataaaccgatagatctcgtgaagggaaaaaaagaaaagaaaagaattccatagatctacctaccaatagaaaattcagattccatatgtcattaaaatatgcaacagatacagagatgacaacaaaataagctggagagagagttttgggtttcatgttctattgaattctccgagccttttgtagagcttcgtgagcaaccggcggcaaatttccggcgaggtgcaagggccacacatgagatagataacgtttccaagaggccgggtaaagataccgtcttcccgaagcattattagaagagactttgcatacaacgaagcatacctgaaacacgcagagaaattgtaccaaagtttgtgttcaagacattttgtctaatggtgacaattcaagagaacaaatattatgttacttgagaagattaccctgaattggaagcatctgcttttagttctagagcgaaaagggttcctattacaaccaccctttgaaccgcagagtgagatgatatttgttgcaccagttcttcgtcccacagctgcaaattttaaaggattaattgataccaagagtaatggctgattttgttattgattgcaacatactggtctacgaatctggactcgcgtatactataaagatgaagagcatgtttagttgtactaatacctctcttaaagtttttccttgtgaagtgatgttgtggttagtctctggatctttgaaccattggatggctttggcggctgttgcgcaacccatagcatgagctgagtatgagtgaccatgaagcaaggctttaagctacaaccaagtaaggaaaattagatggcttcaagcggtgtcagaaatgcttgaatatggttttgatactactttcactttaccttagaatctccagaaaatgaatcgaatacagcatctgtggcaagagtgacagccaaaggaaccattccaccagtcaacaatttggcaaagcacgctatgtccggtttgcaaccgagaagttcagtagtagtcttggtaaaattacggtaatttgttagcagaacgtaaatagaatgtagtaacagaaatatatcaaaagattacattaattactacctctactccaagacgccagaatcctgtgaacacttcatcgaaaatgactggaatttttctattccggcactcattcaccaaaactcgttggaaaagcggatcaaccatatgcattcccccagcaccatgaattactgcagataaaaccgccaacttaataaaagagtagtttgcatatagcaatctagctagataaaccaaggatgctaaacttactgaatatagttaagttacatacgtaaactatgtgaagtcatactggcgagtgtacctggttctattatcagtgctccaacatgggcagattgcctaactccagaatgctcttgtaaatgcttcgataaataggccgaatatattcttgcaagagttgatgcgtctctactcttgtcaaaaatctcatcacggctggtgaaggctgtaagagtttgggaatactaaatcatgcaactaaaggaaatgtaccggaggatatcagagagatgggaaaggatgctatttacttccatattctggggctatttcagaaaaactttcagggagggagatattccaggatccattggagagaaagacagtaggaggatccagaaacaagcctcttccagtatacctacaatccaaaaatagatttgagcctaactaaaggacaagctgaataacatgataaagaatgcttgctcaagacaatttgggaagatgtgaaaaagggctgatttatccctaagggatgacaacccatctaagcaacactaagggtttgttgctatgcaaatgatgaattagtgcaggagatgcaaatgatccaagaatggttaaatcagaagatgaatgttggaaacaaaattctccagaaatggcaaacaaatgaaaaggttccctaccacggctgctggagaaagcctgtataaggtgatggtgcttgtgcttccattgctcctaaagtatctccatggtaagacccccgaagagctatgacctaagatataacacacatcaaattttcgcattagaacctttaccgcaaatgacaaaattagatagatgaagatactcttgcatatgaaaaatgatgatcagctaggaacttgcattgcatattagtaagcagcaaagtggaaaacaaatgttcaataccaggtacaacgaagtgtcaaagtatcattgagcattagcaagataattgtaccttaaccacaatatgcttttcctcttctgtagcctcgcaaaaattatgatcgacacaaaacttacgaaatgccatcttcaaggcaatttcgattgctgtggatccattatccgagaagtatactcgagaagcccagcctgcatgcataaaataattaaccatcccccaatgtttgaaaattaaacaatgtgacagagcaagtttagaaaccttttcccactccatctaataacagctcagcgcacttcaaggcaggttcatatacattctcagggaacataacatgcccaaacctagcagcagtgtaacccatttctctagcaagctcagcctgaaacagcctaaacaaaatttcaaaataaacttcagaagattcatcacaaagagaggtaagcattaaaatctatgacataataatgcacgtggaactgatatttgtcataaaactgggaaataatgggcacagatgacctggaaagtaggatctggcccctgtgtccaccagcttgcacaagcatcaaattgctggctaagagaactgttatcggaagcctaaaaatgatgacagaagatagttccattagatatgagaaaccatagagttatgccttccaggtaatcagaatgcatatgaccagacaaaccttgtatattgagaaattttcaccacatcgggagtctataaccgtcacagtttcttgatgcacaagtttatgctgagtaaatggccaccagaaaacctctcctgctagcttagccatgccatttaatctttccaatctctccaaattagctaacaccattgtttctttcaaagctttgaaaacaccatcggattcgacaaaccattcaataagatcatctgaagggtccttgggaacaggcggaagcacaagcaccggcaccctaccaaccagaatccgaatacgaaaagttaaactatgagctcgctcctaataaaaaacacacaggaatcgaaagcacataaactgataaagccactgaaaaattacttattccttagatatgaagttaatggaacttcattaacaaggccatgatcttcaaaaacaacagcagcaatatcatatcctcgaagttttaaactctcgtaagctgcaatagtccctgagataccaccaagccgcccatctccaacaagaattccaggtaatctaaaaggcctgattacagatatacaatacacaaccataagtaagagataaatcaaattcgatatccaagtagaagataagtgttacctgtagaggtcgcattgaagagttcccgacggaccaggactagcaactccaccggcagtctccaccaaacatagtaaatccgatttctcgcttttaactccacattccatctcttccttcaaacacttttcaatcatctgtaacacgacggagtcctcgaccgtcgcgttttctctctccgcagctaaatgcggagatatagctgcttcccaagcatacaacgtcttgcataaaagttccggtgctccagtgacggttttctcatcccggaaattcaaagagcacatcccactctcgctgacttcaacattcaatcccagagattttgcggcggggagtgaagaatggaggacagagttggagattgaaatagggatttggcgacggagggagagggaatcgagcttggagaagacgaaacgagaatcggaatcggaagggaagccggtctgaataggtttcaaatagaggagttttgtggcggaagatgaaggttgctggaggaggaaagaggcggcgatgcctgtagagacgagggttttgccgagagaagtgttggctgaccaaattaagtaggtagggtggttgagtggtaaatggaaaggagaaacagaggtggatttgaatcgaatgcggtggcgtaagtgccggagacggtggcggataagagtggcggttacgggtatcattgttggtaggtgggatgtgatagtgaagtggcggagagagagaggagtgtttagctcgaaactcgaaagagtcgttgtggtttggagggtaaatttggaatctagttatttactacttttttgtctcgcggatctcctaatactaatgggcctggacttagattagtaggctggccaatatttataaatgttctacttaggtgttaaaatggggaaaaattatcatttaaatcatcatttcatcattttcgttggtttaaatcatgaattatggacgtggtgaattaaattttctattttctattaactttcaattaaatcacaaattctcgttgactaagccaattgaagcacaaattcttactttttttacgccattagtcgaccttaagacgagaaattactttgtattcgaagaagaagagaaaatccgaagaagatgagagattccaaagaaaaaagaaacaaaatcaaaaaatttgattagaaggatttttaaaaatgtgccttaattagcttagtcaacgaaaattcgtgattaaattgaaagtcaacataaacttgaaggtttaaatcaccaagtccagagtttatgctttaaaccaacgaaaatggtaaagtgatgatttaaatgacatttttcccgttaaaattgagtgtattaggcagtttaggagaatgtgtataaaatgttctttattgaccagcaattgtgaatgtgattaatgttttctgtataagtaaactcatcttgcttataaggtactttgttgttcttgtattactgcatatactatgtttcaagctaagagcctatcttcccttaactcttatgatcctctttttttaggaaatgaaatcaaagtttgtttacattttgagtttgtagttcttataagatacactatagcctatggaagttttacaagattcttttacctttgtgagaaaatggcaaaagaaatgatgaaagttatattatgcatacatgatttatttttcgaatgagtttacgtatagtgatggtgatgtagtaaaagcgaaggaattcgaatcgggcacataaattctgcgaattactgattggagatgctttgaaaaatgtgccaactgtcactaaatgattggagagaacgtgacgcagacgtatctcaccttacgtgtcgcgtgaaagtgaaactaagagctgagcgcgtactctccgtgggttaaatagcatcgactaaactttgattacttcctacaataaataaaaaatgtgaccacttttttttacgccataaatgtcaccacttaaacaagttacatttacatatttgataaataaataaaaacaagttacatattattagtaattttttttatatatacagtattctatatatatatatatatatatatagagaagtgtatttaacacaacttttactaaggtaacaatattttgttttgaccaaaaactaatgagtgaaatgtgaaaacaactataatcccttgaacttattaaaaaaatacgatatacatcacacaatctcacaatacataaagttttttttattttaatttgataaaccaaaacataaatgttgtaaagacatacatctattttgaaataaatatgcatatttatattttaaactatgtagaacaataaaaatattaattaatgtaagaataaagagtttcacatgcaaaccctgtttaagtttaataatgaagtattatatactattttcgaaatctaatacatcattattgctaattaagattaagaataatggagatataaatacgggtgaagaacacgcgcaattgcggtgggcacaaggaatctgcggaggaggaagaagcatatacccccacccaatctcaatacgccatgccctgggaagtaacaatttttttattcaacggaaaaaactaaaaacaaattcaattgaaaaataaactgagaaagcgccacgtggatagctacctggcgatacagaagcatcgcatcttctagttcttcttcttcttcttcttctacccaaatacaaaaaaaaacaaaaatccccagaaaattttaaaaagattatatttttattttatattttttccatcatcatcatcaaaatcaaaacctctgtcgtcgtcgctctttctctattatttcttccaatctaaaatcgaaatctttcttcttttaattccaatctccactcttaaatctctcctgggtttctctttatatcccaacaaatttcccaattcagatttcttcttgagtccattcaaacccgtgatttatatagattacgcatttttaaatcgagggtttctgcaaattcgtctcctttcaccgagattctaggtaattgattcaaatttatgatcttttgtgtatattgttgttccttggattgatttgtttacgcatgtctgtgttatctccagataagtgctaatgcttttgtgagaatggagaatcatttcaactgttattgtcagcaaaccactgccaagttatattgtcatcgtgggtttgagatttggtgcgaaactgagaaagacttatcttggtgattcgtactttgataataattaataataataatcagattgggagggagattagctatggattcaggttctgtgaactcatctgtcactagtctagtgtcgagtttgaacgatgagccgcatcgtgttaaattcctgtgtagcttcttagggagtatattgcctcgtcctcaggatgggaaattgaggtatgttggtggagagacgaggattgtgagtgtgaatagagatattaggtatgaggagttgatgagtaagatgagagagctttatgatggtgcagcagtgttgaagtatcagcagcctgatgaggatcttgatgctttggtctcggttgtgaatgatgatgatgtgacgaatatgatggaggagtatgataagttaggttcaggagatgggtttactaggcttaggatctttctgttttctactcctgagcaggatggttctttgcattatgtggagcgtgatgatcagagggaatctgagaggagatatgttgatgctcttaataatttgatcgaagggacagactttagaaagttgcagcagtatcctgattcacctcgtttcaatctcgttgatgatttttcgatggtggaaccgatgctgaatcagctgagcattgagactggtggtggtagccagaggggcaacgagatacctactgcgcagtatagtaatcttcaccagctcaggattcctcgtgtgggttcggggcagatgcttgcacagaggtatggtgaagtagaaggtacatggagtcctttctattctcctcggcaccatggacatcatgatcccagaacttttcaggaatttccatcttcgccttcttctgctcgttatcgaatgccatatggggaaattcctgataagggattggatagaatgcctgaggagtatgttaggccgcaagcaagtcaccatcctttttacgagcaccaggcacacattcctgacagtgtggtgtgggtcccagctggagcaatgccacctgagagtaaaggagggtttcctgggaatgttcttcacggtggtccaggtggctatgaaggtggtaatggatgcgagaactgtcgtgtaccgtatcataggaaccatcagcttttagagcaatctaatataggcaacaatggatttccaccggttcattgtgcacattgtccaccaaacagggaaagtttcctgcttaacacagacccaaagcctactcatcatggagcttatccaaatgagacttttggacctgatagaggatggatggttcaacaacaggtgaatcctaaccctccaaggattgaggaaggaaggtcacatatttctaatgttggaagaccgaacgatcattacactcccgattatcctgtgtcgaactatcctcttggtcaacgagctggacatgaaatttccaatgaagggtttcatgataaaccacttggtggcattcccctgaattcggccaaccgttctgctgaggaacgtgggtttcattatgggaataatctctatcctccaggacctgatagtatccactcagcaggtcatagccatatgcaccaccctcaaccaaatatttggcagaacgtttcaaatcctatagctggccctccaggcttgcccatgcaaattaatggcacagtcaatcagaccgttatcaggaatccgatagaaactgctcctaggtattctactggaatggagaatcaaggtgttttggttggttctccgcaaaggatttcaggctttgatggaatgtcctcccttggccagccttcctaccctaatccccatttgcaagatagagccttccctttagacccaaattgggtgccatctgaaaacccaactgtacataatgaacatctacaggtgcgtgagcctctgcctgggccattattacagacaaacctcactgctgcaccaatcatgcagacaccagttatgcagacatctgtggaaagcaagcttgctcagggaggtgaacaatttaactatgttaatactggtatttcaaacggtgttccttaccaagataagcctcaacccttagctggaggaaagaaagatatggggaacctggtagaagttaatccttctgctgctactcttgaaggggcagagctatcagttgagcgtttgagtttcttgcctgagttaatggaatctgtgaagagggcggcacttgaaggagctgctgaggttaaagctcatccagaagaggccaaagatcaagtgaggccggagttggtggaaaatgaatcagagcatatggtgagtattctgagatattaacctgttacgaggggcttaggttgttttcttttattctgacttccatttgaaacaactttttgtttttcagaatgctcaagacgaacctgagatagattctgatagtgataacccaaacaatttcaagattgaacaaacaaaggctgaggctgaagctaaatccaggggactacaggtttttattcttaaacccgtcttatagaattctgaaaccgaacaaatttctagtccttttgactttgttatcttggttttcaccttctttatctagtctataagaaacgatgatttggaggaaatccgagagttaggccatggaacatatggatctgtttaccatggaaaatggaaaggctcagatgttgcaataaagagaataaaagccagctgctttgcaggcaaaccttcggaaagggaacgtttggtaaaatttcattcctttattatcaattgaatttaacatattgatcaacgtttaagtctagtataattcttttactgcttttctgctgttgcagatagaagatttttggaaagaagccctgttattgagctcattgcatcatccaaatgttgtgtcgttctatgggatagttcgtgatggtcctgatggttctctagcaactgtcgcggagttcatggttaacggatctttgaaacagttcttgcagaagaaggataggtaaaaaagtttcacctattcatgcattatatactattttcctagagtatccaattatctgacatcacattggttgactcctccagaactattgatcgtcgcaaaagactcatcatagccatggatactgcatttgggatggagtatttgcacggaaagaacattgttcatttcgatttgaagtgtgagaatcttcttgtgaacatgagagatcctcagcgtcctatatgcaaggttctgttgttactcatctgatctctcatataacaaagagtaagcttatatgtttctcataaattttgtctttctttttccttccagattggtgatttggggttatcgaaggtgaaacagaagactctagtatcaggaggtgttcgtgggactttgccatggatggcacctgagctcttgagtgggaaaagcaacatggtctctgaaaaggtaactaattttttttatagaagtatgcagcttttgttcaattggattgaatctcatatagcctgtgtctttcgattagatcgatgtttactcgtttgggattgtaatgtgggaactactcactggtgaagaaccatacgcagacatgcattgtgcttccataattggtaactacacctgtcttgcttatcttttgtatgtatacctgtgaatgatatagagttatggtactaagacatgtagattgatgtttctatgacaggaggtatagtgaacaacgcattgcgtccaaaaatcccacagtggtgtgatccagagtggaagggattgatggaaagttgctggacgtctgagccaacagagagaccatcctttactgaaatatcacagaagctcaggacaatggctgctgctatgaatttgaaataacttaataaatagactcaaaaaaggaagaataaagatgatgatgaagaaaaagaagatggtgatggtgtttacttggagattaaaggcttctatttactttgttttttttataaaaaagtattagttagcctatttttggttaccacttggtttgcgtttggaacgcgaaaactagcgttatgtgggagaaagaaaaatggtgttttcctttttttattggtatatagttttatgtttaatttagagggttttggtttggaacttttgatcaagcaatgtattggttgcaatttgatgatcattgaggtctgtctctcgttcattttttttattttttggtggtattaatttggtttgtatataaaatctgtggttcaataaacattagattattattaatttgttctcagaagattaattagtacaagtaagattttgttcctaaaagtaattctcgtgtcgtgttagattttggaacagttgtttcgtgtccgatagattgattactctttttatatttagatgcttttgttattttggattttaagaacatgaatatgaaagaaagaaaaaaaatcatattaacagtttttatatattagtattttacattttggatggatataaatcttagactactgtaatttctccctgtccagttttttttctatcatttgaagaaaaatgtcaagttttaagattgtttggtttttatcatacgttaatcaaaatataaatgatttgaatctttgtattattataaaaaaaatcaggacagacaatccacgcagcaacacataagagtaaattttggaaattctatgatctgcaataatgcatactctataattcgaagcttatagagtagtaaacacttgaacctagctagaatgtttccaatctacaatatggccaattaacaaaacttgtggtctgagaagctccgtaaaacgacgtcgtctagtcacgaaaatctcaagattcgaacaaacccaactcagaattagaccaagaaaactagtgttaatatagagatgaggttaggtaatggattaaagggtccaaagacatgttagagagatggcaacaaaatgtgacaggactgcaatcctctcaatctcttgctaaatagttagtacttattaggtttgactttaaaaaatgttttgttttgattcttaattaataattatttaaaattaattttaataaataattatatgaaagaaaagtcagcccctcgcaagtacaaaagatcttcttcttaatttcttgccattaaaaaaattagcaagtgaagtaggagaagaaataaagcatgacattatcaactccgatgtcgtatcttccttgtacatagaacatccttctaacctattaattaccaatttaatttgttatgagataaattataccaaatgttgtgttaatcattggaccaatagacttaataaacaaataaaatatgtaaagcaatccagttttgatcggaaaacattgtatatccatcttgtatttaattgaattcttttaacaaagggaactttatttgtaagactaaacattaccaatatacgatgcttgtacaccatgtaaaaactcacgcaaattaagtgaaatttggactagtaagtctagtataatataagcttgagtacgttataataaatggttgaattctgaagataagtcgtactagtagtaatttaagtgtaagatcaagatacatgacaccatcaaataaaccaatgtcctgtctctacaaacatatactatatggtatgattttgtttatatatgccctcgtcttaagtcttcctgtaacacctaacacgcgctaatgacgtctccttcatatggtcaaactcacacgtacatagccacacgtgttgtattttatattttcttgttcctcaattgaaaatgatttgaagccaatatgattcaatatatcctttaatatgatttaatataataaatgttctaaaaattgtctatatatgtgtaaggaacaatcatttaccgtctcattacaaaggaaataatagtgtacggtaatttgttagtcaacccaagtgacgtaatgaaatgatgagtaacacttttccttggattagttttttgttggtgaaaagaaagattctttatagtttataatataaaattcgcaaactcaatcttattcgttgggaaaaactaccaaaactttgaaaaaagaggaactatataagtgaaaatagtagtaatgtttttttccaatcaaacttaaatctattagtttttattttgtttaggatatatatacatttcttcatattcattgtaatcgcgattataacttatacttctgatcgcatattaattacttatttcataatatattttagtggtattttcttattgatatggtttctgtcacgccatataaactctgctagcatgtagatatcaaccacaatattgaagtatacaatacacatttactagtgaaattttcatccaatgaaaaaggtgtgcaaattaaaataaaataattgaaaattacaacgttttttgggtttgtataaacatatttgaacgagtttatcttttacgtaactattattacaaactgatttattctttcttataacatgccttttaattatgtgggagtccaatttattatatgaagaattcgaatttaaatttaattttgttgtggtgtcatgtgataattaattagaacatgttatatagaaaagtagcatcttacaaagaaaaatcccacctctcaaaacaataaatatgaaatttaattcagaataatgaaacattggtttgtcttattacagtatatacaccccttttatttaattacctttaatctaacatatctctcaaatcttatctggcttcacattttgaatttgagatttagctggatccagtatttgaacgttttcttcatcaacataaatttttgctcaaatcagtattttcttttcaaatcgatatataaaagctagtaatgatttcaataactagtaagaatataggttcatgttcagtaaaaaacatatataactcacatgatgttaattccagacttccagtattaagctgttagaaattatttgttgaaaatcttggggatatatgatatataaagaattaaagattagctaggaaatgaatcaagaaattgattatttaattcaatttaaagaagcaatacacacctatctaagcttatcctcttatgacaattaaaaatatcacccacactaatcagctcgattataatgtcttaaagattgggttttgtcaaatgcatcgattctagggttttgaaaaaagacaacaagaaacatttgcgttgcttttatttaaagctctgaatttcctggtgtctttaattttttattatattatacagaatatattttattatattgtagggttattaaattatacagaatattagttgctcctttatgaattttgatggtttcctcttgttattttgttgcctagttgggttccttatctcacttgattatttaagtaactaattaatcattttaattaaaaaatatattcttttgtaaatatatgctttaatttttcaaaagatatatttgtgataattcaaggtcaattagtgtaagttgtctggttgttcagatcaattattgtattcaagcttctcctgattatgataaatatagtcttaccaccaatcaatttaatttccacaattagatgtccttggccgcattaataaatcctcgaaactgatatttgcttaagataagaaaagtaaaataaagtattcgtatatataaggttttagcgagctaaatttaatttgatataccgaatcggcaaatcccataaacaacctccgatcaaataaatccttatcaccgttacttgttattgatacaaacttacttacttgatttgacaaaaaaaaaaaaacttacttactttaaaacgtaactcttgcatggttggaaaagccatacaatctttttaagtaatgattgttgaccagattcatgtaaagcaatttgttatataaattatgaccattttaacgacagtatatatatttaacaatgtaattaataaatctacggttaattttgcaaaaagaggcaaaataatttaattagatgaatgacaatttggtagataagaaacttaatgtattatttagttgatagtatttttgagttttgaaactattccatctaatattttggtagatggctatagtaataaaataagatgcaaatcttagttaagaaaatacaaatgtaaacttacatggcgataacacaaatccaattaaaattttgaatttccacagagaaatcatataagttaccataaaaatgataaccctcaaaaacttagatgattgataaagttgctaaagacgaattcacgatcattattatagaggattacagttctaaatatttacagatttattatgtttatatataagtcatgcatctattcctattcaattctattcgaagttgaaaatgcacccatttcgcgtagactatagaatccatatgattaaactatacctagctaaatgcatatatttatggaaaaagagactataagtcaaagaacaagagtttctagaacaaaaatgggagaaaaattaaaaacggcctagacatggaaattgatgcttactttaagatgaagtcaatcttattttgcaaggagtcgtaaccgtatatgtatggtcttctcgatatcgacgttgctccttacgacgcacgcattttcatacataccttcggttattttctttcttctaactgcactttctatagttgaggactgagtatgtttgaacaaagttgttcttttatggttctcgactaattttatgatgggcatatatgtttcgattggtataaatgtacaaggaaatgtcggaattttaataactaaaaaaaactgtgtaacaagagaatccacacatacacattttgtcgtcatcgccgagatttagtatactggccggctcagtgtttatcatttatttttttgttccagtgttcatcatcttgttaacggaaagtaaaaatatttataatttgaagtttatttctttggtcattatacattatgcaagttctgaaaactcacttggtttcttacccaaaatttctatcataagaaagtcagaattttgtatccctttttcattagaaattgaccactttataaacttcagcaaattatccaaattcaagaagtaaattaaaatagctaatgatatttgattggctgtagagggaacatttcaacccaagtcacgacaaatcaagatgatggtttgtttcctgccctttaatttgacctattaattaaaatatataaaagtgataattggacaaatttttcacgcaagtgtttctttacgttaatgattattaaaactgagacaacttttaacctttttcaaaacaaatgatataatttaattagaggtttagaaaactaatccaaaatgcagaaaaagcaaaaaccctagttagaaaaatatacaattagggttgaagttgaattatgagaaagacattaaaacgcggagaggacttcatatagtattttttttaatatttacttttcagttataataatcatcaactaatatcctctttttctcgtctttatatatcatctcatccaagcattagatcatttcatcatcacaccaaacataattaacacttggaagagaacaacaacgacaagatcaagaaaagacaaagatttgtaagaaaatgggaagagctccatgctgcgacaaggcaaacgtgaagaaaggaccatggtcaccggaagaagatgtgaagctcaaggattacatcgacaaatatggcactggtggcaactggatcgcactgcctcagaaaattggtaagaattctgaaatgtttaaattctaatcccaaaagtaatcgcttataattttcaatttcgattgattagatcaagttttgttctgactttgagatttgtgtaaattatagggctgaagagatgtggtaagagttgcagactgagatggcttaattacttaagaccaaacatcaaacatggtggtttttctgaggaagaagatagaatcatcttgagtctctacattagcattggaagccggtcggtgatctatctctcttgatttctattaataataagttaattaacacctcttcattaaatatataaatttttttgttatgatttagaggtaatttctgttgaaatttcgacttgagattcttgtctttttaccttttgtctatgaatcttatgctgaaacacatgcaagcccatgtttcttcaagctatggtatctcacatagaatttagggtttatattgtctctttcttcttgttttggtgtctttgtaagaacctttatacatttatatcttttaatcttgaacttggttcgtgattctaaatacatagttttctaaaaaaaactttctattagttttaaccttaatgtgatatatttatgcaggtggtccataattgcagctcagcttcctggaaggactgacaatgatatcaagaattattggaacacaaaactgaagaagaaacttctaggaagacagaaacaaatgaatcgtcaagactccataaccgattctactgagaacaacctcagcaacaataacaacaataagagtcctcagaatctgagcaattcggcactggagaggctccagcttcacatgcagcttcagaatctacagagccctttctctagtttctacaacaaccctatcttgtggcccaagcttcatccattgctccagagcactacaactaatcaaaaccctaagcttgcatctcaagaaagcttccaccctttaggagttaacgttgatcatcagcacaacaataccaagctagctcagataaacaatggagcctcttctctctattcggagaacgtagagcaatcccaaaaccctgctcatgaatttcaacctaatttcggtttttcacaggaccttcgattagataatcataacatggactttatgaacagaggggtttctaaagaactgtttcaagtgggcaacgagtttgagctaacgaacggttcgagttggtggtcagaggaagtggaactagagaggaaaacgacgtcgtcgagttcttgggggtcagcttctgtgcttgatcagacaactgagggaatggttatgcttcaagattacgctcagatgagctaccacagtgtttaataagttatatcatgcatatatataaatgcgtaactatagggatggataatggattattgatggaatatgtattttattacggtcataagcttatagcatgttgatggtgaaaggggctttttcataatttgttttaaaatgtaacgagttgtggataataatgtaaatcgttaattctacttggttttatttcattttggaaaaaataggagacgtaaataaactttgatcgatttttatggtgaatatccacactgtacatacagagtttttattgatcagaattcttttctttaacaaaagaaaacaaaacgttttgatacattttgcaatttagtagctgttactggttacggacttacggtatcattgcccatttcaatattccgaatttccaaagtgtgagttgttaagaaaatcaagatttttatgcttcggtctaaattttgtttccagaaaaaacattgattagttactaaaattgagtttgacctagaaaatggggtctgttcgttttctatttctaaaatcatgggccttcctttttccatttctataggcccatctaaagatgcaactcgtggttgatactagatagtgacttggtatgacaaggaagaaaagtaagctaaaatttgattaatctctattatctatgtcctcaactagaaagtaaaatacttgtgtacatttgaccaaagcgtatagttttagcatataataaaaagccagaggagtattaattaatggtaatcatagattttgtaaattaaagcattagatagaaagtcctttcagggaacattttttggccggctggatttttatattcagtaatctcgaatcaaatatccgataattgctaattaatttttatccctgtaaaactaataaaattgaccaattctatccgcaataaatcaattcatggacgatcaccttttccttgtgccacttgatattaagaaaccaattaagatatcattcaacgccattgatctataaattttcatttcctcttatgaatattaattttattcattacaacttcttgtatgcatgagatgacaaacactttttatttctcaaaaataaacttctcagttatgttttgcgaggaacaaaacaaaattctgtttttaaagtgaatcggatagtttttctttataatcatattgaataattaggataaaatgttcatatagctaagcactcaatcaactatatgaatgatatttaagaagttaatatacacacatagagacaaaaatcatattaaaacccctaattgacaattatcaattaacctaccgtttaaccaaagggaaacataaaagagtggtaaccataatcgaacatggaagccacattgtagttgacatatcctaaaggtccaaattcattaattaattcatgaattcatcacttataaataatcactcaccaaagtcatttcccttcaccacccacaaagccatggcgaccacttcatcgacaaaacaagtcattgtcttcacaatttcccttctcttggttgctttccaagcagtccatgcagactattaccgtcagaggccaccggttacccctaccccttacgttcctaagccacggtacccacttccgagcccgagccccaagcctgtttatcgaccacctactacccctagtctacccgctggctcaatcgctagactattccttgatccacataacgctcttcggtccggactaggtatttatttgttagaaatataaatatttagtgtattgtataatgttattgttattggttttgatgaaatgaatttcatttcctattaggtttgcctccattgatttgggacggtaaactagcgagctacgcaacatggtgggctaaccagaggcgttacgactgctccttaacccattccaccggcccatacggtgagaacttgttctggggaagcggctcgagctgggcaccaggtttcgcggtgcagtcatggatcgttgaaggaaggtcatacaaccacaacaccaactcgtgtgacggaagtggaatgtgtggtcactacactcagatggtgtggcgggacaccaaaaggctcggatgcgcacgtgtggtgtgtgagaacggtgccggagttttcatcacttgtaactacgacccaccgggtaactacgttggcgagaagccatactaaaaaaacaaaacacattaaacggggtttttgtttggtatttgatttcatttaatatcttttgtatctgttttcgttatatcttcgtgaaattaaaatttccgacaaatctaatttgtatgtatcattgtatgttgttgtttccaatgtcctctcggtcatgtcctcaaaattttgttgagtggcctacttatttaaacatcgtaaaacaaacagtcagaaaaattaccaaagtgtttgtgtgacgtcacttttgaatcatttgaaactgtgaaacaaagtggtttatcttcttcgtttacaaagagaaagcaaatgagattcttccaatcctacgaaagtacgaattataattaccatagttgggcttgttttcaaactcggacgttagacttagaatagacgaaaccaacaccatagttttgctaatgtccaataaactgaccttgctacgagaaacaacaccatttaatatttaattgggcttgttgttattccggtctaataaagtgaccgacccaataatgttagcatggtgtgtcgttttgcatgtgtaagggaattgatcaaaatgttgactttctttcaaacatgtaagacgatcaaaatgttccaaggagttatataagcaagtcgatcggttcttgctcgaatgtctttgagaaattcataaacaatatattaatctaatacatgcagtgagaaattttggtctaaattttcatgtagattcacccaaggttacatatttgttttataaaatttcatcgatagttataactaaaaaaagaacgtatgaacaaaagagagaataaaacccaccaataatagacaaaatcaaactatgtcaatttgcgagacttgattttgttgcttatgtgttggcgaaagattatttagatatcaaggagatcttaggacaaccattcaattttttttctaagttatacaatctttgttgggatatgtcattttatttgttctccatttgttctaactaaaagttgatattttatatgttgataattgagataatcataattagactgttatttttgttcactttcatacttcttactctccgcgataaagaataaaacaaaacttttgtattttacaatgaaacttttctctttttgcatctgaaataattatcttttaatgtagtaaaacaaaatttcctttttttttaatgtgaagtttttacacatttgcatgtgcacgtccttctctactaatcatattaagcatggatgtaaaaactatgattaacaaataattgatctttttgggggtactgctctacttaataattgcttatatattgcttatatatatatatgtgtatacataaaagagtaaaataaaacatgtgtggttcatagtgcaaattttgttcactttcatatttctttggtctttttggggtagtgttctctatagactatatagacttaataattgcttatatattttcaaaatatgaagagcaaaatggctaacaaccgaaaatatatgtatttttttttttttgaataaggttatgttctccggtgtctacggcatattacatgatttatttctctttctctctccatatgtatctctttcttaattagtagctatgtgttttgtttcatatttattacccaccgtgacaatgagtaaaacaaaacatatgtggttcatagtccaactttcctattttgccatctgaaataaatgttttgatagtaacgttgtttttcctttttaatgttaatttcctataaatttgcatgtaaatgtccttttctatctatcatttttactatgtaatgaaaatttatttttatgtaacagatatttgtaaaataaatataatgttgtaccttgtaaaatgtgtgatacaaatcatattactctacttcttcatttctcgaatttattttacaaaaaaacgtgaaagtacaattgaaaaataaccatagttgggcttgttttctagatcaggacttagaattagacaaaatcaaagccgtcgtttgaaaatgtccaatataaacgagctagctactagaaacggcaccatttaatatttgattgggctttttattattcaggcctaataaagtgatcgacccaataatgttagtatgttgtgtcgttttgcatgtggaaggggattgattaaaatgttgactttcttccaaacatgtaagaattgatcaaaatgttgttcggaacgtcaacaaacggacactcacatatctctatcaatttaccgatttttgtgaaatagaacttgttcagctttttatatatctattttataaacgagtttgattagaaaccaatctatcattttacatcctgaataagaaccctttgggatcaccaagatccaagacataactaaattctttggatttcttctcttcattgtcttctttacacttcaacttcaatctgcaaaaatatgcttcatttgcttcctctgttttaacatttttacttgagaatctatggctctctatcttagcttacttccgcggtaagtaagcttgataagctctggcaaaactgtcaagttacatacaaaagcgaatctcatatcatcagataagtctataaaggtcactttccaatatatatatatatatatcttgaatggatttagtaacttacctccatgtatagtcttaactcgcctgcggatttcgatatttctataacacaatttgttggagtcacctctatcacctctgctgataataagtcataagaagatcttgatcttatctcctttggctgaatcttaacctaagaaaccaaacttatatattaaagtaattgatctatagaagaaaccttcaagtaactaacttatatattggtaccttgaagtgctttattctctcaactgataaactaacataagttgctgcagcttcaatcttcttgattgtttcttgtgctgtgttcttggacccaattcttgttttatatctcttatcatcctgaagagataacaataacgcaaaaagcttcaatatttaactctctttgttagatgagtttaaagatttaagcaaaaaataggtttaagtgttttacattttcttcgaagagacctgacaaatctagatcactagacattgctattatctgaaaagcatttatgaaatttgatgacgcggttgctgcatttatctccgcgacattgtcctgcaagatccaattcaaataagttacaactatgactcaaagatattaacgttttcagacatctagtgaaccaacttgccttgattgagtctgaaagttgatgataaactggtgtataacctatcttgaaccaagaatctttgatgattatctcagctagtgttatacgctgcaaccaaatattttcactcagttcttttttattcaaagactgacaatgatgaatatgttttatatgcaaatgtttcttgttacatacacttagaggatttgggtcaagaatgttaaagattagcctcttctgctctccagtgaatccaggtgggaacgtgtaatctgctctgagtatcttcttatacaaaaccggaagtgtatgatcatcgaaaggtggataaccagcaagcaattcaaatagaatcactccacaagaccatacatctactgctgctcctgagtagcctttgttcataatcaactgttttcattaaacaaaatcagcttctgcagattcaaagatagaggtaaatgattgttttttgtgaatgttagtattacctctggtgctatataacatggagagccacaagctgtagagagcatatcccccgactgtgaattacataaaccaaaagtcttatttagcatcctttgattgttacaaacccaaatattttgctttgtgtgactagaaaattagaaattgttactttaggaactgcacttaatccaaagtcagaaactttgagattaccctttgaatctagtaacaagttttgtggctgcaaaaagcaaaagcaaaatcagattagccacaaaattagttagaaaaacagaggaaacagagttttgcaaaagttgttgtcttctattaccttaagatctctatgataaactcctctgttatgacaataatcaacagcatcaatcaattgttggaaaagttttctagcatctgattctttcattttctgtcttccaagtctgtctgaaagctgaccacctgaaacgtattccataactatacagatctttgtcttggttccaatcacctgtgaaaaatgtaaaatttcactcagaataaaaaaaacagtaacttgatgagacagagagacattagaggcaaaaccaaacctcgtgtatttggacgatgttgggatggttaagaagcttcatcgttcgtatctctctcttgacttgagactcaagacccttttgaataaccaaagccttgtctatgattttgacagctacgtaagtaccattggtcgtgtcgtaaccaagtttcacttttgcgaaattcccttctccgattgttcttcctatctcatacttcccgatcttcttcgttccaaacaaacccatctcagaaacagagagaaacagagagatagagagaagaaaatcttgaagggttcgaattatgattggaaggagtaaactctaactaataagaatgtgatttgtgggatcaagaatttgacttttagatgatattgaccggttgaagtaatcaaaagaagatattattggtgtgttgtttattgaccgattggttagtgtgtgtgagtgactcgtagatcgtgagtctcgtggggtgagagaatgtgttatcttctttagctacgtaatcttctcaacaactgatttcataaacaaatgttttttttgtggtttatatattcgtcacagttctcaagttggtaagctacgtggattgggctgtcattattgcttttttcttcttttattctatttttcctttattgcttgtattctttccgccttaaattaagaaaatgaaagaacaaagaaaagaagataattgattctaaatttgctggaagatatctaattttcgacaatatccttttaggattttctttttcaataaacatatttttagtgtttaaattttaatctttaacgttcaaaacaaaaataccattccaaagacgccagttttttttagaaaagtattttgtcggcttttttcaaatttgtccacaagtggattacattggctttactgatttctgaaagtacatattctcaagatatttatttttcaagataaaatatctcaccgtttaagatattttttaatatattttatttctccactcgaaaacaaacttcatagatttttttttttttataatccaaaacaaacttcatagattacaaaagctttttcatttgttttttcgattggtctaactaggagatattattattattattcacttgtttataccaaaacaaaaagttatcactggactctaatttatcggcccaatatatcggtccttttatttgagttgggctagttacaatatatcggtccttatcacgaagtgcccatccaatacctgcaggttggtttggagatagccatgaaccatcaacgaagcaacaatacgaattagcttgcttaagaattaatttgagctattccattttctttcagactttgcactttctttgttgcttcctgtttatgctttacgtctaatccatccatattcacagcttcgaaccacaatttacagtcaaagcatggctttacttattacctccggtattgcccacttcctattattaaataaaagatcatttctcattttccatatcctcctccagcctatagaagggtttaactttaaatgataggatccctttaaatgatttaaatatttaattgtctttggaaaaaaagagagtcaaaattgcctctgcaacaactaaaaaaaaaactaaaaagggaaacaaatcctcatcgaatacagtgaatatggaaaatggggaatcaatatcaaacaataccattcttggaataattctcggattcatttttgaagaaaaaacaagtaatggcaaattttcccaagttgtgtccccctttttataagaaaagaagactcagcaattgaggtttttagagtgagcaagaaccttgtgtagcaaaaaccttaaatccgtcatctatgggaagtataaactctgtggctgaagctaaaacagaggaagatccttcgacaaatcagggagatggggacgacgaatcacctagaaccctaattgaagatcagagagatgtggaggaatcaaaaaccctaagtgaagatcaagtagatgtgaaggaatccaaaaccctaattgaagatcaaggagatgaggaagaatctaaaaccctagatgaagatttggatgaaacagaggaagagagtggagagtgccctttatgccagttcataaagggaggtgagtgtaaagaagcattcacagaattggagaattgttgcgacgaagcaaagaagaacaatgaagatcacgtaagtaaatgtaaggaggcaagactcatctttaagacttgcatgtatgataaccctgtttactatgagccccttcttgctggtgaggctagagcgatggccaagatgttgagcgagttgttgaacgcggaaaaggaagctattatggctggtgagcctgcagtcattgcgagggcgtttagcgggttgcaagaagagaatgctgagccaattctgcctgctgaagctgcagcgatcgggaaggcgtttcgcgagttggaagctggaaagaagaaggagaaggaagcagagggatccgagggtaatgagagtgatcatcagaatcagaattaggtaaagctttttttatgagcatattgagacttacattgatctgaatgaaaattcaaatttcgttactcttaattttgtttaggtgtgtcttcttatatacaccattggttatgtaatttggatgcatctataaaatactgtcgtaatcaccttcttctacaaaaaactaagaccattttaatatacattttgattttttttaagataagactttgtgcaagagtttttatccaatgatagaatcttaagtgagacttgagtagtacttatgctcaacttttgaaacaagagatagaagtaaaagaaagaagcacattcctttggcacataaaagtcatcagcagtggtcttcaggatcttccgcaatacgcttcaacatgaatagcagccatacggtccatgaagtgatcagtggtaatcactgcaagatgatcttcaacaaaatcttcaatcttcttccagtcacgatcaaacctaagaaacagagagcagtagtatcatcagcacaatcaggtcctgctaaaatcaatataatacttttaaaaaaccacacaagtataaaattattacagttgaagtgcttcaagaagcagatctatttagctaatcaaaaaagatcaattaactcaaggaagcagatcttttttagcttaagttactactgacctaacactatcataaacttccctctcgttcacttatgtatctgccttgacatatcagtttatatccctaaaagccagcaataatattgaaggatctaacactaaggaaaactaaaacatgcattgctcgccaatccaaacagaaactcaccaaatcgtaagtttcgatatcatccaaaccaaacaaattgaatgcctggggagagagagtcttactgaggaaaaatgcttcaattagcccaaatattaaagtcccaatataaggagactttttgttaaatttttagcccgattaaacataacattttttaatcagcatgcaatattttcatttaatgtgctcggttctgtcacggacactgacatgtaatttttcattttcacgggtgagataattttcagacaatattagaatttttttcttccctttgtagttattcgaaattatgttattgttgggaagtaatgaaaaaaaactcaacaaaattcgatttaatacctatccataatattattgatcctaaaaatagaaaaggataattttgctgagtcagaaacgtgatattcgcgacgttgtttccggataaagagtaaacgtacgactgctttaactcacctataaaatcacgaccgtcgatttcatttatgtcaaggggcaaaactgaaaatcacacaaaaacaaacaaaactttgcttacgtcacatcattatctgtgactaattcttaatcatcatcatcatcatcacttacttaaatctaaaaaaatctctgtttgtatatatattatctttgcgatttttatccaaatcttccaaagcttagttttttttttttttcaatttctctcttgcgttttcgattttattacaagaactttgttttgggcttcatccatcgttcaaggttcgttgaaaactatgaagaaagttgagttttttatgctccttctctgcttcatcgcagcgtcatctctagtggtaagacttaataatcaaaagctcgaatttttaatgttcttccaatcattgaaatataatccgagattaaagtttttaaatttgatcttgattggtgtgtaaagtctgctgatccaccaacatgtcctgctgatttgggaggcaagtgtagtgattctgatgactggcaaggtgatttcttccctgaaatccccaagattaagtatgaggtaaacaatggtgatgtttctctttaaaactgttggtttaagttggaaactttagtggatttgttgtttgcatgtgtagatgaattggttgttgatgaattttttcagggaccttcgagtaagaacccacttgcttacaggtggtataacgctgaagaagagattcttgggaagaaaatgaaggtacttttattttcttgtttgtattttcttgcaacaatttttgagttatgtttttatggatttgaagaaacgtgtgggatgtttgtttgttgtcctgaattttttgaacaggattggtttagattcagtgttgcgttttggcatactttccgtgggactggaggtgatccatttggtgctgctactaagtattggccttgggaagatggtactaactctgtgtctatggctaagagaagaagtaagtccagattgtgtttttatgttagtttctcttcgttatcgagttactgtgatttgagttactgattgttgtttaatgcagtgagagctaactttgagttcttgaagaaacttggagttgattggtggtgttttcatgacagagacatagcacctgatggcactacacttgaggtaactcgagcttctgaacttacaccattttgctttacattgaaactacaatctgctttattgcctggtgttataaaccattttggtcctgatatttcctttgcagcttgctgtttcttgtggtacttgataactttgttttgctcttgttggcccaatgttaacttgtttcagtcataaagaaagcgcctgtaacctgtttatacttaatctgcaggaatctaacaaaaacttggatgaagttatcgaactcgccaaagaactccaaaaggtgattcagtttgttaattttccagttcttattacacattggattttggaagatacttcttgtagttaatcaattctccaatacagactcatgtatgccattttataattgaatctttttatcactgaaacagtactatcttgttaccattccttagtttgatgtgctaagaaaaaaaggttcttcgttttcttcaaatgcaggggagcaaaatcaaaccattgtggggaacagctcagcttttcttgcatcctcgttatatgcacggaggagcgaccagctctgaagttggagtgtatgcttacgctgctgctcaggtgaagaaagccatggaggtaacacattacttaggtggtgaaaactacgttttttggggtggtcgtgaaggttatcagacactcttgaacactgatatgggaagagagcttgatcatctagccaggttctttgaagctgctgttgcttacaagaagaagattggattcaaaggtaagtctactgcttctttttcttgtcctgtattcagtcttatgggagttattgcacaataatcttctttttatcaggcacgcttttaatcgagcccaagcctcaagaacccaccaagcaccagtatgactgggatgctgcaacagctgccaatttcttgaggaaatatggtcttattgatgagtttaagctcaacattgagtgtaaccatgccacgctctctggtcacacttgtcatcacgagcttgaaactgcaagaattaatggtttacttggcaacattgatgcaaacactggcgatgctcaaactggtaatttttcaatttcagctctcttgattgttaacacctcctaaccagattctgattgaacaaagttctctcattctcttaacaggatgggatacagatcagtttcttacagatgttggagaagcaaccatggttatgatgagtgtcatcaaaaatgtatgtaatattaaagaaactcgctatttttgggaatttcattgtaaatttttgaatgtaagctcataagagcttctgtttttcacatatgaaacagggtgggattgctccaggcggcttcaactttgacgctaaactgtaagagcgattcttgattcacaatgttttactgtttcatacaaaattaaaccgagaaagaagcttataatgtttggttgattaaacaggcgaagagagagtacagacgtggaagacttattcattgctcatattagtggaatggatacaatggctcgtggactgagaaatgcagtcaaaatcttggaggttagttaagatatgaatagataagttttataaaagaaccaaagagtgtagctttaacttggtttcggtgtggtaaaggagggaagtctaagtgaattggtacgcaagcgatatgcaacttgggactctgagcttgggaagcaaatagaagaaggaaaagctgattttgagtatcttgagaagaaagctaaagagtttggagaaccaaaggtttcttctgctaaacaggtacaagtttcttgctattaattctggttttgtttcgttaaacacgaaaaacacacaatgatcgatgtcttttgaaacgaaatctgcaggaactcgctgagatgattttccaatctgcaatgtaagaagaagaacaagaaggctttttatgtttattaaaagtatcgtcttttttagtttccctcgcatctttgagaagtttgaaaaccaaaacattggaaaataagatgattagagaggttggtttcattatttcagttgatgtactatggtttcacactctaattactttaaattgaataacaaaaaactgtttaggcctttactttgattcagttacggtttttgtgacaaagaccaatgagcaattccgatctatttcttcactcgactatagtaaagtttgtaggaggttttatacgagaaagtttaaaacagcgatatacatatatacaatcaaaattcttcttaccttatgaaaatttgaaaagcaatatatgattttcacattaagctttgagttttgagtttgaaaacgttgattcttaaaaatggtctaacatcaataaaaactttatccaattcatttcgtttcgttagttatgatttcagaattttctgttgagatttaaaggaaactcaaagtcctaatttgacaaatttctcgacaaaatctttgatagtatttgataagaaaggtttgaaaactagggaaacatagcctatctacttgatgtatctatgaaatagttgtgatgactttgttaatttcgtatttgcgacgaccgtgatgtattacaataattgagtcttctatgatgttgaacctaattactatccgtcgatggttctagaaaatttctttatttgttgttgaatgaattaatttttatatattttattcgaaaaaaggtcggcaaaaagtagtaagtcttttcttttgtcgaattgtggccgaaagtagaaagtctcgtgaaagctcacattatgaatttatgataaataatgaggaacttattaataacattaatatatatcctatgattcttactctgttttcatttatgtgactgtgtttcagactagcataacagttgattaacggtttcaaagcagaaaattttgagctgggttgatatttacatatatactaattagaaaacgtttaacagctaatttcataaaataagtagcatttcgtttataattgttttcaaaaatgttaatgcgttaattttttttttttttgataaagaaatgcgttaattattgataaatgttttcaataataatatgaaacacagggctatacattcactaaaatgtggtttgtttcataaaattatttattataaactttgatttcaaagttttcgtagacatttcatcaaaaatcatagattgttacgaaaagaataatgaagatggttattacaaattgtctttttcagcaacgttcacatagtactctcacctaacagcatacaacttgataatcttttcattttttgtcatgtgaccaaaattttcatacgtttaattaacggcaaagctctcggctgtttgttttttctcttttttaaaatttctcaatacatttttctagatccatgttaaccttttaatatttttatatatcttccccatctgccatttgatcttgtagatttttaagaaaatttagaatatgtttccgaattatcgacctctggtaatttcttaaatgtttacattacatactgagtactcttattttgttctacattataaatcatatttttcgagcctacattatgattaaataaagacactataatacaaaacattaaactataaacttcactttgtaactctaaatttgcataccttttgtaaacgggataaaaaaaattgttgcagaccaaaatttcatggatggcggagaaaaaagctagtgtaaataaatttatattaatgtctttaaatatctgttttccaaaaggaaaaacataatcttcataaaaatttctatctttttaatggataatgtagggagattttacgagtatccactaaatccattctatagtctgaagaaatgttattttagtagtttaacatttcacgtccatttcctttgggttatgatctactcatctacataattcgtcaatattttattgttgacgccaatgggatgatggaggacgacagatttagaatgagaagaaaaagaaacattagttgaaaatgaatatattactcaataatgcgttttcggactaataatctaataccacgaccttccaagtatcacacgtgctactcgaaatcagaagatgcttacacgtatacgagtgtttgctggattggcaaagatcacccactttcctttgagggaaagtattaccttttaagaagattgaatttacaaattattgcttcgctcaatctcataatagctagttaaacaatgtatcgtgttgtgaatgattaggtcaacgttcaatgtacagtctctggctgtttccatttcggtcgtggcttaaatatagagctagatgataagtgtaatgaaatacatattattacgtaagttaaataaaattttttaccgttgataaataatcaggcatgtttataataagtactataatactttgcctaactaactctatctatcctcgattttatagaactcgcttttacttttgataataattgagcgtgaggaccgctacgaggaaatttatttcggccggaccacgctacagtcaaaacttcgaagctaacaatcattcatagcaaaatgggctcatttcattcattcgtacttaaaaagtttgaaaaagacctctatatacgttgttcgttgatc

SEQ ID NO: 920 - DNA, 50700 bp, Arabidopsis thaliana
cattttagcagttcactttctcatatgatcacatggcatgctcatcatattatttatcaacgatacattctttctttatattaatattggctagcttaaaacttataatacttgttgagagttacatattagttatcctagagaaacaactcaccaaatgtgcctttggattatacattctctttatctattttatacatttttcgaaattggaattattatggagacattagacatatatgaatattttgagttatacttattttatattttttataagtagagttacacttatttaacaggttagcattacgagttcaaaaagaagaatttagttttgctgaaataaaagcttgtgtttatgtctttaatagctcgcacaccacctaaatgggatttaaacttagccatacaacgatgataacacttacaaaagatcatttatatatacgagacggatcccgccagtagtatcgggaggaacgcgagaactgtttatgacattgcgacctacacttgtttaaacatcagataacatatgattaatagtctaaactcaacggtttattgaaacagttagtgaaataggccgaatttaacgtgaaaaatacgtaacagaacgttgattaatagttatatatatgtggccgacgcaaagcatgacgttttctgcacgagctgtcacgcaaggtgacgacgtttttaatcaaagtgtttagggactataaacgtataaattaatctgttcgatgttaatagttctgatgccaagatgcggttcggttttctaaaccggatcgaaagtgataatttttaaaaacttaaaccctaactggctaactctttcactgacgacatacataacacatttcactgactaaacttattttgattagtgtaataaaagagtaaagaactccagtattggcgtattgcttacactgattctgtcatctccacattatttatgtcaagcggatatgttgggttcctattatttcccttttatctagtttataaaactgttatgttattattgttatgatgtactatataacatcctcgtttgcggtctcaaaaaaaaaaaagacaacatcctcgattgtggtggaatctgttccgatatattattggttaatttttgattgaggcgaactaattatgtaataagtactcttcttttctaaactttgaatcatatatagtcaaatattgaaaataataaaaaagaagatacagaaaatttattcgcacatgattttaaaattgacgataaaatcttgagatggggtcaaaatacagtgcattttagtgcccaaaacagcaaaacaattttgcgtggatctcatgtcggaagataacaataaagataaatatcattggctatgtaatatatatagatagaactgtgatataaaaatctatcgcaatatttctattgtacaaatatgtttcctctaactctttcgtatacgtggatagataaggattttgatagtgttgccttatatcttttcttttcactctctttttaagtaccaaccgttgcgtttactttgttcttccttttggaactagaccctaggtcaaacgggcctgtgtaaatttttggattatacagtttttagccggtaaacgaaaaagaatgtattttactacctaagaagaacatatcagaaagcaaacattataaaagaaaatatcgtataagtatacttcatcatttaagattattgattagtaaaatatatatcagaaagcaaacattatatcagaaagcaaacattagaaagatttaatattttgagagaaaagataaattataaggtatgatcttatgagaattgaatctcgaacacgttgctttataacacactacaaaatgtatatttttattgataatatattaccgaatcttcattactaaaaccgcaaaaagaaatcttaagtaaagctataccttatgatttctcgaagtcaaagtttctgtaattagaaagaaaaatcaaatttgctttcatgccgaactgtagataaagatttctaaatcatgccgaccatactgtccattttttcaatattatttaaaattccatgaatatccatcctcaaagggccctgtctagaatacgatacaactagtatataataagtctacaactacgtaacggagttatcattctaaaagataatacatatttgacaaaataaatagaaaattaaagtttttaaaaaaatatttgtaaaatttatgaacatagtggtcatttggtcgagaaagaagattttttttttcttttaagatgaaaaaattgtatgggtcattaatatcatcttattatttaaagatgtacaagctttagcttatctcatttaaggatgtacaagttatatgcatacacacgcaaaaataaaaataaatcaaagtttaatatttagtttggtgagaagaatttgagtcattgacataataaattttgaaatcatgtttgaaaaggagactataagctagtatcggtccctagacgaaatgatgcctcaagaacatacgaagtttattaattaaactttatttctattcattaacaaataaaacagccaaaacaaaactaattcaataccgacatgatagataaaatccattcaaaacctcaaacaaatttgttttggagttaacagaaataaaatattttgaatttgtagatactcctacatgaaagaaaaatgaattacgatatcaaggaccagcctaattattttattttgttagcctaattttcatttctacaaaacatatctccatcacgattttattaaaacaaatcccataattcgattttattatgtggatgtcatgtttacacgtgtcatattacaattcgttaaaatacagtgtctcttctctgtccgactgggcatgacagatcatccaagcaaatcaaatacccaactctcacacgttctcaaacaaaaacttcaaagagagagagagagagagttttgtgaactcaagaaaataaaaaaagttatagttaatgggattcggcttagagagtatcaaatcaatctccggcggatggggcgcggcggcgcgttcctgtgacgcttgtaaatcagttaccgccgccgtgttctgtcgagttgactcagctttcttatgcatagcatgtgacacaagaatccattccttcactcgccacgagcgcgtgtgggtttgtgaagtttgtgaacaagctcccgccgccgtcacttgcaaagccgacgccgccgctctttgcgtcagttgtgatgccgatattcactctgctaatcctctcgctagccgtcacgaacgtgtccccgtcgaaactttcttcgactcagccgaaaccgccgtcgccaaaatctcagcttcttcgacttttggtatccttggctcatccaccaccgttgatttaaccgctgttccggttatggctgatgatctcggtttatgtccgtggttacttcctaatgatttcaacgaaccggctaaaatcgaaatcggaactgaaaacatgaaaggttcttctgactttatgttttctgatttcgatcggcttattgatttcgagtttccgaattcgttcaatcatcatcaaaacaacgccggaggagatagtcttgttccggttcagacgaaaacagagcctctcccgttaactaacaatgatcattgcttcgatattgatttctgcagatcaaagctctctgctttcacttacccttctcaatcagtcagccacagtgtaatttccctccgtcaaaatcaaatcttttatcataaaatttgcttaaattcagtaaaaaactaatctttgaattttgtgattttcaggtttcgacttcttctattgaatacggtgtagttcctgacggaaacacaaacaactctgttaaccggagcacgatcactagctcgacgactggtggtgatcatcaagcgagctctatggatagagaagctagggttttgaggtacagagagaagagaaagaacaggaaatttgagaagacgattcgttacgcttcgaggaaagcttatgcagagtcacggccaaggatcaaaggccggtttgcgaaaagaacagagacagaaaacgacgacattttccttagtcatgtttatgcttcagcagcacacgcacagtacggtgtcgtaccaacgttctgattcgaatctacggtggataaacaatcaacctgaagacttcatatcttccaccgttgatttacagtcggtgtataataagtatagtgagtcttaccgtagacaaacatcttatcctctttaccgttttaattactttttttttacgcgctctcactgccactgtaactctttttttttttcttcctatatatgtatgcttatttttatttagaaaatgttatgaaatcatataatttggtaattatagtttctattggctgatgttgtcttgtcgctaatcatataatttggtaattctaatctctattggctgatgttgtcttgtcactagttttgttgatgcagattaggtggagttttggcttggtaattgttacgtagcataaattataacgaaagcacaaactatatgacatttaatactaatagggggagatttttaggtcactataacttacacaaaagtatttttctgagatttatctaatcaatctagctcatgcatttttaatatttgtatcccatgcacgagaagcatcggatttttgttttttttgttacatgtagttgtgagtttttttttttatgtttgaaatcatgaaaaaatagtcatacgtatgtgtaaactatctctctaatctaccgttgaaagctttttatttgttgttttctttgttccgaaaatacttattgtattactgaaaagttttttgattcgttaaggcatatatgtatattccagatccaaaatctctggaactttcgcagagttagtgaaaatagttgcttttccggaaatcgatcgtaggaaaagaagggaaggttgcaattaatggttttgtccgaaacttcattaactttgccttttgggtagctgtagagccaatcttatctctctgcaagaacgtgattattgtcagataaagtcaaagtccatttcaactgtgatattttgtcgttagtgatcggtgatttatggtatcactatctcgtattatctaatagcctttacacaatctcggacctaagttaactatattcattcaaggaggctaagaatgagccagagtattttcttcattttagatgtttacactgatctaccacaattgaaatcatagtagctaggaaaacttgaatcctatctcttatatttcagagtatatatttgaaccactaaactattctaaaccttcgactgttagatgatccactgataaaatatgcacgtaataaccttgttatgtttttctaataaatcatctactcgtaagttaccttatagtttacttaaaagttatatcgtagtgtctttgcaactactataggacttgcatacgtatgatataacaaagtatgttaaagacatatcaatttgttaatacatacacataatcttctaaactcacgcagcagtctcttcaaattcataccacctctagctataatctcgttaacatttttttagaatgtagctactttttatgaaatgtatatacagtattgtgaatatataactcatgatcaatactttggattgagatatagttgaatgagacttctgccgtccaagtgggtttagagaccttgatacaaggggcaatttaggcaggatatttttttggaaggtaagcttgagatttgcaaatagtggctacgaatgctttggggccacatatatacaatcataataacgttaataatagcgcattaaagaaaagttttgacaatacatagaactaaagtttgatttattaaacaaaaaaaaaacaaagaattaaaagttggatgttgagtgtcacgaataaattgggtaaatgtggtgtttttcccccaattaacctttgattaagcttgttaggtgatttccaccaaactcattgtctattatgcattaatcatacgattattattctttataaatgattatcagtctaattgatttcaatttattttgtaaagacatttccaagtttacatgacaacgtgtataactcgtgtgcgaatgtatgttccttggacttatattaaattaaaatcatgtattagatgcagcatgcatgggttgacacacttcaaaatacttatacgtccaacttttttttttttttttttaacatatagaactactatttgtagacttgtagtcacaatgcaaacaattataatattataaacgaatattttcttgtaatttatcaaattcttttcttgaaagctgtggtttcttaaccgagtatctatatctacaacgacattcgaacgagtttacgtctaagtaagacactcgtattcgtatatagatggttcatcatcatcatttaagcactttacaaaccgttggatatgaaacttgacatagtgtgacaaaacaaaaattttggtaatggtggtgactactgattaagtgattagtgacacagtactctcaatagcaaaattccacaatgcttatacagattatatactttatgaaaaacaatgacaaatagtatattttagtcatcgatcatctatatgacttaagtaataataactttttaattatgactcgtgaattttggaaacctttttttcttttgtcaaccaaagtaatctttaaattgtgtaaactcccccaaaaagaggtaataaagaggcacattgtcacatttaaagggaaaaacttgttaacagttgaaccaataaattgggaagaaagaagagaaaaagagacaattatttgttggcaccatgaaagagagacctgcgtggcccaaagtgggtccgacatagactgggtcgaagaggagacaagtggagggtccgaccataccctaaccacgtgcatcaccggcccagagggctggtctcgtggtccacttctgcaccttaatccctatcctaacagttcccatctgccactagataaacattgccattgcaaaacaaaacaaagaaactaacaaaaataacttaacataccatgactttaattgattgcttttacgttgtctagctgatacgtttgcagtttacttcataataaacatcagtacaaaaataaggctaactttattttttttcttagcttcaagccttcaacgcaaatatatttttaattgatctcaattgatgtatcgatatttcctttagtagatattattataaatcacgacaaaactgtcacgatttagctccatactattgctttcttttattattggactatatgtttttacaaattccaccaaaaaaaaactgtcacgatttagatccatcctattgctttcttttcttattgatgaactaaagtgctactgcttttatttttcatgaaaatcatttttatcgataacgacaaatttatgtatcttattctatacacgcacacacatcacaacacgaagacataataaatttgtttcttaatctaggagaattatgttatggttcgttttggctaactctgttcattgatcttctgagtactctcattagttcttaagaaatttgaaccattgctgttggagaaatagtatacgtctcgaataaaattagaacaagattttttcattaaattatgtactttgtaactttcaaatgaaataaactttgtcaactgataaaaaggaaataatccaaacggtctatgtttaaaatttgattaagtagcttttttttgttaactgataaagtaacttatttctattagttgtgaattcttgatacataacgttaaagatctcataacatataaaagaatgaaaaagaaaaacctaaacaaaagcaatcagtaaatattagatataaacaaaaatattaaaaagaagaatctgaaggaacatcatatccgaaaatcatagaataatcatcccattcattattatcatcatcgtcattagtcatatccttaggcattctccagctctttgcaatctcagcctcgttcccatttgtaagcaactccaatacctttaattacacattaaaaaatcaaaaccattggaattcggttttggaccgtttaattctaaataatacgactggtatcgaatatatctatgtaaccaacctgagtcatggttggtcgtaatatcggagattgttgaacacaatgtgaagctgtaaggactagcttgttcatctgttggtcgtcgtacttatcttgcaatttcggatcaaccaactcacttgtgttacctgtctccatcgccggctttgcctgttcattttgttttccatcaatataacgatcaacgagaggaattactaatctaaaataagaaaagagatgaaaccctaaaatatatgaaccaatcaacatttttatcatatttgaattggaaacctatgaaatttaacaatcaactgtcgattactacattaaaataaagtagatttaacaagcaaaactggttatatgacaatataacctgtagtggtaaaaaaagccaatgaggaaaccaccagaaggtttcctttcgtgtctaagaaggcaaacaagtataggtatgactagataatagaattatacccataagagaatgtgtttctgagtgggattaaccggtcttcgaccagttatgatctctagaaggagaatgccgaatgcgtagatgtcggttttctcgtcgatggttccttgcattaaggactctggagctagataaccaaacgttccttcaaccggtataaccgcatggtgagtccatttgttaggcaaccatttggccaatccaaaatcagttatctgcacaatagtaatcacatcgaatttcaaacatatacaaaccggatttgaattgcttcaaaagcaagaaagctcacctgcggttcgtaatcaggtccaagtaaaacattggaagatttaatgtcgcggtgaatgatccggtggttgcagcgtttgtgaagataatgaagccctcgagcaactccaaccgcaattttgtaccgtacaggccaatctaacgacccattctcattctctgttttaatttttcgcggtataaaatgacataatcaatccaatgtttatattctttctagaactgtagaagtactataatcacaacatcaaagtaatatgaagttaggttaccgtgcagcgcagagtacaaggttccattctcggagaatctgaagacaagataaagacctttctcaacacaacaacctaagagaagagcagtgttgggatgagagacatgacttatgatgccaagttccgtaagaaactctttctccttgttcatgtcaccactctccttggctaatctcttcactgctattcttcttccatcccataaatctcctctgtacacttcagagtagcctcctatgcctactatattccctgcaagaatcaaaagtttcaatctttttgtcttgttttgttttccaaagttttaaaattttggtctctctaatgttttaccttggtgaaaatcatttgtggcctttgaaatctcgttgtaagtgaagcattgaattagaggctgaggtttgggcttgttcttagtctcacttcctctccatttcctcagaggagaattcatgataagagaagatatgaatttgtaaggagagattgacttatgcttcggtttgtctgaaggcgaagcgaagctagaagagaccattgaaccattgaagcttgaagcatcatcgcctgaagagctaagtgaatctcttgataaagtgtttagtacactacgtggtgaatacttctcactatttatgtctaagaaaaacatattttgttagtcttggaatcaactaagcaaatcgtataactaaacttaaagggtatattagtatgatcaaacctagagaaatcgcggagtcagagtaacaatctttatgcggttttctttggtttccgactaaaacaacagagcaacttgatggagcaaagtcggagacatatcttttgatgtcattccatatcctaaatggagaggaaaatacaaacgagttattacaagaattttgaattggatgatttctaaaccgaaccggaaaatatccggtttattacctaaactcgtgggttgttggtcgagaaagaacaagataatgagcagaaatggatttgacttcatcgattagtcctcttccaatgtttgagctaaaccctaccttggcttccaaattcacctgtattaagtatgaagttgaaaaaagaaatttgaatcttaccaaatatgtaataacagtattaatgcggggtggattcgtaattaaggaaataattatatgtttgtttgtgtctgggctgatatcacgcgcgtatggaaacgtgtttgcttgggcttaatgggcttttaacgaaaattcgattagacaaattagacacgtagtgtatatcatattttagtttagatcaagtgaaatgatacttagagaaatatataaacaaatttattaatttatgaaatttaacatggtataaaatctcgaacaaaaaattgattcgacccgaaaagtaatcgtatggggcaatattgcccaaatcaatggctataaaacatgcaccaataattgatttttgagatctccggtttattccggtttaaattttctcttacgccaattcttttttttttcaaaacgaaagtggttgtacctggttgtggcagcaagtgtaagcgaactctccaagcatggagataacatgagctttggcatgtcgaatctgagttctcttcttcttcttcattggcaattttctcggttcttcaccaactgcaacgacactaacaattttatttcccaaccaaaaaaaaaaactattcaaatggtcggaaggaaaaaacagaggaaattaggtatatagactaaccaagaagatgaagagccacaacggtgtcacttggtttagcaagaacattgatggcccaagatagaacattttggctctcgtcacggtccaacgagatcgccacaaggatcttgttactaccttcttctgaacaagatatcatttgtattggccctttttcacttgtctcactctaaggtcggaatttttgagaacacaatgattctatacacttgaagaagaagataagtgttatttttttgttttgtgttgattttggatgagtaggaagaagagagatgtttcgagactaataaacagagtggaaaagggatgatcattgcatgagataatcattagctgtgtatatgagtcttgacgaagaagcataaaccacaataatgaagttatttttggcataatattactcaagatcaaaagctagagtttacatttgttagatttttttatctacaaggtaaatattgaaccatgaatcaaaacattaattagagttagagactatcaattaatttgatataattttgtgtaagtgagaaacaatcaacaaaatgattagttttaaaatatattattaatttgggttaatttgtctcacaacaacagattataggttaatctagagatcgaaatttcgctgagtatcaataaaatacacgcacacataaactattgttggaaatcaaatgatagtctagatgatggttgttgtgtaatggtattggaagtgaatgtgtgattaggtgattgttgtgtaagcaaaggccaaagggacagaaggatgtgttttgttgttgtgtataagtggtctcatctcatcttcttgattttgtcttcctctcaaagccattgttgctctttggtttctacttttatattatatctatttatcttgtttattaatcatataaagaatgattaaatggtagtttaggattaatgatttcaaagataagtagcaaaaagaaaaggttgaattgaaaaattgttttcaaagggttggtagcgggaagtgtgagccatgagtgagcaatccaaaagagggatgatatatatttaactttttacaatgaatgagactttgagaagacattaagtacacaaaatattatgagattgttataatttttttggagcaaaattatgagattgttctattaattgcaaatgaatcaaagggtcataataggaatggaccaaaaggtgatatcaacaaacaagacgttgaatcatataattacatgtgcaattatgcacccaagattacttggctttgtttgtcttatactacacaacactaacctccatacacatcatacacgtgcatttgatatctcaaactcggggatcttaattacgcaaacaatgaaatatgattacaaggatgtaagacccccttaaaacattaatataagatattcaatgtagtatcagtcagtagttgcaatatttgccttgaaagttgtaagaccaaaattcgagtttttccactatgattttaagttttaaccatgactataaatggattgaaaacaagaatacccatccagttctgagttctctcacaggctttgaagattagttctaatcagctgttgaatcaatgttggcccaaagtttgtgtaaggaacaaagtgaatatataaccacaatgggcctcttaccaaaaaaactacagtgggcccaaataaaacccaccattagccaactttattttctcgacccataaccaatccaaaaacatttttacatcgaacatcttgattacaagtctacgcagctcaacatatatcgttaaattgataaaaatactctgttttgataaaacaaaactatttgttatgcaacaaagaagaagaggcaaaagattgacggttattcatcaaagtctagtttctgaactcgaatattcactattaatagttggtaatccattttcattagatgaatgtataaataaagaatccatagctttaaagtaatataaaaaaaaagaaacctagctagggctacagcctacaagataagattgaaagggaaaaaagaaaagagacctagtgcagttaaaagtcattttcgaaacttataaaatattttcctgataagaattatgctataggagattaattacacgattagggtcgttgattgaagctaattttaactgcttcacctcgccgcatcaatttagagacacctaagagaaattaaatcagacattcttctgcatgtgccttcacacgtgcctgtagtcctcacttcaattttctcacctgaagaatcttttgatattttctctgttttcttttttgttcggaccacaattgtcacattaatcccacgaaaaaacatgtactggaacagtacaattttttcatcatttaatcaccttttttttttggtgaatttttaaaataatcaagatattttcattgaagtctcagatagttatttgttttttcattctcaattccataaatcacaaatttcacattcaaagtctcagaaatttacattttatccctcatcatgacctagatatggcacaaaacttacaaaaaaaaaaaaaacgaattaacgatgcaaaaggcaaaagctaagattttttaaatacatcattgatcagaacaactcctaataattcaatcccaattccaattttttccaatattactcatcatcaagtagagttatgatccaacccgaatacccgacgcaaccgggtcagatgctgcaaacagttcttcagaactgttcacaataagacgatcctctgtttttctcttcccttcctctggttttgtcaatgtgtctcaccgttactttcactactccgcggcaccacctgatcacttccctccacgtcatcatcttcatcgtcatcatcgtcacaagtacacgtttttaccgacggcgttgctaagtaagtaggtttgacatttccggccataatcaccaagaacttctccggcaaagctacaggcttcaccgccgttttgtcaggtttcacatctccgacttcaagatctctctctctgctctggttttcctcgccgtctagataaccggagagacgccagtaagagcaagcgaggattagaagagcaaaagctatgagaccaagcatcgctgctaaaccaccaaagagataaggaaccggtgaatgccacggtgagtgaggtcctcctcccatggtggttctgtttccttcaacgttttctctcggagggtaatattgtcttccttccatttttttttcacaaagatggttttgagttttgagttttttttttttttaggaaaatgttttggtgtgaggaggaagatgagtgaggaagggttttatagaagagaagaagcgaattaacgttgtggattgtgtgtgacgtatcaatttttaattttattattttgcgtatgagattctttttacttctgatttatggaaatttttcttatttatttatgtatttgtatgtaatgagtgagttggagaaaaaagcaatatgaattcagtttttatgtttctcagttatcatgaatgattatatggagtcgtgacgtgagtgcataacttatgttatgtcttatttttgccgtttgctaaagtaatcgagatggtgtgtacaaaaggattaaccactgaatatatatataatttgtaaatgaaaaaataaacatttaacaagttttcctatgatttccaaacatatttttaagagaaaattcttaattcaatggtaaacttttttttttggctgttgagatttaccatactcatttttttttgtccgttttgagtcgcttaccaacataaaagataactaacatatctacttttttctttctagagtaatgtgtgtatgtgttttacttagaagtttacataaataatcgacgttcacattcacagcaatagcattttaaaaatgattggtaacatttataatctcagcaaggttaagggtttatatatttcaaaaattgaaactacatgctttacagaggaatgttatgtatagttagcaagccgtgtaatgatgagcttctgttggtttaggtgccggtgattagttgggacccaattaatgtggtctgtttcttaatcagtattccttactactttttaagcttaatcagtggataatttcaaaaaatatcttcgattctatcatactccaaggaattataatattagtaatcatttattgtaacacttaaacactgttttagataattaacaaccattcacatagtgtcgaatccactcgaataaaatatagtatgactttacagaaaatatctgctgagtggttatactctctactagtacagcgtaagatcaacatctacttggctaataattatttttctaatttacagtggaaaagtgagacatgaaaacataagagtcatgaaaatgatgaattttttaactagaacaaaaaaaccaatgattgatggctaatagataaagaaacactctgaagaagaaagagggtttaaaagaggcaattaaaaggggaataagataaggacaagagactgaccaaaaacggttccgttaaagccgctaaaatttaggtgagcgatgcaaacgtgaagagatagccggaaacgtaataaccgttaacgccaaacaagtaaagtgaacgttacctaaaacaactaaaattacatgtttgtttaaatcttcttacttcgagttccactatacatatttataaccaactttattgtatctccaacatattgatatatatgcaagatatgcatgattgttaaagagcaaatgaattcgtatgagaccttgaaactcggcaaagcaagaacaacaagactcacactcgctctcaataatttttcatgctgtattcatatacataattaattaactactatatatagacaattttttcacatatatacagcataaaaaataattatgataggtatatatatatatatatatatatatatatgttatcatatttcatcgtgaactgtgaacacataaatataaatgaaaaaacagacggtagcccaccaccaccataaattgcttttaacaagtgactattgattttatcatatataaaaaaatccactatgcaccaaaatcatcattctaacaagaacataccaaattttacgtttttaaaatattttaatgatatattagaggagtacagaaaattttatatatcatcaaaaaggaaagtgggaaaccccaatgaaaaaaagctggaaacaacataccaaaccatatgcctgaggtctcaattatctcatcaatgataattttaaaaattatagatgagataacaaaaatggtcccatgtttttgcacagtctatttggatcaaagtttatttggtcaagttcctatcatttgctttttctcgattagtcaaacacattgagaaaacgattagaacaattgaaaacaactcacactttatgatgttaaaattttgtttcaatagtttgttttactagttaaaaagagagtgtccgaacttttagacaactcgttttaagagatcagagtataacttattcgcgacaaaacattttagttcgatttgaaacaagttatatttttctggtatccaaactgcaatgagatgactactaataaaatattttgaaaaacactagagaaattgaaaaaattgatttagtgttgtccatattcaaatttctttatcatcataatcagtaatttcaaattctaatttttaaagatgacaacaaaaaaaagttctagtttttaaaattaaattttcaaaaaacactaaaactagtattcgccacaagcttttattgtttttaaaaatattttttataggtcgtttcgcagggttcatttccctcaaataactgaaaccatgtgaacaacactaaacatttgatcctccaaactcaaaccatgtgaacaacagtataacattagatcctcctaactcgatcattctttagagactagctttctttttgtctttacttcttgagaaaaatctctaagctactatatattctttctagcattgttttcttattaaatcgatctcctgttctgataatatcttatattttgtttcatttcggtaaaagatatagtttttttattcgcttttccttaccttaaagaatgagtttaggttttggtccaaaatctcaaagttataagaaaaactaaggtaaggcattcttcttctcgaggtctcctggcaatgacagaatttctgaggaatatttgttgtgtttgttcttgtcgtctagggaaatttcgtactgttcgtataaataaatatgtaatagaataatgattttgtaaatatttgaataaataattgataataaggggtccatttttcagcgtcagcttccactcagaagtacacgtcaagaacaaacgatcattccatcatttccaatcacttacgtttttttttggtctattctaatcacttacgttacgtcctcatttccacattttattttatcattaatacaacaactataacagttatttaatgagtccactaatatggtgttactaattttctaagatttataattgaataagaagggaacatttttagatattacaaaaactcttaaaagcttccaaagcaaacaatgttctgacgaagattccaaccaaatcccactctttcattaatctattgcgattaagttaaaccctcattttcatttgtagttttatatatgtggattctctaaagttataaaacccataatcccatattaaactaacattagtttggaacctttttttttttaagttaggaacattattaacagtataaataactaaaacagaatatttttatatataagtaaacatatcgcaaattaataaaaaaattatgtggtccgtatcaattccctaatctgagttaagttattgttgtttatgcatgaatctagaatatggagtcttaaccatcgttaaacagacacgtttgaagcgtaggtaatatagaaaaacaaacttggaatatacgagagtttctaaatcaaattaatggtcataacttcatcttaagtacgatcattagaatacatgtatgttacggattaaaagagttcatattccctcattaccggtgttttcgtttttttttgtgacaaatgcaaacagcgcagagaatagaggtaataattaaatggtttaacaacaaagaattggtagctgatattgctcgtaaggaaagaagagaagatatgttctaaaattagcatatcttctatcaagcaacaagaaaatattgtgcatggtgtgaaactccctttcgtaatttattgataaaaatgaaaaagtatgttcttcttttgcgagatggaagtacaattattataggagacatgaataatttcattattttcttacaagaaaggtagtcccacgtcttaataatttgatttcaatctttttggaacaacataattttgacccccacatgtatatataacactatttcccaaattcacaattccaatctttttatttacatctacatataagaaattattgcagttttcttttttgttaatacttttagtctaatactgctgtatacacaattttaaagcttccgaaaaaaaaaaaaaaaaaaagacgaacaatgaatctaaagagaagacgttaaaacaacaaacattaaaaagtgagtcaaataaaaaaagcgaagccgatataaagctaagtgtacatttgggttctcgcttttcaatttgtattttattttaatttacgaaatactaatcgtcatttctcgatacaaaactgttgatatttaatcagcgtgaagaaaccgaaagcgttaactagcaaattccgtcatttaaatcataacatatttatcagtttgatcccatcgaaactcactttaacattcttattcaaaacaaattgtaacgattttgaaatatagaagaagttatatttcttgaaaatatattatggaaaatactttatgtgctgctgaattttgaaacccatacttatatttagatttttacgtcgtaaattatatgaagtgaagcatcaatacaccaactaatttgtagattatttagttttgaaacttaacccatttgaccaaaaaagaaaaaaaaacttaccccttatacatgatttacatatagtggatttggtactaaaagtctaaaagatacagagaaattgcaagtggttcgtacgtacaaatggaaattagtactttatgaaagttataactctttggtccaattatatatgttcttctatgagtgttcgtctactcatcctccactccaaaattttagttacttcttgtctgaaaccagccttgccatttctgtcgtctttaaatcgtagataagtatatacttttccatgtatttttgttattcacaattacattgttgacatattataataagaagagattaatttaagacattccttaatttaataaaaaaaaaagttaagataataatcaatctcctttgacgaccaaagactggtgagggactctcttaatgtcaacaaaggtagagtagtctctggtcataggctgtttccatggctctccatccatttgcataaacgcatctttccagtctcctcctcttatctccagccttatcgctgccgcctgttcgttaaaacccaagtttttgcacattagctaccacgatttgccaaagacatatatcatccatatttatgtagtgtaattgtaaatgttagatatgtaaatggggtttggagaagttcactaaactaaaatacttgttaattattgatgatataatactagtttggtagatcgaccctattttgtcaaaaaaaaaaacggtttggtttgtttgaattgaagtacctgtgcaatgtgtttggcagatataagctcaaccataacaaaggaagcatgccatccttgctttaacccaaagatctcaagtagtccatcatcggcttgtgcctccacaaaacctctctgttacgtacaacacaagcaaccgttaataagaaggagaattgataagtagatttgtgaagtgacgaaaaaatgagctttgttttactttttcaagataatcttgtttgagatttccccaagggtttcttccacttccatagctatgtagattcaatgcaacaactgctcttacactgtcccaaaaacaagcaaacacacatctttcattagaaacccaattatgagatttaaaagtgttctgtctcatttgtgttcttgtttctattctgtagataccttttgggaactggtactttctcccactcggatgagtccaacttttttatatgcaatgtcataatgttcttgagacccctaaaaccagataattacaaacgtgttaagaccacaatttgaggttgtaagttgtaacatttgttgtcttggtgttagtatataccttaaacctgggtcatttatgcagtgagtgaggaaccaaccctgagagcaaccatatcccgagtatataatctgcaacaacaaaatgttagctttctttcttgatataaaaaaaaaagtcttagagaaaattatcattctcaagagaatttggtaaaaccttattggcgatagggccatttgcaaggtaaggcttttcgttgcgcaaatggtgaaaaccgtaagccacttgagcatccatacctatactaaagtaattgtagaagactccttcatagccattcgtcgatggagggatctctccctctatctccaaattctgcaacacaaaaattaactcattaaaaccaaagactaataatcacaaaagaatttcaattttgtgtactaatgaaattataaacctggtcaatgtaacattcttgtgtagcctttaaagaataaggaggatccacaatttcaccagaaggcattgtaatcagaatattccaactacatcaagatttcaacatcaaaagattaagcagagagctcaagaaacaaagtgttcatatcacgctttttcgcggtactaattttacctatctaaacggcttataggagcaacacttgctctatgaagtgttcgttttatcgcagatttccacgcaaatgggaatgaacctccctaagaaaaccaacataaaccctaattagaacagagtattttataagattaaagatacaaaaaaagacaataagatctctttttcacccatccgaaacttcttgaaagatcgtttcccgttccgagtggcattatcgaaaccggaggaacgggtaaccggttttgtaaattaagttcaccgagacatcctagaacccaaccaacggttccatctccacctgcaacctgtaatgagtgatcaaaccagtggcaataacaaaaaaaaaaacacattttcaaatctttgattgtagatcaagcaatggaaaaaagtaccacaattctcatcttttcacgaatctctttagcacattcgtctcctcgagacgcaaatgcctctaagcatcccaatccatatcgaataaactcattaggcttcacttccgttaaatcatacacctgttcttcgctaataagattctggagacgttctttaatgagtggaccttgacgaccaccgcttttgggattaacgaagaccatcaaaggaacttcaggcgtcaacgcgttgttttctaacggtggtgctacagaggaggaagcgtcgaaggaatcgtctttacgaagaatgcaatcgcgtattgcaatgcggagatattgaggaagcataactctttgacgaagctctgctttagagactcttatgctcgcgagattgaccaataaagagactttcattgctccgaatgagtcgagagatgaatgtcgtggaatcatcctcgccgtcaatgaatcaccaatcgacggtgattccatctctttctctctctctctcgctctgccaaaaaagatcgaaactttttatcttcctgaagaatcagtatatgaaaaacagaacaaattgggaattctgggttctttgtgaaaagataagaatctttgttgttgttttttgatgaaagaaagaataaaatctgaaaacgaaaaattcgttagaggagaaaaaggaaaccaaaaattgaaaccgatccgagaggaagagatttgttctgatttttctgtttgttttgtttttttcgaccgttgagcttattttcaggacaaataaaaaccgttcccttctcattaactaccaactttttgttatttatataagcccattgggcttttataggcctgttgtctgtttataaaagcctgtagagttaaatctgcaaatcacaaaggaaaacgttaatggtggatctgagcactgtcaatgtcatcaccaccgaagtagagttgactccactcaacagaaactgaaactggaaagtttgagacttttaaggtaagctcatcttgtattcattgtctatgttttgcattttttcaaaggttaagtttttagggttttgcaaacttgaattctcggaaagacgaaaacttgtaactccgattactatagacttttttctgggaatccgatttggggaaacttgaatgtttacccaatttgacttctttgtaagctaatatggtattgtcttagatcagagcaatgcacatgtgatgttatatctgagatcatggaatttaaagaagaaactttgtatcatgagtaatgttgatatgtttagtgatgaaaagttctcagatgtcagaaacagaatttaaagtgttgcttgagacattcacatttcctgctgattctgctcccttcaagagttgtcatgcctctaccatagttgaggttaagatcaccacaagtctctttgactggatctttagtagtatcagtgatggattgggttctgaatttctacattttgtgaaaaggttgttaaagatcatttcttggctgcgtatttcggaggcaccagggaaggagcacctgatgtcaaaatctggttgcagcatttcaaggtattatatagacttttcaatcatttagagactctctgaggttataattgtgtgtaataattgattggttttctcaggatggtcaatgggattcaccggttattgttgatgaagagccaggagttccaatgtataaccctgtcttgttcaaacttccatctcatgagctcttattgttctacaaaatcggccaggaggttcaaaagtatgtctttcaatcaaccgagtaactcttttttgttttgttacatttctttgatatgttaagtgttttggtgaaagctcagatggagtggttgcatgaaacgatcatatgataaaggtataacttggactgaaagagaacagcttcctcctgggattctcggtcctatcaaaaacaaggtacttgttgcgttgcgcagactcgattactcgattaagactaaaccttttgtactggttagagacttagcttaagcttccttcttcatctcttctttcttctgcagcccattttgcttgaagacggtactctcctttgcggatcatctgttgagagttggaattcttggggagcatggatggaggtttcttaaaactatttagtttgatttctatatttagagtatgctacaatgattttacactgaaatgtgttggttgattcaggtcacttcagatgcgggtagaacatggagaaagaaagggccaatatacattcaaggcaagagtcttagcgtgatccaaccagttccataccaaaccgcagctgggaacttacggattttactcagatcctttactggcattgacagaatctgtatctcagagtctttggatggcggtgagaactggagttttgcagtaccaacggttctcccaaacccaaattcaggtttcttgaaatcgaaactaaacacattgtataactagtcttcgttttagcgcgattttattgaagaaaatgttgacaggtattgatggagtcaagcttaaggatggtaggctagtgcttgcttacaacacagactcaagaggtgtgctcaaattaggagtttctttagacgacggtgattcatggaccgatattttaacgttggaggaatctccgggaatggagtattcgtacccggctgttatacaagccggagacggcaatgtccacgtcacctatacatataacaggacacaaattaaggtataaattaagacagttaaatgtgattaattaacaaagagttttgtttcttttgatgttattattcaatcacgttttgagtggtctctatacgcagcatgtggtgctcaagactgcgacagatatcgattcgaagccataccgacatggtgaagcaggaggaggacacgtgaacttggatttgtacgaaccaaacattaattaattagctatttgtctcttgaaccatcgatgtggagtgtgacttccttcttacggaagaacaaagaatgttctctttcttgtcttgtaagttattgattgatcgattcttgagtttgtaaaagttgccactagttgatgaatattattgagattgtttataatatatttattgtaatcatataagttagagatttactttatttatcatacgtatatatcgtggatttgttggcggaaaaagattctatcattaatggatttatgtaagacttgtatttaaataattgtaggctatggtccaaaaacaataatgaaaggaaatacttcattgtcggtatagttgagttgtattaaattttggttgcgacttaacaaaaaactaaaggagaattgggtgtgattgatcattgatggataccatttattttaaaaatagaaaataagtaacagaccatgtcgattacttatttccatattcgaaattatcattactatcatttatgtgtcatttgtaccgttcgcattacgtatctatttgtgaattaaaggattaagaacatcattagaaaatgtgttatcgttgggtctgtttttagttttctcaagtcccacccaactccatacaaacgtgatgtttacgaagttatacatgttgtttaatatcaatcattataaatttatcagaacggcgatgcaccatacaatataatattttatagaaaaaatccattttataacattagttttttttttctttttttttaacaaatgaataaataaaaaaaattatgcggttcaaagattgttttgaaaagcatatttttgtgtgcctaaaatcatgatttattaaaccgactaccgcaaatagaatacgaaaaatatcatggcttatgtattaataatttaatacgacccgataataaatagtttaatgtgtctagaccaaaaaaaaggttctgtctaggtacactgcaatacataaccgcaaacctttttgttagtattttataaaaagtattttatgtatggtgcgtgtatgtggttgactcgagataagtgtgtaattttaatgcagtgccgcttgcagaaatacgcatatattaatcttctttttttgtcgccatatgtgtcatttacaaaccaaaagtaatgtaccgactaaaaaattataaaaattggtgatattgtaatcattcttgtagagaaattaaatgggtgaatccaatgtgttacatgcccggcgggaatttcgggagttgtattttttttttggttgatgatcgaagcaacacatttttgtttttaaaacttatatgttcaatgttattgcaccgaagataaggccacatgcattgatgacaaaaagaacaaaaaaagaaaacttctctcattttatttatttatgtttagtcaaagtacaaacaaaattcacttacatactgttaatgtgcttgtatgtatcgtaaatgtaccaaaatacaaatagatcaaacaataatctaaatttccagacatgttccaactcgatagaatgggaaacaaagtgatgggaccaattatttctcgaagtattagatcatgttttggtcaatgtatatatgctgatatctaatttcgtataggtggaagtcgctcggtcgataattaaatttctcaaactgtatcgaggattgtgataaattcgatgtcgaacaaaaaaaattaaaacagcatatgaatgtacaaattaaaaacgtatacagatagtcacaatcgaatatatacttatatatatatatatatatatataaatacaaaacttttgagtgttggctttttgatattttgttttttaaataaatttgacgttgaaaaataaattctcccttttgtaaaacattattttatcatattcaagaaaatcctttaacaaaaaaacatttttatgtatggacttttattgaattgaaaaataaatgtggatagatattttgtgtggttgcgatggtcccttgccccttgggcactgaataaataatcacctaattttttgtttcatgtaatgaatgtgcctaaagataagcatcaaggaaagccatatgatccaaataaattaaacacacacttaccatttatttcttttttgcgttattatatattcattgtagcatatactagtatagtattatgaaagacacacaaccgcttttaaaaatggattttaatgctcgtacattaatgcatatgaaaagtatagttactcgacatgggtcatacaagggtatttgaattgcattatgattttgtgaagccattgacattttagcagccttccttttttactcgaacttcaactttattatataaacttggaaggacactaccaaattttaattaacaagttaacaaacgcggaaatgttcaagatatggttattacagaaaaaaaaaatgtggtgaggctactccatgcatgtgacattttgggaaaatattccgactttccaagtagtatggttttgtggtggacagaagataagacttctccactatgtcatgatgcgaacaacgttgcctcatttgattccgattctttcttttcctagcaacccactaactataataaactaacttctagaaagttcttaggcgtatatatatatatatatatatatatatatatataaccacctctctcgaacccatctaatacaggaagacgatttataattaaagcataagatgagaaaacatcaagaacacaaatatggttagtttaacctgtgaaatgatgaagaagatttgattagcctgatgattgaatcctcaatactcaactccaaaatagagtagtaatgggaaaaaaaaactcaactctaaaatagaattactcaaatttaaaatgaaaaaatgggttggaaataatcaatactcatacttgttcaaaagtcaaatttttattatagagcacatctaaatctccgccttattgattgatcgaattcgaagtaggataaggtcaatggaagacacgttattataatgtgaaagcctttcacttaaaggaaaaaaaccaatattcatttttttgcttgatttaatttctttttttttgtctatttcaaaattggcataatatgagtatatatatccttttcccattgtctaagctacaagaaaaaaattgaacaaacaaaaaaaaaactcggcattttaggacgtaattaaagtcaaatttaatttccttttcctccaactatttatattttcgaaataatacaatataatacacgttagtatctagaataaaagagaaaagacaaatcattaagaagaaagaaagcacttaaacttacttatagcatatattattttcaacatccgacgtaactaataccggttcatatttgtttattcatgttaatcataatgaacaaaatttagaatttccaacgtcgggaaaattgatttgcttgataaattaaaataactagagaaggagagaaaaaagaaagaggtggctttgagagttttttttttttttttttttgagttgaaaagaacacttttgttttgagtgattatttagttgtgaattgggtaaaagcttgacctagaagatgacacgatgttgctcaaaatgtgtaaacatctttcacaagtgcatgtgtaagtaaagcagttaaaataattataaaacaagaaaaatgattatttcttttactttattttccttactcatcatttcattcttccatttatctatcattcagactttgtgagaaagtaagaaagtccttttaaagaaagtgaaagttttcatctttttgattaatccatcttctttagtttcgcaaatgcgccgacaacgttttgacttcaaaaacaaaagtagaactcgtgtgtgaaaagcaagattctttctttcttttctttctggtaaatgttctaaattgtaattataatatccgaatattgcttttgaaaggatcatatatataaatctgacccgaaaaaaaaagctatatgtcttagaacatgtttcattatctatttcaaaaagatatacacaaaaagtaaccaaaatttatgttgtaagaacttaacatgtttcatgcaataaaatatatgcacacgtatggaaattccataatatagaaaaccctattttcaaagttgtagcgtgcataaaaggttagtttgacttttttgttatcatatttagagaaattgaactggagacaaaaaggctttttcacattgtaatgaaccgagaaagatgaagaaaacttaaaatttgatgctaataattaggaaaaaggtgattgtcgaagaagcaatatcacgcgttggcccttttcacccacaacaccaatctcatcttcacttctttttataacgatttaaatacttttaacacactagtgtagtttacaaaataagaatcgccacagtagtcatcgcatcttggtgtagctgctgccggtttttttcatgaatatttttttgcaatattgtacattcagaaatatcactgaactaaacagttacgtaattaagttctatacatttaatttaatcataacattttgatcgtattttgtcccccactaattaattttattggtttataaacattgtttcgatgcaaatactcatggcctagtaagagattgaaaaagataaattgaatttgcaaaattttcctgataaaaataaataaataaatagatatatcaaggagaagaaaatgcgtaaagggaaagggagagagagcatgcgttaccaaaaggggacatcataatttttgtggcctttaaggtaattttattaattgattaaagtgtttcttgattaatttattagcttaccaaaaagtagatttattttgtattataatcaacgcttaccaaaaagtaactagtcttccctacttaaaaataaaattaaaaactatacctaagtactactaattaacttaataacgtaagaaaaaaaaactataccttaccaaaaagttagcttagctcagtttgaaattttgaatacgattgtttgattttagtgaatctgaatagtgaatacttatacgattattcctgtttatttttgtcaactatgtatacgactttaggcgttgcacaattaaaaaaaacgtataccactttagggctaataatatagaagctcacatctaaaaactaaaacccgcttattatgatcttatgatcacatatctgataaaatctttaggccacgtttcgaaagtacacacgatttactcctaattagagagattataatatcaaactatagatttcgtggaaaaccaaagaagtaaaatcattggtccgcttgattatgtatatctattttcgaagttttaagaaaaagatgaatagaaaagttaataacaaagcaaataataaaacatggaaatagagtatatgtaatagactaatagtagttttaacctttaagccttttctcgtgctaaaatcatgtaagaattcttttgacattttaacaaaaaaaatgtaagaacataaataatgagagtcacgacagcttttgctttagttaagcacacgagaaatcatcgattgcaagttcatagttactatctcgcatcctaactaaaatgatacaaatgcattgagcctatatctctttttttctttgccataaagttattttttatatacatattgcaagagtaaattctaaggttgaaagtgctgtgcctgttatacgtaattaattcagtttttttttttttttttcttccgtaattaattcagtttcagttttcctttttttacatactttcaaacaaagtaaaggtagtcaacgtttagttgaaaattttaaagtgtgattgatagccagtataaagcaagatttttatcttttaatagtactaagttaaaattttaaatgactcaaagtaaacgcagatattatcacgtttactttaaaacgcgtattgactttgaatgacttgagtttttctattttagcaactagcaagcataactttgtatattagtttagtttagttttgttttgttttatctccttacaaaatcgtattacttttttttttgtcggacaaaatatagtattacgtactagttcctgctggagatccaaaacttctattatctacgcttttagtttatagtccaagttttgaattgtttttgtcctattaattaaatctttaatgttttcatataatcgaaagattttcaaaacatatatagaccatcataatttttctaaccctattaaatcatatcagcttccatttaaaacgttgatataatattcatctacttccacctactacttgttcttaaagtgtgtaactatatatcacgtgaactgaattttgccatgaacatctcatgaacgaggtacctaaaaatacatgttcctgttattcacttttgaattttgtttctaatatatatcacggagaaaatgttgaattctgaaaagttgacatttaacaagaaatgttggttaaagacttaaagccatgcttcgagatgcgacttcaaatttttttcgtatcacatatttgtgttaatgacattttttgttatcactcgtttacaagttatctatatcaacaaaggcaacaaaaaaaacaaaatagaaaaaaaaaaaaatcaccttatatacatgaatggtggatttagatgaaaaaatggttgtgaaaggaagtcgagaatctaaactaatctaatggaaaatttaaataaaatgttaagtttgtcttataaatgcatctcatagtatatgttgcataccactctcaattagaataatggttcgaataaagaaaaaaaccaaattatttgctttaaaatttatgtaaaagaatattaattattttctaaacaacaatatataagcaaaaagtataatttttggtgcctttaaagatgtgattgtcatattaaaaagaaaatttccctaaagaattaatggtctaattatttagctagcttgtactccagaccaaacctgttcttctgatggctcaaacttaaaaaaacttaggtgataaatgcaacgaaccaacagaaaaaaatcaatttaactcacatccacaattttttttggttcataattaccacatccacaattattattattacttttattatactcccacaatatttttttgccgtatgtatgaaacataccaatttttatagagaggcagagatacgcgtacagcttttataattgaaaagggcaaaagtaaagtagtacttattattcacttcttcttcaccttttctctttgaattttcttcttcactctgcaacttctcttccccacctttctatatttactattttctatcttcaatttgttggatccgaaagttccttccttttttgtttttattattctttattcaaaagccagtttttgtgatccatttgaaatcccaatttgtctacttctcccaataataactctttttatatctctttttttcttcctttacttcagaaaacaagtctaccttcttctcttcttctaccttcttctcttataaaacctatctaaagccttttcatttttttggccggtgggatattgtttgaatgagttcaaccaaaaatcttatatattcttatccttttttttcccgatcagaactcagttcataaaacttgtctgaataatttaagaacccaactcaaaagattcaatttttcgtttttccattttccttcaaagtcttagcctaataaaagattcgatttttatacaattatttaatacccacatataattgaagaaagagagacagagagataacacaaaagtggaagtaaacgaagaacgatgagagctggtttaagtacgattcaacagactctgacgccggaggctgccaccgttttaaaccaatcaatcgccgaagccgcgcgtcgtaatcacggccaaaccactcctctccacgttgcagccactcttctagcttctcctgctgggtttctccgacgagcttgtatccgatctcaccccaattcttctcatcctttacagtgtcgagccctcgagctctgcttcagcgtcgccttagagcgtctcccaacagctacaaccactccggggaatgatccaccgatctcaaacgcgcttatggcggcgcttaaacgagctcaagctcatcaacgccgtggttgtccggagcaacaacagcaaccgttgttggccgttaaagttgagcttgaacagctcattatctcgattttggatgatccgagtgttagtcgggttatgagagaagctagcttttcaagtcccgccgttaaagctacaattgaacagtcgttgaataattcggttactccgacgccgattcctagtgtttcttcagtcgggttgaattttagacccggtggtggaggtccgatgacccggaattcgtatcttaatccacggttacaacagaacgcttcgtcggtacaatcaggggtgagtaagaacgatgatgtggagcgggttatggatatattgggtcgggcgaagaagaaaaacccggttttggttggtgattcggagccgggtcgggttattcgtgagatccttaagaaaattgaagtcggtgaagttgggaatttagcggtgaagaactcaaaggtggtttctttagaggagattagttccgataaggctttaagaattaaggaattagatgggttgcttcagacccgattaaagaattcggatcctattggtggcggcggagtgatacttgatcttggtgacttgaaatggctagtggagcaaccgagttcaacgcaaccgccggctacggttgcggtggagattgggaggacggcggtggtggagttacggaggcttttggagaagtttgaaggaagactctggtttatagggacggcgacgtgtgagacttatttaagatgtcaagtttatcatccatcagtggagactgattgggatcttcaagctgtgtcggtggcagctaaagctccagcgtctggcgttttcccgaggtgggttgtgttaaagtttcttctttttgctaaagaaaaatctcagcttttatgattttttttcttagcctagattcatgttttgattcaggcttgcgaacaatttggaatcattcacgccattgaagagctttgtgcctgcgaataggacattgaaatgttgtccacagtgtttacagagttacgagcgagaacttgctgagattgattcagtgtcttctccagaggttaaatctgaagtagctcagcctaaacagttgccacagtggctgttgaaagctaaaccggttgatcgtttaccggtaagttccggttattgaatcttctcttcaacaattgcaatggctttatgatatgattgcagatcataaatttatcagttttgtaatgtttttattacagcaagcaaagattgaagaagtgcagaagaaatggaatgatgcatgcgtgcgtcttcatcctagctttcataacaagaacgagaggattgttccgatcccggttcctataacgttgacaacgagcccttacagtcctaacatgcttcttcgtcagccgttgcagcctaagttacagcctaatagagagttgcgtgagagggtacacttgaagcctatgagtcctttggtggctgagcaggccaagaagaagagtcctcccgggagcccggttcagaccgatcttgttcttggacgagcagaggtttgttgatttgaatgtttgtatactgtgatgaaaatgtttatctaatcgaaatcacaaacctgacgctaaatacttgcgtttgcgtatttcaggattcggagaaagcaggagatgtgcaagtaagagactttctcggctgcatatcgtctgaatcagtgcagaacaataataacatcagtgttttgcaaaaggagaatcttgggaattcgttagacattgatttgtttaagaagctgttgaagggaatgaccgagaaagtttggtggcagaatgatgcagccgctgcggtggctgcaactgttagtcagtgcaagctcgggaatgggaaacgacgcggtgttttatcaaagggagatgtctggttacttttttcaggaccggatagagtggggaagagaaaaatggtgtcagctctgtcttctcttgtgtatgggacgaatccaataatgattcagctcgggtcgagacaagatgctggagatggaaattctagtttccgtggtaaaaccgcgttggataagattgcggaaactgttaagaggagtccgttctctgttatcttgcttgaagatattgacgaagctgatatgttggtgcgtggaagcataaaacaggcaatggatagaggcagaatccgtgactcgcatggccgtgagatcagtttaggtaacgtgatctttgttatgacagcgagctggcatttcgcagggacgaaaacatcgttcctagacaatgaagcaaaactacgagatttggctagcgaaagctggcgtttgaggttgtgcatgcgggagaaatttgggaaacgacgagcaagttggctgtgtagcgacgaggagaggctgacgaaaccgaagaaagaacatggatcgggtttatctttcgatctgaaccaagccgctgatacggatgatggttctcataatacgagcgatctaacaacagataatgatcaagacgagcaaggttttagtggaaagctgtcactacaatgcgttccatttgcattccacgatatggttagccgtgtagatgatgcggtagcgtttcgagcagttgatttcgcagctgtgagacggagaatcacagaaacattatctgagagattcgaaacgatcataggcgaatcactatcagtagaagtcgaggaagaggcacttcagagaatcttgagtggagtgtggttaggccaaacagagttagaggaatggattgagaaagcgattgttccggtgttgagccaacttaaggctcgagtttcgtcttctggtacttacggtgactgtacggttgctcggctcgagctagatgaagattccggtgaacgaaacgccggtgatttactgccgacaactattactttggcagtatgagagttgtaaaacagagattggagttttgttgttacagtggactgtggaaaagggtagagatgtaaatatgtctcaactggttttggcggggggaaagggaaacagttaggggtaaaaatagtaaaaaaaaaggtgtttatagttctttacttctttttgttttactccacagtctagatttttgttgtgttttatgtatggtaacgggaggggtgatttatgtagcgattatagatatatttatttgatagataaataatgaaagattaataaagttaaaagtatgtttttgttttctcagttacaagattaatctaaagaagttcaaacaattgcattttctttagtcgtcgtgtatatttggggaccatttgatttaagaagaagtgtaaaagcagtttttaatggcagaaagaaaatctgtaactacttaggttcttttgcatttgtctatagagaacgaaaaaaatgtaagagaaaaagacaaaaatggaaagaaaaaaggcaaacaaaaagtttccaaaaaaagaaagataacacactttaaaagttgaaagctaaagaagataacaaaaaatattaaattaaaacaaagtttggttcactgaatgatgaacattgcatgtgtttcgtcatttaattatataaattcttcaattattattgcaatttgaccttttcctcgtactctttttttctttttgttaataattaattaataactagtagtattaaattattactttatcctttagaagccttacctgttacaactacaaaaaggtatgacgcaaaagtctcctagatccaatactttttaactaaaatgtatgaaatctaacgtataaagttgtataaatggctaattgtttgtttgcgtcgagataaagggggaaaagctgttgtattgtgatgtcaaaataattagtactttaatatagtggttggataacactaaacataacctttttgatcaattagggtagatttagatttatcgaatgcatgagaattgtgaaataattaaataatgtatgcccaataaatgtgaaaaagatggcaacttgtaagaaaattggagggtttgctataaatttattgacgcgtttgatttggacaactcaacttcttgtagagaagactaagctgtcttctagttcaaagctttcatgaaatatctaatctttaaaaccacaatagtgaatgatccatgtgaaaaaataataatataaaattatataattgagaagataatataatgctgatgttagaaaaagagagtgtatattaacatacaaaattttaaattcagtcatcactagacacaattgttgacctgtacctcatgggtttaatcctgtgcatgattgagaaaaaaagaagctaaccattaaattatatataagaatgggcctgaagatagcccaataaagagaccaaaagagtatgtatgtaatgtacgtaaatgatgtaaaagtctaaaagagtaaactagtaacttggtctatttcgaaaacaaatcgtttaagtagcaaatttgttatgtaatttactttagtttgggatcagttttaacaaaatttgcttgtaactaaatcttttcgactgtccatttttaaaagtgagcaaagttgaggcacatttgatgaaaaaacatatccatcatttctaccaaacatgcaacataaccttaaattaaaagatcacaaagttcacaacttcaaaagctaaccataaatccgagagataaaatactacagagtacaagcattccttttttttttcgtagagtacaagcattccataagagcctagagagaagggtttcatcgatcatccataaactttaaacgacgacaaacgataaataaacttcaattcttcacgaagtgcactttgatggagcgaacaacatcttcttcgcgtataatctcacatatgattacgtctccttgctttactttgttcctcgtaaacatttcgttccacttgtatatcacaacacgatctttccatttcccaacctttctcgttaattccccgaatccatcgattagattgaccgtgccgtcaaagtttaagccatagtcttttattacttgcctagcaattacctacgatcaaccaacataagactagtaaatacatagttaatttttcacaacaaagcaacataaagttcaaaaggctttattaccaatatacgcctggaacacgatgaagttgaaatgaagaacgggttattgggatcagcaagaaaaatttgcggagtaatagaagcaagagaatcatcacgatgctttcttgtaacccttcctgctgaagaagatcactcaataagtatttttagcatcaatacaaacaaaaactagacaagtttggtttacctttcttggaacttccactagctttgttaacttcatcacaaatcgctgtatcataatcatcatcatcatcatcaccaacttcatcgctgcttccgagagaaagagaaactatcatgttctcatcggtatctccttcttcttccatatgaggatcaccatcaccattggtctcatcttcatcatccgatatctcttgtattttgataggagcggttggctccaaggggaggccattccggtggatgcgtacccaaaagctccgggaaccatcataggtgaataagagaaagtctctgtcaataagaccattgtctttgacaaactttacccaaccttcttgcaagctaataatcacctcttggctttttgtccattggacattccaaaatcttccttccggattcttgagaacagctgtctgagggagagggtttggataatacctgttgtagcttcttgggattacctacgaaatgacaatggcacacacataggttaaatgttccacttagtgacaaggaaaccaaactaacgtgacatcaagaattaaggaatcagatttgaagctgaacatagcaaatcctaagagatcaggaacagaaccaaactcctaagaaattatgaacaagaccagtaccctagacatcaagaatagaaccaaaccctaagaaattaggaacagaaccagacccttagacatcaagaaccgaaccaaaccttaacaaagttcacttttggactctcgaatagtagaggaaagaggattcaaaggtcaagagtagatgaatcaaactaacagttcaacagaacagagaaatcaaaagttatgtgttaaacagaaacagagccaagagagaaattcatctactaaggttacacgaacgcaaaacacacaacaaaccattcaagaataatctcatcaaaaattcaaaataatcttaagtcattctacaatctaacatgacagataatttggagaagataaacacgaaagatactagttacttaccaaaagttgagaatcttcatgggagttgaagatcttgaggaaatctggatatggaggaaacccattttctaacaccatcttcttctttttttgtctttgcttgagtcaggattctacaaatgaaaaagctgtagcgttatgtagaatcttcaacaatgtagttaatgtatgtgagagtctttgagtgtgagattgggttttgcgtgagtgtgtgttgtaccactcaaatcagtttagtcaaagtcataaagcaaatttttagatacgtcatttgcagagagagctttgatactggaattggcaataaacacggatatatttgcagagagctttgaaaaactttgtactagagagactcccaaaatagaaaatttgtacaaataaatgatataaaaatgggtcatgtcacttgtgataggtttgtttcaaaatctggtttcaaataagcccaatcataagacatgtatactcattaaacaaatatgggcctgtatgggccgacatcaggacaagagaataaaatatggttgagaccttgacgttttaaaaaggttgtaaagaaaaacaatgttaacacgtatatgggctttattttgggctgagtttttaacattaggcctggctctgtcaaagatttctgtcatattcgctttactataaaaaatacagtacttgaacgtatatcttaaaacgaccgtgttttcttatttagggtgtaagtgaacagttgtacccttttttcttttcttttttagtgcaaagtgaaacagtagtttcttgtgttattttttggcaattttcccaaacctcttacatgaataatattgctaagtttttgcaaaaaataaagtttatttccgagttgacaaaaataattagtattttttctgacccgaattaaaaatatggagtatcaaagtcgtcgtgccccactttctatattggtataagggattctttgacttagacaatctgaacgttgaagaattggtaaatatgcatgcatgttacacttcttcaatttcgaaaaacttacttttgtttcactgtttctgcatataattaagaaattaaaaacccatcagagagaaaacagagaaagagacagaagcttgacaatgtattgtcacatcccatagttttgtgatgattacacctatttatacatttgcagctttttgtttcttctcctcttacatataaaaacgccattaaatacaatcaaactgtttttttttttcctttaaacaaatatatcatcttgtttagttggagattccgagattgtcttaactcttaaccaaattcattaaaaatatacaatgtaaagtaagttgtctaattataccgtacgtgtgttttaatcgaaactatacatgtatctatttaggaaaaattattcatcttttttgctttgagtttggaggtgatttgatgtgtttgatatccaaaagagagagggaggtgagcgttttgtattgactattaatttactacacgagagagagggtagagaaggacataacacaaatccaatgaatatcctgtctagctttatataaaatttagtattgactattgcttggcagtttcaattttgaacttaacttatttttctgaaaatgggaagccctaatttttcttaaatgataagaaaagaggacagatgaaattttaaaggtcaaatgggaaactccccaaatttcgtaattcatacggtaaaaagtgtggcataaaccaacagtctcagctaaaactaaaatcttaaaaaccgaagcaattcttgataaaaaaaagcgagccaaacttttttctcaaaaaacgatcttttttttttttttatcaaaaacctctttaaaattaaaattgttcgaatttttcatacgatcatgttaaattcggagcataatatgtgattttttctcattttctactataaatctagagcatatgcatgatttacccaaaatactgtctttatgcttttaaagtgtgtgaggtttttagcctctttacctctagctttcttactcacaagcacacaactactaacttgaagcattaagaactgacttgaagaatgttgaacagagtgcttatcaaagtgcttatcaactagaaattcatttaacgtgtaacttcagctatccttttgtatgggcactcgtattttgttgtgattttttttttcttagattctgactatttgtggaattaatcacattactttttcaatgtaacgtgtaaaagtagattaatagaaaaaacatgtagattaatagagagctttgcatgttcttgcattttttttatctctacatatacttcattcatagaattaaatttggaatttacacactttttgattattaaataattgtttatataacctttttgtaaatgtatgtatatttttattaatgttgattttgttttacgatttctatggcttccattaatgttttttttttgttttaaatagtactggtctagcttccattaattttatcctcttatttccctatataaacacaaacttcacctgccctctcacatcatcacttcagagcaaaagcatcatatatatcattcctcttcttcttgattaggatcatgatgatcatcatcataatcatcatgatatttatgatcataatgatgatcgtttctctctttcaactttttctatcttctccactacatcatggttgtactttcgaacgtgtgactatctcacggagaagaagatttcttggacattagtgttccattggcattatcctcgctgagcttttttttttctctatgaaaacagaaaaaaacaaaaaatagttttgtttctactaaatcagaaagttcttctataatttagaagatttttcttgaccttgcaaggcttattagttttgtattgttcttttattttcttttatcttctcttcatttttgtattttattttgtattggtttgttgtttctattcctcctgagctttatgtataattcactactaatcccataatttctcagttattagttcctctgaaacgtctatctaaatatatgtaatcttcgtttatctgttaagtgtttgataagtgataccttaacgatgctaatggctacgcaagaaattcactctcaaacataattttatatacacaccatttcaatgtaatggcaaggccaaattaattatttgtattacaacattttcacttattacaaaatgaataatcaccacaccattcacagaatcaattagcacatttttaatcccaaaaaaactgggatcaaaaattttataaaaaaggtgaaaaaaaagaggattgagtttgagttagcaagcacttccaccggttgtaacacaatggttaagtgcagaaaaccaagaacgtttcccttcaacctgcgacgttgatcgcctgaatcctacaccggatcttgaatatgatccaccaattaaccggcttcgaggttcatcaacatctgagccaccaaggcagagacttggaggaaaccggcggcagctaagagaccgaaacgctgatgatctagcggattgtggagttcgagaacccgttcttgacacaaccggtttacaactgtagtgagggttagttaggagagctgtgtctaagacatcagaggagcaagtgcagaaggacaaggagatgcttgttcttgatgatgttgatgttcttgttgttgccgttgtatggggaagtttggtgaaagatacaatgccattgcgacagagaggacacgggacagagcctggtgtgacgtttgaggtctttgacgatgttatgcttgtggtgcttaggtataatgcacagtttgtgcagaactcatgagcacatcctgttatgtcacacacaacaatcaattcaatgttttaagcaaagatcattttcggtagtgaaagtggtacattaccatctgctgccacagtgcattttctttccaaacaaacggcacaagggtcacgacatggagtcagacaatcgttttctcgccagccgcattctctgaaatccacaaacgaaaaaagaccaatcagccacagagatcatgcgatcatatagggtgtttcagttaggtgtaaagtttacatactgagcaatattgacaatgctcattaaaggaaggcagaggaaaggagaggggacatttggcaaatggagttgtggttgttctgttgttgggttcaggatttcttccagccagtttcggtgccatgaacgagctaccatcattggtgtccatctaaaaccaaaacatgaagcgaattaagacattgaggtctatatcaaactggttgattggatttagcatgctgagaaatagagtgatctaatacccgttggagtttacggcagctaaacaagcacccttactgatcaaaagctgagaaaaacaaatgccaaatgaattcatatgtgaactttaaacgaaacataacagaagcatcatgattgtctagttaagcatgtatacctggcaacactgcgtgtttccaccacatgaagcataatggagagctgtactcccagcaccttcaatatataaaatcaaagagccggagcgaaaaacaaaattaagtctttcacataaagaatctcttcactcattgtcaaagttaatcaattagagcatatgatagtaacctataagatctatagtagttccatcttccacagtgacctgagtaaccgaagctcccaaatccaagagtaactgcaccgtctctatatgtccgttcaaagccgccacatgaagaggtgtgattccaccatctgctgctctgttgatcacttcgtgaagaacactacaaccacaacatccaaagaacacattcaactaatcatcatcaagtgactacagcattacctcaattctttacaaaaaacacttttgacctagaatcgaatccagcaactgaagttttcttattctttaaaaggctccagcaattaggaacacttggtatatactccgaaagcaagatcctgatacaccgagggtgaccatttaaagccgcaaggtgtaaagcagtaccaccatttaagtaatctgatctgtgaatctaaaacccgaacaatcaagaaacacaatcatcattgttccaatatccctgacatatttttaaatcacaatcagtcagaagagttgatcaaagtcttacattagcaccaaaaagaatcagaatcaaaacaacctcccaatgaccatgttgacaagcttgcatcaaagccgtctgtttccaaaaatttcttgtattcagactacttcaaaaccaatcaataatgcaaagaacaaaaagacactaatcacaacacctgtccacggtagttccggagattaatatcaactcctgattccaccaacagagaaactatctgaagataaacaaaacccaaatcaccaatcaccataaaagtcagaactttagaatctctaatcttacaaagtattgatctttcaagtaattacagttacctcgtggtggccttgagcggcggagtaatgaagaggagagttacgaacgccaaaagtagagtaacgagcgagtcttggattgtaatctaagagagctttagcttcctgtaaatcaccgtctctggccgctgatactaagcgttcgccggacgcagaacaaccgaatgagtttccgacgaggcttagaaacctcatcgttttacgatacaaaattgaaattttgatcggatcaaccctaacaaatcaccatcaacacaacaacacgaacaaattttattggattcacaatttgcagcaaacccaattcgagaaccagctcggaagaatcgaagaattgaatttaatttcaaatgattgcaacaagaaaaatttggtttttattttcttcctctgtttttgttgttgttggtgttctttaattctcttatgtacagatcagatcatcatcatcatcatcataatgatccctctttaagaaagaaagaaactttaaagaattaaccaaaaaaaaatcaaaactttaaaagaattgaccaaaaaaagctttaaactttagaggaaagatcatccagaaaacttctctgacaattgtaatacagagaacatcaaaaagaatggtgaaattaagttgtgggattttttttttggtcaattgattaaggaaaataacaaacaataataacaaattggtgattactttatttttaaaccaaaaatggaaaagaattgttctaaattttttattgtgtgtggaggatctcttaatattttgtgatggtgacactaattaattgacttttaattatttgaacaaaaaaaaaatatgacaaagccaacgttgtagccagaggtttcgataaaccaatagccggaattcgcgcgtttttttgttttaaccaaaatcttaatgattataaagattctctaacaatgaaaaaaaaaagacattcttcatcacaccataagaaagctttctcctttattacatataattaaataaataatcttactatactgcgtaattgaataaatataggttctttttgtgccaacaaataatgattcaattagcaagtctccaaaagtaacatgacattagtggaaaaacaagtgtataataatgaaatgtggaggagcatgtgggtcgtgtcacgtcatgcttataattgcatttgcattagcaaacctataacattaatgacttcaaattttaacattagcaaatcagaatgatcatgccaactctcagcaaatatatttatcaaaaaaactctcaacaaatattacttgattttaaagatgacccaagctatcttcaatctcactttctgtagaatcactaatttgtgtctcacaattgtgcaaaactgtggccagttgctgtaaattgacagaaaattctttagttgacaatttgtcttgtactttggaacttgtagcagagtttctttgtccagagttaacactatccaaactaaactccaactcccaaactggatgtacaagcttaaatctccacttgtgctttatgtggaacttctccacaccaaaaatgagttgtgtaattcagtctgaaacatgtccactattccacatctatgttctctcgagtccacatcacacaatcaagtaggtgcatgtgcacatgttggaaccacaaacacaacaccctcactgtcctagtgttttgtaagagagagatgtgaagtagtctagaatgtctcatcaagtcgtcctccaaatgtaaccatatatcctcaccttctgtacacattttcaaaatagctgcaatggaaagtgaagttcctgaaaagtctagagtataaccagctcaattttgactttctgatatcctttgttgaatggccaactccatagacattaacacacactcatagtttggcttcatagtctgctttgacaagccagatccagacttttgaacattaattctcattccttcccatgcactgcttcaatttcgcgagaaacatcttgcataagcctatgtcccaaaagtttcttcaagttctcaaacaacatgcactgcagctttctcgaattccacctcacaacagaacttgttttttgtcattttgatctcctctaagctaaatttaaacttgaatttccaagctttagggaacttcatatggttcatgtctctgacatactgcatcatcctcattttgcacctactgttccagcttcccttgagtctttttatgttgttcttggtatagccctctgcaaatacgcatgcttgtaattttgtcaggctactttttttcttcatctcgttgacaaatctataacagattctgttaaagtgtctgtctttcgttcgtaagatcattacgttcatataacaatatctttgatgcttgttttgttattcccaattgtcttgattaacgaagaaaaaaacgaatccttttaattttttctcctctgtttgttaatccgttactgctctgttagtctaatgtcaaagaaaccacgttgcttttgaacaacaatacatctgtattgggaaatctatgaatacttgacttctatatttaggaaaaccacaactcactttgcactgaaacgtcaacgttttgtttctttactttttttggttacaataacagagtcttcctattattcactttttttatcttctttcacttatttccccatctccttcctcttgaatctttctcaagaaaaccatggatcagaaaagtgattcatttctctctgtttcatcgatttcattttcatattcttcttcaacagacaaagactttgatctgatatgcatgattagtcccatcgtacttctctacatcactctcctctccatcatcttctttgtagctgctttgattcaccttctggtcaaattcttacatagaccccaaactcgacttgacgacgcctatgatggcattacagagagttctactgctctgcaaggtcggtatcaaacacggtttaatctccatgacgcagaaattgaccaatcattcattgatgcattgcccttgttacattacaagaccatgattggtcttcgacacgacctctctgattgcgccgtttgtctcagagagttcacagccgaagacgagctccggctcttaccaaaatgcagccatgcattccatgtggagtgcatcgacacgtggctcctcacaaactcaacatgtcctctctgcagggacaacctcctcctccttggcctcactggcactgcttcgtcttccactattgtccttgtgcatgaatctgatggtgacaattcccaagactccgattcgtcgttcatgttaaccgatcttgatgatgtcgagtcaaaatgaggcctaagtggctgctgatttcttgactgggaagttaatggcattaaactctagataggcctaattgggtcaacgtgaagcctgtattcttataaccgtccggcccattttcttttgccatcaactcatatacgtgtacatgtattggttaaatcctaccaaacgaaccatgttggaattgaaacaacaataatggcataaagtatgcataaatgaggaccacaacagatacattgaacattagacattgcaagattggattggcagagacaggttcagtggtgatggccttgatatgggttccttgtctctttttactctgtcaaaacatttttcagacaacttgtttccttccatatcgttgtcatctttacagtttctctatatatatggctttatatcttagcttggagtgcaagaagtgatgaagatggtgaagtgtaagaaggttaggcaccgcggtcgcaaaggacaaaaggagaaacccaagtttcgagaaacttgtatgcaaagaaacctcgggatccttcgcaggattgtaccaggctgtgaagagatcgaagacgaggaagccttgtttctcaagtcaattcagcatctcttgcttctcaaatctcaggttaatttacttaaaaagctagctgatgtatgtggagtctaattaaaagaacgtaagttctcaagttgtttatgcattacattataagatcaagcgagagagacataagaaaacagaggaggggataaagtaaaattacacagagaaaaacgatgaacaaggcgatgaatttttttagtttttgttgtagaaagtgagagcgtaatttgtacttaaggaggaagaagagagagtgagcatgtgttggatcgttgtgacccatgtcttgtaacgattgtaatcgtcggccatgtctaacttgatagctcctctgttcgtcctcaggacaatgagataacaagtgtcctctatgttgttgtcttcgctatctgaatctttgtaaagttccacatgaacattcgtcacaatacctaaacacaaaacacatacaaaacaatgttttaaatcatagcttgaaggttaagtaacctaaaacaaaaaaaaagattgagaagctagctgcatactttctttcttagtcctgagtagattatgtttcttcattttaagaatcacctgtggagatcaaacacaagatcatcgattagtagacgtcattggttaagagtaagagggattagagccaagtttaggacctttccatctttgtttaagaccatagaaaccgtcctagccttgaaatcccctgttttaatccaaagatctctttagtctctctacaaaacaaaggagttcaacaagaaaaacagaggatttatataccatctggtgtctcgacgaagagatctgttcccttagcaagaacagatgtgttcttatcgaattcaggaggcaaataagaagagtcttcaataggcaacacaggtgcagagccattcaatctattaatcttgcaacctcttcttgctttcagcgtcgcggcacctctcaacgcttattttaccaagcaccaatgtctcagaaacagagcattcttatagaaacaaaaacaaaaaacaatcttcttacaagttgtagctgaggcagtgagagtgagtatctcactaacacttgtcccggtcatggctgaaccaatcatcgtgctgagctggtctctgtttgctcccattgtctctgccatttgcgcacattgtgccgccaccacagccgcagcagaagccacagcagtctccctcgtgctaggtcgaccgtttccaccatcttttccagcgttctctgaagccacggcggcgagagcagcggcaagaccagccaatgacacggcggcgtggacttcagctctctgtagcctcacttcttcctttcgtttcgcctttatctctttccaccatttctttatcgacggcgtaattttccatggaagtttctacaaaaccattattgttttggtttagaaaaccaatattgttgatttgataaatcaaaaccaaacgaaatggccaaaagggttttacaagtttcttgcggaaaaagccttcgtagctcaattccgggtgcattgcttgttgcatccatatccatgactgttcacatcattcaacaaattatagtatcaatatttaatctcttaactttcttcacttaattgtatatgtcattctatcatgtagcagttttattttcaatttctacaattccaatatgctgtcgtattacaatttaaatcatatatataccgaattttcattcgaatgtgcatcaaataaacatagacaacataaaaatgaggaatatatgttgaaaactatgatatcataatgttaaacgttactgtgatttttgttattttaaaaactatattttgcacacctaatttgttataccttcacatcattggttttccatgaaggcatcgagggcttaaaatctggatcgtccatcttcatgctcgtatccatcatctacttttacaatcatcataaattaaacactaaccaacaaaattgaagaaaatataacaaaaaacaatctctggttacttacagcacaagaaacaggacttgagtcgccttgaaacttggcgatcgatgtctcgacgggaacaatggaacgatcgtagaggatagggtctggatgaagtgattgaacagcgaaattacaccattctcgagacagaaagtccatagtatctggatgtgcctctgaaggcgatggattatggtctgttgatgttaatgctaatgatagttccattgtttttttttgtttttggattcgaagattatgactttgagaatttgttgattgatcatatatatttatgttatggtatgaaagaggaaacgattaattaatttctattaaaattctggtgtggg

SEQ ID NO: 921 - DNA, 79676 bp, Arabidopsis thaliana
gatctaccttattattcttttcaaaaaaggtttgatggggagcatcatttccatgggtgggaatgatttgggccatgatcaaagtgattatcgttagacacattttcttttttatatctaaaaggatatggaggggtttagtctcaacttttctatcaaaatgggaattaggtgtctgtaataatgtcgttttatcattactcattagtagtaatacttttgattttgattggttgattagtaacttagtactcatgattttgcataatagtattaagccattcaagaaaaaaaagagagttattgattgcaaaaatctgcagaatgtcgagatattcaactattgtactatttctataacacaacgaaaagggtttccattatttcacgtccaagcatgaaagccaaatgtcggattttttttttttgtattttggtttccgattaaaaaaatgtagttaagcagataaagtgtggataactttagtacagtactatgttttggttcagatacaaatatatcaaaaacaatgagaagtcttaactatatcattattgaaaatactttgtattgttgtttgaaaagattgaacgatttgatgtgatgtgaaatgagttaaccataataactaattgatttatcagagaggaaatgcatacacataaatagatgctaacttgtaaaccattattgacaacaatggattggaccctcttacatctctttttcaaccatctttaaatttaaaccataggttcaagcgaagcacacaacaacaacatacatttaaatataatattttgggcctcttaacacttttcactcattcacaagtgattcatagctggatttctatcccaaaattctaacatgtatatgaattgaaaagatttggtcttcaactaaattaaaatgctttgagaaacgcaaaactggactataaccaatatacgtttatctgattgtagaagaattaataaagttcatatctgaatgctaagtgatttaaacaagttatattggaaaagatcatagataaagtgcaaatgtagttatcaatcagagtaacgacattgtatagatagataaagaggcataatcatgaacaagcatgcaaagggtcttaggctcttagctttcgtaaaaaaggaagaagacaagttaatagtatatggttcaaataactcttctacttttcaatcaaagatattttaactaattaatcattcattagcgacatactttcttaattaataatcctttcttattggctttagcctttaagtttctttttcaatatcaaaatcgtgtgtttatcaaatcaaagatggctgattaaagatgttatcatttgaccatgtgactctcactttaaataaatgccaactgccaagagattttcatgtgtgtaccgacagaaagagaatttagtttataaattaatttagaaaaggctattaacaggttaaaagattagtgctaagttaagcatagcaagatgtcgtcaattttagtgtatagcaatttatttagagtcaatgaatctaactagccgatccgaaatcactcgagtactctcgtgcggttgtgccgccaacctaaaccggtttttttttttttttctttcaataccaaaacatcataacccaaatcttataccgacaaaacagtgatccttgcgcttcacatgtacgcccaaactcaacccatcaactcggcccattctagacccaatgatttagtcaacatgtaaaaatttggtaatgattaacaaagaacacactataaactattaagttacatattctgttcattttaacgattatagatttctgcgtacatctaacgttttttttccattacgttttttttttcttttttttttgttgtgtgtgttaaaatttcctttcgtatatacttgttgcgtatgagttactacgtttctttaattttgttagaccgaaaaaagaaaagagtttgtgccctattgtaatgaactaataatgtaattagttgtattataaacatttatatcaacgtaacctaaatttacatcactacatactacatatataatgaaatgctacaactcaagtggtcttcaaattaataatatgaaattaacccataatttacatgaccagcagtaaatcgataattcattcgaaaattgtaagatgataagatagtgctatcctatatatgtacatggacttacatttaaatcattagctacttcatattcacaagagtgatgcatgtacatttatttgttcctacgatcgttggttaagtttcgggtgaataaatcgacggctgcgacggttcgcatgacgtccacttgtgctcggagatagacaatgtagtcaagtgtctctcttatcaaataatctttgtcgtctatcaactcacctcccggtacaagactcttaagcaagtccgtacgttttctcacccaggttttcgccgtgaaattgccatttcgtctaagaatgttacaacggttcttcatccgatttcgagctttttttagtattcgacgtgccatgggtttgtttgctgtcttatttccgctcctagaaataagagcgcggctccatacggtagagccatttcgagcagctgccatggctaagtccgatgatagtctaatcgcatttttcctttccgttacgttcaaaggatgttcgatagaagaatctaacatgtggagagtatttatccatttcttgataaattcttgcttcaccatgttgtacgtgttcatcatatcctaataaaataaacataaatgtatttcagggaaatatcatgatctgaatataaacgttagattgtatactcactgttttaatcatccacattttaacggatatatataattgcacatacgctatatatatagcttcgtcgtaaaacatttccttagatacacttttaattataaacggtagatgtgaatagaaaagtgacgttaatgaaatcaataaatacttttaccttacgcttatttctgttttaagatatccaaatagctcgatagtgtctgaaacttaaaccctagaaagaagtgagagagagggagagagattagattgaagaagagaattaatatagaagaaatgagagtgtggaggcatttattggatcaaaggaaaagaagtgaaattaagagtggggctagaagagaaagacagagcacatggacgcacatggttcaacataccccactttctctccaaccctaaataccatttatactcatcatcatttaagcttcaattattttggtccatttttatacttaaaaccgttttccatatcttattctctattcataaacccataaaaacggtaggttgatcggttgatcggttgatccaacatttgtttctattatatggactttcgtagttgtatgatttgacaaatttcaccaacttagaaaactagagtaaccggtagaattattagaaaggggaaaaaaaaaagaataatcgtacgtttaacgttcatgacttcacgaaaatcttttgataagagtagtactttgtacaacttttgaatgaactatttaagacttctaccacgaattgaaacatgtttttacggtaaagcatagaaaaaaatagcatgagtccggaaaatgtggtaaacgctcaagactttcatgcaatggacctataattttctccgggaaaagaaaaagattcaattgaagtacgtgttgaatttttcacatggcctcgatgaacgtttgttcttattatattgatcaaatgacttcaacactttagatcgatcatcttgattattcttggtgtctgaaagatatctaatattctgtttctacccaccctaaatggctaaatatccaattattgttttacggtctcgcagtatgaagatacagagcttaattaatatattgatccaatgcttttcaacaaaaagtattggtggaattcgatgattactaatgtttacttatgtatacaacttatacacacatactatcaaatttgaagctttgttatgatacgacgataacatgactttggtattttatgtaaaatgtacttgtagacgagagaacgatttgggaattatgtatatatagcatcctcggcaggttaacaagtggacgtagacacgtgtatgggccccgtaatgctcttaagaaggcctacttcgctctcatttatcagcccactctgcttcctcctttctatgtaactctttctaaatggtagaacctctcgtcgtccattaaaatcaaagtagaaaaacctctttgaagtaaatatttgaatagtcagtttgatgaaaataacaaaactaatttaatagttagtgatttatatatcaaaggaaatttgtgtatatcttttgcattggcaattatagttactaatgatataaaaaaaatgcaacaattgtagtattcacctacctcatttctctcaattttgatatatgtcatgaagcgtaagagcatgtggcaagaaagttaatcattaaatgtgtctttgactttgaacacattacaccaaaagcaacagtttggtgagttcgtctttaattttcctttttattttcaaattagaaaaaaaaatgaaaaacatcttacgttactactaaaataacataaggaataatatagagtattttatattgaaggcgaagatttcgatccaggtttaggaattaggatacgacactcgtgcactacaattaatttattattggaatatctcgtacattttcttataaaaatatcacatcttattataaaaaagagttatttacttaatgataacaaatatgaacttcgtggaattgacaaaaaaaaacatttatgcatttccacggaattgtgcaattttataaaattgtgtatcatcttagtaaaacaaaaaaaattatacagtattagataaaaataactttattttttgcgcaccaaaacacttattaaggttaaatagtgatcaaccaaagattaattaatgcatcaaattatttactttatttattgagttattttatgattattccctagaaaaacactgtccatcactattgtcgcagtcttatctttatgtatatacgtatataataagccaattgaaaaaaataaagatttgattttatcagttgtccacttcaattcgattagaaatatatatttcgatagtttgtatagtacttagataaatttcgtatattatataaatatatgttttatgaatttgtatttatcataataaatcacaattaaagagtggatgatagttgagttgagctaatcatgagacatgaataccaaacaaaaatataggatattggcctagcgttcaccctaataattgggttatcgattgatgccatatatatatctttggggatcgttttatctctgaatctgtcgacactctagttttcccctaccgagagcgagcgataagacgataacatggcagaagtttcacatgcatcatgcatggaccgcgcatatgtcatacgcagattaccatattcttaggtcaattttatttttctatgattatatctcataattagtcgtcatttcaaactagatatatacttcaaaaacgtaggcgtgtcgtagtattcgtgtgtcaacgctacatataaacgcggtcaaagctgcatgcatgtaaaaaactgttcacaattaaaaacattacaaacataaattcacataaatacgttcaaattatagcgtcggcattacgacgaacttataagttgattgcttaagagaatatatatagagaaaacagacgttttatccataattataccatttcttcgtctttttttagccacgtgtatcttcgatctagagaccacaaacagaagaaatacgacgaagaagttggattcttgcttgaagtaagaaaatgtgatcagccgtgagtcgataaagtgtagcaccgtcaacctcgccggaaaaactcgtctccggagcaaccattcgccgtagacgggtcatgagcttccttgagctcacattaaccattactctctttcttctacgaatgttaagtgctctacacctcatgtttttgcacacgaacggtcttcttcgaacgtgtactatatactaagaaaagctaaaaagagaatgagagagaaagtttgtgatgatatgtggattagaagaacaagagagactatgtgtctttatagataagtcggatgaaatatgaataattctcccacgcttgatatagtatcaatccacgtatgcacacgtgtgaaagatattagctatgtatttatacggtagtaagtataaaccattgatacaaaaaaaacttttgactgattgcagcggaaatgatagagtaatttgtctatgaatttgatcaccgctctattttagaggtagatatcaatttcttgtgaaccagaatgttttttttttctttgtaaaatggtaagtaaaggacaactattgtttcttccgtttgcaccacatactggccaaaacgtataaatggttaacaaagtcgattttgttcgcatgcgaataagtccattatatctgctggaactatttaaattttaaaaggaacacaaatgttagatcaactgtaatatatacaacactattttaaattcttaaaaaaccaagtatgcatgtgaaatgatgtttgtgtctaccttgtaacaagttgattttttttggttatcaaaaacttaaacaagcttgacacgattcattaccaataaaagctatagctgcctaaaacaaaaggtctcatcgaaattaaataactacagtatcgaaaatattggatggagtagctacatgatgttgtgtcttgaaaacatgtgaatgctgattgtataaattgttgttgctcgagcggttgatcaaataatacacgaaataattaatgggtaattaataggtcatgcatatacgacaaaaacacaaccgtattgaccaaaacccatccataagtagatagcaaattcggaagactataagtcgatccacgttccaagcttcgcctccacaggccaaccaacaaataattctaatacttacaaaattttgccacattattgatgattactatttcaacaacaaattacgtcgtatgggtttatttatttctcctctaataatcatatcgtacgtatagtagagacttagaacagtagtcataggctcatatcgactagcggataacaacgaagaataatgcaattaatgactttggatttattcccgtaaccaatacaaacttgatttcgtttcttcaatgtacgaagtctagtgataaactgataatatttgtgaatcgtgattgtttatgaaactgaaaggagaccatatattaggctctcattagtcttggaacaagtggctacattaatacatcaatcgtttgcattatgttgtaaacaattttcaaacatggtctattaatcacaattattaagaagagaaaaggagctacgattaagtccaatatcgatcttatcatcttataattaaggaagtcgggcctctctataataatctatgtcattgttaatcccccatgtggtagctcagtatagtaacgacgtaaattcattatagtctttgttatattccatcgtctgcaacacactatgattaaaccacttggtcactaaggtttcatgatggaaattttgtccgtggtggattttcggaaaactctttaccaaaaattctgcgcattctaaaaaaatacagggtgtttcacgaacccatatatccgattttaaacatttatatgaattaattagggttaatttgatcaacaatagacgtagatgcatagaaagaattaacaaattgatactaatatatacattttgacccatgcatggatgtctctttgacaaataaaaagacatattacgtctttttcttggctgagttgtttcctcgattgatccctttctctttctcacattcatagtgataattacaaaaatgattatgacattacgattatgtgagtgtacacgtgtgctatgtcaatgtctatatctctagtccccaatacaataatctccgtttttctcggggactcatgtgcatgctccaatacgattgtgtcatataatagacatatcacatttctttatacatacatgcatatgtagagcatatcacacaatcatcttatcttatcaaattcctacactagctttacattatttcgaaactagactagggacttggtaacattgacagatatgctgtctcttcggtttttaattgcaataatgaaataatcttataaactacacgcaatgcatagatagagctttgttgcatgcgtgtgtagagtagacagatgggaagggtctgcaatgtgggacacataaattgaatacgcctcacgtgcacacgattactacctttaaaccccttcttctactctctagcttcagtccttttcaccatttttcacattcaattttagatcctaccacttcctttaacaattacagtttctctacaacaaattctttgaagaaataaaccactctccttcttaataatctaagtaccacttggaatctgattgatagtaaaaaggttattagttatacaaaattttaagtgattagtctttttttaatgaaaccttgaaatggtgagataacaagaaggctgataatgctgaattgtaacagttatatttgacatacaactactcatcaaagagacagctaacatggcaatatgtttcagacagacacacatctttgtcattctcattcatacatcacttccttcaaacttatcaacaagaatcacacaaaaactatttttcttcttcttctttcagagctagctactataattattgtaatctaactaatttgtattttacaatgattacattgtgtctattaagtcgagattactatcttcactcaattgtaactctcctttgatctggcttcaccatcttttcccctgtcatatagctaataaaaaccattaaagtattttgcatctctcactagttatgaacttgcaacatttgtttgcgacctcaagcaagtcaacaaatttcacaaagccttatccaacttaaacttgaacaaactttgggaagagatacacaactcttatattgtctatgcttatggaaggcagaggttctgtcttcagaatatatcacattttcagtttcttccattaaatttgctactagacattctaagccaattggtgaaagaccattaaccctaaccccagccagtcttatatatactacttacatatatgcttatccacatctcactagtggaggattagacttgtgctacctacttagtaatccaatgtttaaagaaccttctaacaaattccattttcataccatgattggtgcaatcaattaacaaacctgttggagaagaaaaagctggtgaaagatcagtttcacggccaagtccagttcgttgtccttctaagatgaccagtgctggttttggagagttgatcctacccttatgcaatgtctgttctgcaatatctgaccggagattcctatagccactgtcatcttccttcatggttgtagtactcaacttcgtcgatacttccatcgtaatctgcattttccctgcttcaaaaagcatctcagtcccaatgcagaatctacctaactactacacatgctaatcacagatagaagatgcgtatagggtacaaagctctcacctttaaccgaagaaccaagttttggaggcgaggagatcatcggtgagtacatataacagtcagatttgagatattccttcactttctcagacattcttctcttcttgataagcttctcaatccccaatgactcaaaccctaaatgtccaaaattagcaaaactcacaccctttgatcaaccacttacccaaaacccaataacagatgagcgtaaagaacacgagtcatagcattaccttccatggagatatcgtccacagtggatggtttggaattcgacggcggaggcgtatctatctccgtcgtgagcggtggaaaattggaaaacagaggagcaaacaagtatgtatcagatttgaggtaggtgacaatgcttctgacaagtcttctgcacttcttcctctttagtttctttcgcgcacccaaagaacttctctttgtgccttccatgttgattcagcctcttgtgcttcgacaaaacgatcagattaaagatattacgatgacgacgacggagaagaagaaagatgagattttggtaaaagggtttaaacgccgtctggtcacacgcgtcaccattgtctctcacggtgctttgacacagaggtgctgaaggaagtgccacgtgttctctgtctgacaaacgaagctcgaaagctgtctgaagaaaacagaggttttgtaattttgttgacctttatgggcctataatctagcccatattgactaaaattgtttattttggtctgagatattttattgtcacgttttgtttcattgggtttatataattcaagatatctcttgagttattaaaaaatcaagcccattaacaaaaaaactaagaaaccaagttgatcatacgaaaataaatgagagctttaggaatatgctaatagttttcattttataagaaaacgaaagttcatgtatatactttatatgtaggtggataatgtatatatacataaatttgtgtattaattgaaagggcaagcagaaaagcaaaagctagaaagcaattggacaagtgaatgttggatagttattgttggacaagcaatccaaacactttagaaaatggcccattcatgtaatatgtgcccacttgccagttgctcacctttcaacatataccccctcccaataatatatttttgttggtaaccaaactatcctcccaatttctgtatataccaaaaaaaaaaaaaaaacttttgtagaaaaatgtaaatcaaattcgctatgcacgaaattaaagaatgcgtcgaaatatcataaactaaaatacatgattttacaatcatagattcatagactcatagttaccattatcacattttaaatgaatttatcatttaaaatttatggaaagtaactattataagagataagcactataaaattaccatagtgcaatatttttttacgtggtatcaatgttaagtaattttacttttttaaaaattttgacaacgggaaaaaactgaaaaatgaaatgataacgaaaattacaaacaaaacataacaaagaaaacacaagtgatccagttagaaaaatttcgaggaaaacaccaatttcgaaccgcaaactcgagttcttatcgttgttaacacgaacaaccgtatcctaggtcaatctttactcttaccctagaactcgagtactcatcatcgttgatcatgtgttttaatatataagagacacactttctgacactcacaaatgtttgctctctagatttacggcatgatcaagaacgtatgggtatgaatgatctaataaaaatagaatttatcatcgttaaaagaagattttttttgttcaaggatgttggtataatatgtggtgtaaaacattttacgtacatttgttatttaatattataagaatccccgtacgcgatcacacttgccaacaacaatgtggtcttttgttaatcaatctccatcaaattataacggcagattgtagttactagttgggagctcgaaaatcatagacttcatttttcttcttctcctatttccccatttaacggatattttgctttttctttccttttctttactatatattattattgattcgaatttcaaggtattacttacgctagtacgtagactcgttgagtcatttgtcttctcttccattaattagagatttttctgtattgagccatgtttttcctttgcatgtaccatgcagacatttttttttataaccaacattaaaatgaaacacaacatttgtttgtaaaagctctggaaccgatattttacaactggtaattgactagacagcgatatgttttcttaacctaaaaccctacttgtcccacgtttttctaaccggttaatcagcaatgtatacagaaaatggtttgtttgtttttctgataaagaagatttgtttgttactatggcattggcataatttatttgtttcaaatatattcggaaattgatcataagaagaagaaaaaaaaaggataaggaggcaccatacttttcgtgccaatcagaaacagtttgtaaattcaatgtgtgtggggccaaatgtttatcacatgcgtctttttgtcaaccagacgaatatgatcgtacttattttcttaatatgaatccacattatcttaatatcaatttgtgaaaactagttctaattttgttaagtgctaatcaatcaaaacattatttacgaggaaatcatgcccatacgttctcgtcttacgtgtggttttcagtttcatcaagattggtatataagataaaactatatttgacgttaatcggtgatgtacatcattacatgtcgatcatcctatataattataatatcaaaatttaaacaaaccatcgaggtcaaaaaggatggtaacccaataatattctgaaaatttattagtagtcaacttacttactattatatataaaaaaaattacttactatttctgagttcatggtaattgatatcttgtccatgtacttaaattcgttatatgaagaaactacgtcaatatatactcctttttttattccttgcagtaatagttgtgtgtggtctcagttttttttttcttttttcaaattagtattatatgtaaattatttttattaaggtttagtaaacgatgttacatgacgatgatatttttttatttaaaacaaaaatggttagcagttcgtgtactgaaatatagttgacaggtgactttaattcgtcatatgagtgggaatagaagaaaaaaaagttccacctcttataggttaaaatggctaatgcatgtacatcagaataatatatatggatgttatgagctttggcaaacgactcgtgccgtctaataaatgtgatttgctatataatcttgggaaacttatgttttgtggacatgtaggtgaaatattttcatgtttttgttttcgctcaaaatgttacaatatatatagaggactatttcattaaataaaagaatactcgagcctaaaaagaaacaaaacaatagggagtatatatgatttgacgtctaatttcctaaccgacttattaaaatttaaaagtcgcttaaatcgaaaacccggctggataactaacatcatgtattgattgcaaatgttgacccctcccggctctctaattttgctttaaatttcgatttcatatcttattctagaacacgtctttactacaccatatcatcgatcataaaaatcttattacatgtaacatgttacaacaaattatctaagcttatttatccagtaaatcgtaaatttttgactattgaatttgaatcttgatgtcaaagttaccatatgctcgattagtttcataagatgtgataaatctttatttgtgtagatataaaactgtagagtattatctaaaagggtaaagtacttactttgttgtttttaattaatgtgaacaagtataaacgacactacataaaaagagagagagacaataatgatatgtagcttagtgatttgtactagtagcatataatggaaagatagtgtttgcttaaccattgttagatcaaatgcgtatagataaaaagaaaaaaccctaatataagacccaagatgactagctacaagtagaaattgttatcatctattaaatcgtgattaaaacaaaaaataaactttaaaatctaacattcatgttctattgtcaatgacaaatctaaatattttctcgaaaaaaaaagatcaactattttcaaaacccattttagactccaatacacatgatcacggtgtgacgaaagagagatagctctatatataaactcagacaacgattgataggcactgatggctcaacgaatatactttaaaattgcaatacaataggattgtgaagaatatctcaacctgcaacattatggtgaaaactttaaaaaacaagcaccgatattatataaagaaattgcatgcattagtcatacgttatatgtatatatattgtgtgaaaactcataccttatactatttgatatagaatatgaatgtcataaaccacaagcatttgttaagtataattttttgtatacttattatcttatctttctgattatttatagattttaagaaattaaatctttttttttggtatctgtgtgttactttttataaatgtattttgaaaagtattatttcaatttatagataaatataattatgactctcaagtggatttttttttcacggtcaattggagtttggctgtgaatcttgtgaataatatcaactaattaagagtcggccgatactccgtatctttgatcactttcacccatatcttgaaatttaccaaatgttttctttcattggggtttctataccttttttttttggttctttctgtaatttgggttttaaagaaaaaacctataattacaaaaaaggttaaaagttaaaactaagcacgttcaaatatgttctttcgagatcccaccttcctgtctatcttataagaagtcgaacacgtgtgctcgttgtgtgaattagagtggttatttcaacatatataattaaactatgtatgtatcataaatacactgaatatgttggagttgggtcttgtggtaggctaacttgttcgcttcactttggtttagtttagccttgtaatcggtggtttcatatactgaaatttttaattttctaatataatccagatgacaaaaaaaaatcataaatacactgcaatggccatttttaaaaaaactttaaacgaaatatatatacatcaccaagtatcaagtaagtaatttggttgttttgatttttcaaaaaaacatttaggtgattcttttaacaaccaatcatatatgtagcaaagattaattatgtcaatcttttaacgtcacttatatagtttagctgtagtattattgtaagccaattgtacggacttcgtaaccgtttcgacaaagatacaaactaatcaatgtttaagatggcataatattccgacttcccctgccactcggtagtactgctgcgccatcctacaagaagcactcgtaaatgagtggttagacggccaaaaattagcaggattcaatccttgattaagagatggttcagataagccctctaggcctctactcgtcacaattcatatattaattgatcacactgcatgaaatgataagatcaagtcaattacctcaaaattaattgaaagataaaatgataaagcaacaagtaatgatcatatatggatgtaacaaccttcttcatccatacgaatatgataattcttttgtcgatcatttgccacatctatttaactaagtattttgtacattaagatcattttgcgagtattcccgcgttcccaacaaaaacgaattgaaaaactacatagggtgaattttgctctcgtggcattaaagagagaggctgacattatagattatgatatatttattatttttcttagtagatttcttgaccagcctttagatatgcttgctctgtcatggcataaagccttaaaccctaaagccctttacatttgtacagtaccaacaattgtacccaatgttaaatgaatgcggattaatttgtgatatgagaccatcaaaataaaatacttataagatagtagatatatagaaccgtaacaaaaagatgagaagaaaaagacaaattgaatagaaactggaccaaaagataaaagagtatatgaagaagcaagccaccaagaagtgtaaccatcgttgcttcaactgtaaaccgcacattaaatgtgtgtgagagaaagagagatagactccagctgtgagagctacgtccattgcatcaattgggttatatgtcgttaacaattttttaaaaatacataaataaatcaataaaatatttagaaaaaatcaatattataatgatattttgaagaagttaggtccataatggaaatatagagacttagtgtctatttatcaagaaatagtgtctatttatcaagaaataatgtctatttggtccacaattatcatattttttgtggccactcaaactacgaaaataatgaatattgttaatttttgtcttatttaagtctataactaacttactaattcggttgaaattgctaatatgcattttccttggtccactattacagtgctactgctgtcttattcttgaacacaaaataaaaaagatttcaaacacaaaatatgcatttttttgttccaccattacaaacctttatttggagaagtatacagttggatattaaatattttaattaaaaaattgaaaatattgaagttctttttctccagtattttggctggagcaaaactaaataaattccaaattaaaagctcgaacggaaaacatttactatgcaccaaaataaatgttgatatgaaatttgcatcagcatatacagtatgtatgtagtacaattgaacagagtcaaaattaattgtcactgaaacagtcagattttatttctgttaaaaaatattttcagacaaaaaatgattttttaacgtttttttatataattttattaaacctcaaaacattcctcagcagattgttttataatgttattattattttttcttaaataattttatttgaatttcgttatagagagataaataaaagatttttggggtctagttggctctcatagtttgaatgcttatataaggaaacagagctcgaggctctcaataatgccacataaaacacaacaccaaagcctttataactctttctggggtttttaattctctcaacgaacaaaaaaaaaaactcaactaatattctccatcctctttcttcagatttaagagaaaccttatcgttatattctctcttctcttttctttttgactcccacaagaagaaagcaaatttctttttctcaggattgcttgaaaactgtagaaatctttaaggtttttttacaccaataagagtcagagagagagagagagagagaaagagagatctattcataaaaaagacaggtaatctcaactccgaggagataactgatataacaatttgagagaataagaagaagaagaagaagaagaccaagctaaagaatggttgcttttttatcagcttggccttgggaaaactttggcaatctcaaggtttgtctttaatctttggtttgagttttgaaagatttggtttctcttctgaatctcatatgggttttgtgattttgttgtctatatgtgaagtatcttctctacgctccattagctgcacaagtagtgtactcgtgggtctatgaagaagatatctcaaaggttctttggtgtattcatattctcataatctgcggtctcaaagcacttgttcatgaactatggagcgttttcaacaacatgcttttcgtgactcgtactctaaggattaaccctaaagggatcgactttaaacagattgatcacgaatggcactggtaaaatctccaatctcattgacccatttcaaaataattcattaaagttttatcattttcctttagtcctctgtttttcctctgttttgggtatccaaaggtaacattttgatatgtttcagggacaattacataatcctacaagcaataatagtgagcctgatctgttacatgtcaccaccattgatgatgatgataaacagtcttcctctgtggaacacgaaaggactcatcgcattaattgtgctacatgtgactttctcagagcctttatactactttctgcacagatctttccatcgtaacaactacttcttcacacattaccactctttccaccactcatctcctgttccacatcccatgactggtaataataataataataatcccatcaatccaaagcaatccgtttcttgttgattgttgtaataacatctttgatctaattggttgcagctggaaacgcaacgttattggaaaacattatcctctgtgtcgtagctggtgttccattgattggatgttgcttgtttggtgttggatcattaagtgcgatctacggttacgctgttatgtttgatttcatgaggtgtttaggacattgtaacgttgagatattctctcacaagctgttcgagattcttccagtcttacgatatctcatctatactccaacgtatgtcttgttgacgtttaccttaccttacttgaaaagctttcacatgtctatttctttttttgttgccatttctggatttagttagattggggcttcacaggttttaatgaaaaggatctgactttattcattgaattaggaaaacacaaacgtgactttgtcatatttttctttaagaagcaagttttgtgtttgctgtgaaagatgtctatagaaagtaattggtggttttacatttactgcttatacaaggtaatgttttaaatgcttaaaaagttgatatattttcttgttgggtgggattatgcaggtaccatagtctgcatcatcaagaaatggggaccaacttttgtctatttatgcctctctttgatgttttgggcgatacacaaaacccaaactcatgggaactccaaaagaagattcgtttgagtgcaggtacttagcaaatattagtccgaaccaagttttagttttgcagatttaacccataaaacagaacacactatagcagattcttttttggttataaattatgagtaccaaacagtttatgccattaatgaggagatattagtagagtgtagcagaagtgggtgagacttttcaaagtcaaacctttaagagaaaatgacattactgcccttccttgacctcaatattacagttttttcacaaaactgatctccacgtgcaggggaacggaagagagtgccggagtttgtgttcttagctcacggagttgatgtaatgtcggcgatgcatgcaccgttcgtgttcagatcttttgcttcaatgccatataccacaaggatattcttgctaccgatgtggccattcacgttctgtgttatgttgggcatgtgggcttggtcaaagacttttcttttcagcttctataccctcaggaacaatctttgtcagacttggggcgttcctagattcggattccaagtatgtctctgttttacctagttttgccctaaatctctcctcttgaaaacagaacgttttaattgaagtattttacttattttcttttgattattcttgcagtacttcttaccgtttgctacaaaaggaattaatgatcaaattgaggctgcgattcttagagctgataagattggtgttaaagttataagcttggctgctctcaacaaggtacttaccataaatctcaaaaaccctttaacttttgtgtgtgagtggttcatttagagtcaagtcactaaaaggattatttttgttttggggtttggtcagaacgaagctctaaatggtggtggaacactgtttgtcaacaagcatcctgaccttagagttcgtgtggttcatgggaacactttaactgcagcagtgattctctatgaaattccaaaagatgtgaatgaggttttcttgactggagccacttctaagctgggaagagctattgctctttacctttgtcgccgtggagtgagagttctcgtaagtttttatactaatcttttactcaactattgtctcaaacatacggtttaccaaaagaattccaaaggctgacaatttctgatgttgggacaattgacagatgttgacattgtctatggaaaggttccaaaagattcagaaagaggctcctgttgagttccagaacaaccttgtacaagtgaccaaatacaatgctgctcaacactgcaaggtactgcaacgatttctaactggttttggtttgttgtgtaagtgtaaatgtactgaatttggagagtttaaatatatgtttgcgcagacttggatcgttggaaaatggttaacaccaagagagcagagctgggctcctgcagggacgcatttccatcagtttgtggtgccaccaatccttaagtttagaaggaactgcacttacggtgatctagcagctatgaagctccctaaagatgttgaaggactcggaacttgcgaggtataaagagtgattggttaataatcatgtcttgtttgtgtttttatactaaactgtagtgtatatgtgtggcagtacacgatggagagaggggtggtacatgcgtgccatgcaggaggagtggttcatatgcttgagggttggaagcatcatgaggttggagccattgatgttgaccgtatcgatttggtgtgggaagcagccatgaagtatggtcttagtgctgtttcttcactcacaaattgagtgaagagagagacacgtttcattgttgtcttttgactctcccaagattggtcattctttgtacaggtgaaaggagatgcaagcaggaaaaaaaagtagaatttcaccttatgtattgttttatcttttattaatgatgtattactttctttttagatttccttaatattaatatatgcacctaatttccaagaaaattcaacaaagcttttaattatccagcttgatttgcttctctgtttggcacttacacaatcagacgacaaagtgtcttcaatgttgctgtcttctatacttttaatttgattagacattattagttgagagaaatatcgaaatatcaaactaaacagtgcattaacagaaattgtaaaaagctgatcagattgttgtttgttctgctaatgaattttttaaggtaaaagtttcaatgaagatttttgaatcaaaccaattgtttatactttattacaaacacattctctacactaaaccaacaaaaatcccacaataacaaaagagacagaggaagaagagctaaacatttgctcaaagagacatctgcttgagttctaaaacaaatgcagaagaaagagattattttacctaattagaaaagactccataatgtgactaacccttgaatcgttcccaaaaagtagccaagaagatcaagagatgagacatgagaagaagaatggaaatgacgatcaagaagataccgagctgccaccatttcctccttaccgatcttatgaatccgaacttacaagatctacaatcatagcataaaatgctccaatcgttcctccatagttgacagtcgctaatccttcccaccatcatctcatcaccgtacattaggttcatagacgacggtggtccttcgtcttttcttctgtaccaaaacgtcgcgtttatcgcgtccatgttacatgtctctggtggcatacaacatccattctgtaacaacatcaaatgtaaagataaaaatgtttgtaaaatcttatacaaatgttttacaaaacgtatatttgagtgatcttttcatcggtatattgttcgaatgtactaattgtacactttaaaagtcggtcttgagatcaaagaatatatatctatgatgatcaaaccttgattggtggcatttttcttctattgtaaggtttttcatttggagatccgtaaatgaggtcgttgcaagctcctttatcatagacacacgatttgatattgttccaggtcacatgatcgtccatgattttgagcttgaaccacatccttgtcgccggaaaccgccggctttgcatctcatttactccggcatacgccaaaccgatgaaaagcattaacaacaagaccaccaccatcaccacaagtgcaggcatcggaaacttccgccgcaaaaacagagctgcgttgctgacaacaaacaccgcgagaagaccgacactagctagcgtctggacacgtggcagaccgagaatatcttcgcagtcgtagctacgcatgtaaagaagccacactgcgtagccgaggagtgtaagtgagaggacgaaagtgaagatcggaaggacaccagcggctaaaatgttcacaagtgccatcaatgttcccatcggtggcttattatcactttgtgactccatttggtctgaactcttggcttctggctcagtcgttgcggttgctgtagctgtggctgtggcggttgcggctggttcctcgacgggtactacttgagcattatcagccatgtgaaagtgaaagaaagctctctctctctatggaggtgttgagttgatatggggaaatgtatatatagaaacagagagatcataaatataggtgtctgagtgagtgagtgtgtggtgggttttacagagtcaaatttgtaagttagagataaataagtacacattaattaagtacaacgagatcttgtccgaatatcaattatccaaaagtgttttttttttttgttttgtttaaagtataaattcattacagtttttaattgtttgttttgtttaatttatggataaatgaagtaaaaacccttatagagaaattataaaccacacaaactaaatattgcacatcaagattaatggatatatgtagtgaactaagtcaaacataaaatccctaaaaataatacattaaattttctaaaatctaatctaaataataggagaacagtaattattatgttactgtttttagacaaaagaaccagtcgttcttacacattactttgagaaaataaaaaaatgtttgtctaaattttttttttttttttttgtgtgtgaataatttcaatcccaaatatcatatcaaacaaattaaaacaaaatataaataatttctaaattctaatcaaaaatattagagaataaatgatgtttctactttcggacaatcgatccagtcgttcttagaccatccacatcggtcatttttttaaaatgtctttaagtataatttattaataatttaagctgatgctgccacgttgcctctcgaataggtaaaatgtgtctttccaaggacacaatagacacgggtcttacttctttattctgttttttattaacttttgttatatttaatactaaagatctatcaattttttgtgcgatgtggatgctcgtaggtcaattttatatttaatactaaagacatattgacattgattttaaaaaataaaatggtgaatcagatttcaatctaaaatcacataaacaaattaaaagacttaattttgggcccattaaagcccaataaaatgggctacttcggttctgttgtagtaaacggtcgaaccggagagatatgagtgtcatatcctgatttccccactcgacgctgatttcttctctgcttctgtaatttctccaattcattgatcagatcagccatggaagacgaggtgatttctcgttcctttatttatctcacaactacgtatacctagagtaaatcagaaaacgttaatgaatttgatcttcttgaaactgtgtgctacagtaatttcgattgcttattggtttctatgtatcatagaggaattggttgataaagttttgatttttatgatgtctgtggcggtatctttatcatctgatgaaacttgtcgagacaattctgggataaaggaataaactttaagccgtattggtggggttgattcttcggatttggatgatagtatcttcttgattccgtagaattgttgaaatgtttggaaaattgagatttctagaggcaacaagtattttggagatttctatgtttggttattggttcattgattgaggaaagaaacaaagtgatttaagtttacaaaaccttatacagtttctttcacacttgtgtttgtatttgcattagattgaattgaaaactgctcctgctgatttccggtttcctacaacaaatcaaactaggcactgcttcactcggtacatcgagtttcacaggtacctcattgctagctcatccttgagaaaatcattattttaatctcttgttgacatcaaagatgattctgcaggtgtacaactgcaaagggagaggagtctaatgactgtgaaaggtttgccaagtattaccgtgccctctgtcctggagaatgggttggttccttttgtttggaccttagattattatatcaaagagtggtacacacaaatcacactggtatagtttgatccatctgacaatttctgccgcgtatcttacatcgcaggttgacaagtggaacgagcagagggagagtggaacttttccaggtcctctttgaaccaagccttcaatcttgatgaagaggcaatcaagtccgtaataatacatggtttcaaagttaatttcttgcttgcgtgtgtatgttttggccttattatttcctctctagtgtaagtgttttattgggatgtctaagaaaggccaatcaaattataatatgaaaacattcgcttattttgtttggaacttataataccagaatgcataaactagactaatgttggatggaatttccaaatttaaatgtgaataacaagttaatggtacataaataatatttaaatgttaattggtttggcatagaaaaaagggaaaaaaaatactcgaattaaatttacttccttctataaaaataaaagtaatgtaactttgtagattcgatgacatggccatctaaatcctaatcatcatcaaatatatttacaagtactctaaaccctctttttgattaattataagccggtaattccttatttaatctctgagctacgagagttcatgattatcgcttatataaatatattcaaagcaaacacttcctagcaaacacatgaaaatctaaaatctccctcttgacagtgcgagtcgatacacacaggttcgtcgatctctctcttttgtttctgcttttttccggtttcgattccttatgaatgactaagctttaactgagattcttctacggtagactattgtttttcgaatttcgtacgatcctccattgttttgagtttttttttttctttctaattcctggttaaaccctaattttactttttactcaacctaatttcttcgtacttgcttcgccaaacctaatttcttcgttcacaagtttcaaaatagcgccttttggcttatgcctacaagtcaaacaaagcttgactttgctttgttttttttgtttgtttgtcttttgattacagacgtttcgtcttcttgtgtgtgagtgagtacgaacatggattcgaaagcaaaagacgatgaaaaaactctaaacatggattccaaagcaaaatacggtaaagaagctctagacatgctcttaaagcttcaacagagagttgatgaaatccattctgagttgcaatcttcgggagcatccgcaacaacttcatctgatattcaaaacatctacaacgaaatccaacaacttctacagatgattactaagaagacgcctcaagatccgagtaaagtgtcgtcacatattcgcgacggtatcaattctgatcccaaaacttggaaactttgtttgatttcctccttctcttatctcaaagtttttgtattttgcagatcttgacatggtgtttgtgttggaggaagttggacactcgtgcgacttgtgccagagagatcttgctaaggatccagaacggcctaatgcttccttgagtggcttacaagaggcgtgcgtgctgtcttgtggtcatgtctaccacttcaagtgtttgagaggaaccactcttgatattgataaccattctaaagatccttcttgcattttctgcattagctgttagctactccaactgaatcaacctacactatatcatcccatgtggattcaactttaggtacttctaccattcaatgtctactagatctacgagagatttaacagttttgtcttaacaatgccaatggagttacttacaaataccagagatttactctgaaatcaatcaattttctttttacatccctgaaaagtttaagtaactttacatatggaaaactagaaccacgccgcatggtagcttctaaagccagaagtgaatcattgcctgttcaagaaacaaaaaacatgtttatagttccaaatatcattcaggtatcccttactaagtagcaagaacattcattacctcttgaattgagttaaggactagatcctcttcgggattggacacaggtttagattgatgatgcagttctgatcttaagcttctcatctctgactgcattacattgagctgttctcgaatctcctttagcaaactcaaatgttctcccttgatgctcgtatctcttggcggcttactcacttttctatcgtaattactagtcaccatcttgcctctaacctgtgagattttttccatctattagtaacctgatcaaatgtcttaaacaaaagatttagttcactaaaaataatgacttacatttctttcttcggcttcctcttcttccgagatgattgtaagactttctttcgtcctaggaacctcgaagatgtcttgaacattcttcggagacagaatcggagtctctaaagaagcatcttttacagagaatctttcagggttcttcatcatctccataatcgaactaacatcactcttagctgactcaagtatagtattgctaacttgtgacaccaacgcatgtgaaattgactcacgcctaatcaaagggaatttagatgccttctgagtatctctagagtctgaaatctctctaacatgctcatctattctcctaatctgttcccaatacgcattcaagtcttcacgaggagatacagaactactctctacaagacctttcttctcctcaaagctttcaccattaacatcagacaaaagtaaacttctttcactagatatgccatcaaatggactctgcaacagaaaagacttatgctttaatctaacaatgtcttcaaaaccatgaaagtagaaagctttatatagccatggccatggaatcagttttttcagttataacaatattgaaaagctttaaattaccgaaagatttctcttcatcttcctcttttgattgccacgagagttttcaccggaaaagatgagagtttcagggaacttattctcaatcacagcaggatcagagcaaccaaggctgagtaatttacatctataagcctgaacctgaaactcaagagacgcaatctccatttccttctgataaatcagatcttcgaaaagcacaagagatgtctcagcatgacacattttctcctccgccattctcttgtactgactagcttccatctccaacgcagctttctcaccttgaagccgtagaatcatcgataaagcctcgcttgcagcagatgaagaagcttcacgttctgcgtcaagttcttgattgatcttttgaagaagctcttgttgtgcccacatcgtttctctgactcctgaggtttctccatttcctcctacccccaaactcatcgttctctccaccattttagatcaaaaatttcttgcttttggttgatctttgatcaatgtgtgatttgttctatgattagaagcaggagaagagagatcagatcgaggatggtttttgattgatgcggcggagggaagcggagaatttaggttgatctccgattaaatgtccaccggagaaatcagatcgacaaggaaagccttaaaagcgaccagatattctcggaagtcccaatcaatagtgggacatattaacgtgtatacgaccactttttgaattgggtaaattaaactatactttataaattataatcatatttgggttaattaaactatacctaattatataatccagccgacacatcgtatttaaagtacgattattttgtttacgttttaaatgatttttattatgtaaataattgtttaaagaattagactgaaaatttggcgggatgagccagacccttgcaatagtgcaacgcatgggagactcgggaaagcccagatagcaagctacctagatgggctttcccccttaaaaaattgagttaatatcgtgtgggccgatggcccacatatcagatattaaactgataagaacagatactacacttgatcttagccaaaaggccgagaaaggtatgagttgcttaatctagtggcctctttatttataatactacttatttctcacatctaaatatactaaatcagcagtcacttttccaataactgatgcatttagtgattgacacatcagcttattactatttttttattctttcattttcacgcaggatttttatgtgtcgtttttagttaactttgtttctttctcaaacgattttctctttcatccccacgatctccacatctccactttctctcttccaaaaactccatgactactgtgtaaaatctcaaagatgggtttctcaacatcattaatcgattactcagaaatcaggtactttgttcatctcaatgaaccaatttcttttttcttcctgacaaagacgaaacgcaccctaagagctctatcttgcattagggaaatcgtattcgtgaataaatcccctttgttaaccatcttctatttctgtttgtaattttgttttatatatatagaattctccatagatccgaaaatcatatatccttcttctagatttctatggctttttttttttttttttttctttgtttctgctttatttgactgaattcgatttctctcatacatctccttttttccataggattattctttaatacaatcaatgcctatgattctccgtctcacaaacactcaaggaacaacgacaaattttggcttctcatctaaacagttgccttaaaacaagggtgagtttaatatcttaatcgaagctcaagtgtttttttaatggtaaattaattctcatactttttactattcttctttcatctcttattttacttctttatatctgcaatttcttttttgtattaaaccgcaattgtattttcacgcaagatttttgtattaatacaaatacttcaattttaaagtcatctcttattttacttctttatatctgcaatatctttgatattgtttcaaaggcagcgtctgcgtcatgtagttacttacttgtgcatattttacatttttttttagacttccaagctttgggtgtcaacgaatgtttgtaaactgaattactaatgatgagaagaaaaacacattacaattggttggagctaatgatgaaataagcggacatgtatatacccagcataattttcgtacttatactctcttatatttctaaactcttgatttgttagttactgtctatcgcaattgattctttgggtagaaaagttgtaccttctttatatatttttcttaatctttgtatattcttcagtcaataataataaatttgttgtatatttatgctatctgctttattttaaaaatcttagttaagagttgtagcagatataatttaaaacaatgttgtccctgcatagcagggccaaatgctagtacaattttaagttaacgatgtgggacttgtgaaaagtaaaaaataaggcttctgattgtctcacagtgcggagacattgagaaactcataaaatagctttcgaaacttactaagctgagtcttcttcaagcacatggttagcatcatgctcccttcttcgtctgggttcccagttacaaatcccttcccttcatttaaatgtgaagctctcttgtagtaagcttttccccatccgaaatccatttcgtacgcggtctgtttgattagactgacgatgcagaagtttgctgcgcagctgaagattgtattaccttcaccaggaactaattggtcgagatcaggatgtctctccaagtagtcaatcgctgatctcaagtactcgttgtccattttccttatttctctatgaactctctccactgtttcactgaaactctctctgtggaaagcacccaacggtgataccggtcgagcgtgaaagagagtgttcccaatgtatccttgcggaagctttggttgtagtctcggcctcccatcaattattatatgcaacctcgtcgaatgttcttcacttaagtctgcgggtgaaaaaagtgtaaagtgagaaccgttgttcaatgtgtataagaccaagagctgaaccatttctgcattatcttagttcatataatctagagaaagtttaggctttaagcttccagagaaagtgtttccaacaatatcaacatgtaccttcatttgcaaaagaagcacaacgccaggtatgcgccaccagaacttcatatgtactgaacttactatcagcaatctctgccctagctttaagagctttcagttggagacgtgtgagcttgagagtggcaatagcagaatcagattccggatttgatctgtaagccagggatttcatcggatgattgtgaaatgggggtgattggtactcagtgtgcggaaaaacagaggagggagggttacgtgcatgaagaacagtgcggtctaagaacggtgttagcttaactaaaagtcccctagcagttagagaccatgcttccatgatatacccaagagaagtagcttctccgaatgtatggtgtattgaacttccaacacagatcgttccacatttgaaataagtaaccttgcaaaacaaaatcagtcatctatgttttagtttttattcatagaggatgtgcatgtaatggtctatacaatatgaacatctgatgatgaaagaaaagaaccttcaggtatataatctgcactaactacagaaacaacaaaagtctctctgcctaaaccctgaacctcaacttattggagctctttctctatctctatctctcttttatttttgctgttcttgaaacatactcagaaagagagaaaggtgtattatataaggagcgagaaagtaggtgctagtctctcaattcttaaacattttatttataattaggttttgcaactaatctagtcacttaattcataaacttcaagattacttttccttcaggtacatccccaagtatatcattattatctctgtacttttcatcttatccaccaaagtatatttacttgcattaccaaccagagtatttcagtgtaacaaagcgttttcaacaggaagatgaggaaagttaacctgaaagagaagaagaggataggaggagatatctcctgcatagtcaacggtaggtacaagttgagaaagatccaaactttgagtgagtaagccaatgtcttgaacagtagaatcactttcagcctctacaaacaaaactccttctccattacattgaacctctaacctcccattcgtatctatcacatataaagcagaaagaaatctaaagatgagaagaagagatagtgttttaactatacagactagagagtttgatctaaataatcaaagatagccgaacacaggtttcaagttcaaccttcacgaattatcaacaaacccagcagaaaaatgaatcctttgacaaaaagagaagatgatgcatgatgggagaagaatcttagacgatttcgaatcttactcttttggagtctcccagcggcaggataaaagaagacaagaaccttgctcagagcttcgatgagggattgagtgttgggacgatcggaggaggaacaaggtttgtagaagtagagagtgcccatgtgaagtctcacttgaatcaagtctaaattggaaagccatagattgtgtgtgggtgtttcttcagctggcttcacgatcgtagcttgcttcacccgaatcttcatttgatccacgatcactaaaaggcaatggctttaaagacagaacacgacttgattagcatgacctgatctgctgatcagtttaccggaaagtggagactgataaagaagaaaaagaatataaaaaggctctttttttttgtcgacaatataaaaatgctaccacctcaaaagaaataagagatgaaaaacaagaaatttgagcactagacgcaaccactccatgaattgttgagaatgggtacaatcataattcaaaagtgataaagagaaatctttacaaagacagatacctaaaaaccccatgataaactcaacttacaataacagcaaagctttacaaaaaagccacagcttattgtctttgatgaacaaagagagtgattggctcagtaaggaacaagaacacgaacggaaggtggaccagatctcatatcttcaagtaacagatcaagaagcgcctttgctataggaccttcttttcctgagtcagacagaaagaaacccatctttaatcagccaatctatccatcatgtaagtaattaaaagtgaggcttttaaaatgtttatatgataatcttacttaccttcaccaataaattcttcatcccattgaatcacaggtctgatcggaattccactaccaataagcatcatctcatctgctttctttccatcttcgactgtcacatccattactttcacagttttaagaatccccttgcttacaagctgttcagcgagtgtaagtgttctctttgctgtacatccgctcaaaacgttatcaaaccgcggcatcacaagctccttaccaccattaacaacaaacgccacattcatgttcgggccttctgcaataaacccatctttacacacccaaatacctgcataagctcctttggcctcagcttccatttgtgagagtacgttagggaggtagttaacacttttcaccgtggcaaactctggaggctttatggggatggacgaggtcactaccttgacacctattgggttaatggcgaagttcgtttttataacaatggcatagagagttggtttgagacattgagatggagataggaggaaatcccctggccctgcagagagccagtatcttagagatccatctctacatccagaaacgctcacggtttgaatgagaattcttttaatagtttctcgatcgaatggaagtgggatcttagccattgatgcagatcgcaagatacggtcaaggtgctgatccaattcataaaggtatctgcttattcgtaggacaacaagcgaagctcagatgattgagtaataagacaaattagaaaagggggctactatttaaagtgactaacccattgatgatcagggcagtgtcaaagactccatgaccacggtgaaccatgtgatcatccaatggaagaaccatcgctgctggatcggttgtaattccatcaacaacacttgagtacatggccaagaactgttgtcctcctcttgctagttttagcctctcaccaaccttttaaaccaaacatacttcactgatactcaatcaatcaacgcctctaaacataaacggataacaaacaaatgtcgcaatccttcattacgggctgcatctataatttcattgacaaaacacagaaatgtctggtggttgtgtcaataaacatctctagctaacaaattgtgaacagtttcaagagttaaagatatgattgataagtacagacataaaagagaaaccataattacctcatagctagataaaacaggaacattccacgactgagagcttgaatctgtggagaaacgaatgcagatttttgtcatcaattccagaacacttatggaatttaacgatcaacaaattgatctcttttttagggtaataagtgtacattaccctaaaaagattataataaatgcatcaccaatcacaatccagaagaaaaatcagaaaagagagaacacaaggtagaaatgtcgaaccagaacacatgagaatcgttcttcttcgtgtcaaccgacgcgggaatcgaaagccatgtcttaaaggacatggaacttgagagagagacctgagattccaagtgttaactgtaaactccagcgacaaacctgccatggggtttgggactcaaaagaatagagagagagagatcattcggaaatagcaacttgctttgcattattattatctcagtcgtgaactggaagaagacgaaaaaatatttgggcctaacttcaccacaaaaataaaataaagttattcggcccataagcccaatatgacttttcgcattgtattttaatattcaatcaatcaaaaataaaagcctaaaacaaaacaaaccctctctgtcttttagtgggttttgtacgacgcctaatcgatgttagtattatatctgtagccaaacaagccaccaaagtggtatttttcttcttccttccttaccttgtagggctctgagctcgagttataaaaaagccaactttgatttctttgccagtatttcatccttaatccattcttgtggtcactttttcgtccttaacccatctaggtaagtcgatttcattgtttgttatttgagtcagtaatttttgaaaatctttgcttttttttcttttcttttgaatatcaaaagaagaaaagatttgggggataactagatcatctctttagttaaattgactctttgaggtgtgtcaattgtcactgatagtctgattaatcttttattggcatcttagaacagattttgattctaaagtcttgtgaatcggcagcggaagaagagtgaattgttcatccttatcttgccatggtaaacattctacttcttttgttcactttgatgggtttgattgttcttagtatattcaatcctttgcttatttgacgggaagtagagatgtttttggaatgagaacatcttttcccttcttaattccagcttcctgatcacatttattactgttcttcttggagtaataaaagttgagatacttttgtcttgcaataattttgctttaatcaatcgaacaagttagattttggccatattggttgtagtattgattagtcttgtgtaatattgtttgcaggctatgtatattcgtgtgaagcgcatgaaaactacttactttatccaatgtgatccaacagagactgttttggatgttaagcaaaaactgtttgctctcattgagcaaccagttaacaatcagcgtctggtcttaatgtctaccgaagaagtattagaggattcgaaatccttagcagatcagaaggtatcacacgtttgactatctaatatatttatcttttgagtcattgctcaagtttaaaagaagaacttggtcacatagccactgcctccgtttgcgtgtatttgaaagttataagcttgtcaccatcttcttttttggttgttcaggttgagaatgatgcagttgtggctttgactttgaagaaaggttataccttagatcctcttattctgaaattttcaattccttgttgaaatgtcgtaatggatcatgcatcttggttaattacttatcacacttcatctttctatatgttatttggtatatgaacccttcaaactccattgacttcaattgagcctgttattgtgaatcttagttattttgttatcactggataatcttttggtatgtttaagagtcttgcctaacttttgtgaccgtgatatagctgaatgtgattcctaatcttattattcttttagccttgtttcgattacacaactgttgaggatgctgtattgcattctgaatctatacagctatgaacggcataatgattgcattgcatctcttttttccatgtgcagatgataacgagtttgaggatgtcaacattgcacagcccaccgacttctcactttcatgaagagttgcttactgtatcaaggaaacttcaggagaaggtattgattcaaaacacaaggaggagtctataaacgccagaagttgtttcttttgcgtctctgcttgtgttaacgcctctttagtttgttacagacaattgttgtaagtaaagatattgagatgtggaagtttgattgcaacttgccagattagtagtttttacagtctcttaatatgtttacaatgagctagaggtgcagctaacacgagccgaggaagctccattattaccatttgacattgttcattgacggaaaacccaatgagggtgacaaaataaagagacaaaaaaacaaaatgaaaggacataactgtaatcttaacggaaaaaaacgttaaggctataagtgtgtctggttcgggaaaaagagaggaaaaaaaccctaataaagagaagggattgtgtctccttctcgacttcttcttcttcttctcatttctcaatctcaacttttctcttctcttctcttcttcgctaacggcaggagagagagagacccagaaatccgatccctcctctccttggattatcggagtcagcgattcatcgtcgctgataaagcttctacctttctcttcgatttttgttgtgagattcgattcgatcttaaggcggattagatcgaggtatgcagcaaggcgatcaaacggttctgagcttgagacctggtggcggtcgaggaaacagactatttggttcctcttcttcttcttcgtctctctcttttggctctctttcatcttcggatctacctctccttcgtcctcatggtggtgctcctgcttcctcttttcccttcaaggtaccctcatttctgggtcccctctctaaatttggatctaactccctcttcttcctctgatttagaatttgttttatctctcttgtcttagcttgagctaaaaatttatccttttttacgggtttgtcgcaatcagcagcctttttgtttggaattataatctttggtatattgctgatttgattctctcaaatgtctgaattggctaatatctttctgatttgcgagttttaatgctttgtgtttgtaataactactgagctcatgttggattttgataggtgtctgcaacatacataattgaacttcataggtttatatgtcaatacgagtaatgcaagcagtttgtttgtcctgattcttagtggcgcacgcaagtatgtgtttctgctgtaaatatggacgtataatgatatgtaggcttttaggtgggcattttgttagctgctatttgctcataaaggacctactgacatttcttctagtttttctttagttcatcactcatttcggccttatggttaaagaattattcctctctttcttttgtactgagtactcgtggttccttgtctcctttatacgttatttcttatatgattttgtgtattgggtgttagttaatgaagatttatcctgggttgtgcttttgtttcagggtggagactcgaggttcgatggccgtgaacgtgtgaagtacacccgtgagcagctcctggagcttaaagaggtgattatcccagttaaataatataggattaaagccggtttagtttctgctgttcgtatttgttcttccttagttgaggtcattgacgtctgtgcatatatacagaccactcaactctctgatgaaattctgagagtccaacgggaaactgcagctgaactgtttggtgaggaagggacttgggcacgtggagaaagtgtcgtaagcaatttggtatagttttgttgaaacataaattttgcattttggtatagtttcatgaagtttcacttttaacacatatcttttattttaatggttcaggttcccgttcaatccgcaagtcgcttctctgagccagactctcgtgattggcgtagccgttctactcaacctccaccctctggggaggaaaggtcgtgggataatcttcgtgaagctaaagattccaggtatgttgaagcaagtcaatataatcgtcaagaccaacctaattcccagttttcaagggcaaacatatcatccaaccaaggggtaattgatcaatagatgaatgtttttccctcttcttagccctttacattctggcatgatttcttatttttcttacttatttgtatatcgtgtggaaccagggtggaccagctcctgtcctcgtcaaagccgaagttccttggtcagctagaagaggaaacctttctgaaaatgatcgtgttctgaagactgtgaaagggtaatgccgttgtgacagttattagttgtctagacttttgtataactttcctttactgccaacatgaaatctttaaaatagactatgcacacttacaaagatatacttttcttgtccaggatactgaacaagctaacccctgaaaagtatgaccttctcaagggccaacttattgaatctggcatcacatctgctgatatcctgaaggtgtatgctatgtctcaagcatagatgaagtcttgtttgaatcatctaggctgtttgtgtggctaacccgtgttcttttctttcatttgtagggtgtgattacccttatttttgacaaagctgtccttgagccgaccttttgccctatgtatgcaaaattgtgctctgatatcaacgaccagctgcccaccttcccacctgcagagcctggggataaggagattacatttaagagggttctactgaatatctgtcaagaggcatttgagggcgcttctcagttgagggaggagcttagacagatgagtgctccagatcaggaggctgagcggaatgacaaagaaaaattgttgaagctcaagactctaggaaatattcgtttgattggtgagcttttgaagcagaagatggtcccagaaaagattgttcatcacattgttcaggttaacacctataagcttacacattttcttagacttcttttattttggtatctagcattaacctttcttaatttgttctgtgcacaggagcttctgggggccgatgagaaagtttgtccagccgaggaaaatgtcgaagctatttgtcatttcttcaaaactattggcaaacaacttgacggaaacgtgaagtcaaaacggattaatgatgtatatttcaaacgcctacaggctctgtcaaagaatcctcagttggaactgcgtctgagattcatggttcagaatatcatcgacatgcgctccaatggctgggttccaaggcgggaagaggtattctaggttttacaaggttgagacttgtttcctgctccattgtgtagtgattctaatgttctatttacattactcgtgcagatgaaagcaagaactataaccgaaatacatactgaggcagagaagaatcttggtctccgaccaggtgccactgcaaatatgagaaggggtatggtttctagtggtgggcctgtgagccctggccctgtctaccctggtgggcgacctggtgcgggtggcttgatgcctggtatgcctgggacgcgaaggatgcctgggatgcccggagtggacaatgataactgggaggtaccccggacaagatcaatgtctagacgcgatgggccaggacctctacattctccagcagtgagcaagtcggcctcaatgaacacgaggctcttacctcaaggcagcagtggcattatgagtggcaagacaagcgcactgttgcagggaagtggttcagtgtcgcgtccagttaccgtgtcagcagaacggccagcacagtcagttgcacctctgaccgtaccagttccggtggagaaaccacagcctagtggtcccaagttgagcgaagaagtgctccaaagaaaaacaaagtcgcttctcgaggaatatttcaatgtccgactacttggtgaagctctgcagtgtgtagaggagcttggtttgccgtcatatcacccagagtttgtgaaggaagcaatatccctgtctcttgagaaaagcccgcctgtcgttgagccaattgctacactcttggagtatttgttatcaaagaaggtagtcgcacccaaggatcttgaaactgggttcttgctctacggtgctatgttggacgacattggaattgatcttcctaaggcaccaaacaattttggtgagattgtgggaaagctgattctggctggtggtgtggatttcaaattggttagagaaattatagggaagatggaagacgataggttccagaagatggtggtcgatgcagctgtacgcattgtggagtcaagcgagcaggggaagtccttgttggcctcacaggctgcagacatagaggcttgtcggaatctgtaaaaggaatcattacttgacgattttgctctctctgggtcttatgcttgtgcgatgaatgttgtgttgtaagcttgaaggaggaggagaaaaggattctcagaactcaaaaatagttttgctcttcgttgaagctttttcttatgacattattctcaccactcttctttgtgggcatgagtccatgtccttttttgtattcttctgtgacttgtctttttttgacctttgcatttttgttttacggtctcagttattatattcagttgattgttgttgagacttgagacccctataaactggtcggttcagataattacattggaaatgtttgatcatcgtcttcctattattcctatctgattctgagctaacattagttgagtaaatgattcattcgaccttaagctttatcaagtttgatcaatgggcctgagtgggctttgtaaagcgtcacaaaaactctcccgcgcaggacagagaatcattagttattatcctgaaaactaaaatacttttttttttttttttcaattttaaacaaaaatgagttcaagcgtagctgaagcaaatcacacagagaaggaagagtcgctgagactggcaatcgctgtttctctgctacgatctaagtttcagaatcatcaatcttcttcttctacttcccgttgttatgtttcttctgaatctgatgcacttcgctggaagcagaaggtgaaacttctcgatttttttttatttttttttgcatttggttttaatggccttctcgttgcgaactatctgatatatatatctggtgaaatctacgaattctaggctacatttcgatttctgttcttcgtttagaaatctaggtcagctctaattgttgcgagacggaggttctaacatagtgagattttcgattttgaaattaggctaaagagaggaagaaagagattatcagactccaggaagatctcaaggatgctgaaagtatttttttctgcctctcttaacttttgcaaaaattcgtttctgtatttattgattcttaaaatggaaaggctgcaagatgtttctagaactgattggtctttctattaatgcattttgtgtcaattataggttcttttcatcgtgacttattcccagcgaatgcttcttgcaagtgttatttctttgataacttgggagtattcagcggtaggaggattggagaagcctctgaatcgagatttaatgatgttcttcgtcgtagatttctcagactaggtctcttttcctattcttaggttcatcagtctggtagcttgaacattttgtattctctttgttacctttgtgtttgtgggcttaacttatcagcttgtgttgtcattttatccttagcgcggagaaggagcagaaggaagttaactcgatcatctcaaagattgcagccctcaggtttgtttagggtcttccttttcctggtttagcgtctattatctcagagtttcaatttccttaaagcaatacaagaacatatcataatatgacgtaatgtgctatatgggagagagaagtggaaaacagagtctatgtaaccaagcaccatcatttcatattctgggactcttttttatttgagttgaaactttgactgcagaaccggattatgaagaggaagcagaacatcttaggatctctatagattttctcctggaactgtctgaagcagactccaatgttaggctttgttgcttaagtttttttctggtaatatgcacgcactcttaaatgctttgcaactctgaacttgcttcttatattctgcaggactctaacttcagcaattggtcacatcaggctgtagatttcatattcggtaatattattcaaagttcccgagttgcaaacaaattatttaagtcctgagctgcatttcctttaatataaacctggtttgcacttatgaattaatgctctgtttggcatactcaagcttcactgaagaagttaatatcgatgggaaggaacttagaatctgttgaagaatctatcagcttcatgattacacagttgatcacaagaatgtgcactcccgtcaaaggaaatggtaacttcaacagtttaataatgattctaactgtgttttccttcctaattatcatttttctacgatttgttttccttcaccatctgttttagaggtgaaacaactagaaacaagtgttgggttttatgtccaacatttgatccgtaaacttggaagtgaaccattcattggacagcgtgcaatctttgctatttctcagaggatatccattttagccgaaaatttactatttatggatccatttgatgaatcattcccagagatggatgagtgcatgtttatactgtaagtatttcagattcaaatgagataatgtgtttctataatacttggggatgctaagcttgattacgttgtctaatgaacatgcaggatacagctaattgagttccttatatgtgactatttgttgccatgggcgaatgaagcatttgacaatggtaataactaaaggtatcatgtataatatattaacaaaaaatcagagtggcgcagcggaagcgtggtgggcccataacccacaggtcccaggatcgaaacctggctctgatagagttttaaatttctttttttttctctttatttttgacatcattttttcttttcttaagctcgttttctagaataatagtcgtttcctaccttagctatatacagaattacaatcataggcgacaaaaagaatcacaaaaattgctgagattggttgtattttattctatgcagttatgtttgaggagtggatagcatcagtagtacatgcgaggaaagcagtaaaggccttggaagaaagaaatgggttgtatctcctttacatggaccgagtcactggggaattagctaaacgagttggtcagatcacatctttccgggaggtggagccagccattttggacaaaatcttagcctaccaagaaatagaatgatatctttccaggttagcatctactctgtagaactttcttttcattgggaacccttttttactcctaattgataaaaagatggtgtgtggaaagcaagtgacttaaaggtaccactagttgatttgttaatcatatcactgcagaaaatgtgagaactgtaaagacttaggtcgatgtcggctctgacctttgaacctttggatgatgatggttttgtcatattataatcttgggtccacatggcattatatgtttatctctcgtttctcaatcaacaacccaccaaattgttattaaatatgtcctgcagaaataatatcttcttcaactactctcacgtcttcttttataaaagcaagccataggacgaaaaccttatcttatagcaaagatgcgtgacatcaaaggcttactcatcctatcgatcatcttactcctggtcttgtctcagtcccttcttttgtgttcaggtcatgtcgatcacgaagctggtgtgacaaggaagcttggagtcttcataaggagaagggcaagaagattcagaggacatcgccccacatctgcttccattacacttttgtcaggctccttccatatgactgcttgccttgccacctctagttcttgcagttctcttcttttctaggttccatctactatcaaaagtagttttctttttctactctccttacaagaattgtgtagtacatagtaacacgtctttgtaatgcgtttatgtaagttgagttctacataagcatgtatttgtacaaatttaatgcttgaaaattgtgagcttatcatgttgtcgttttcaataaaccaaagaaaattccttttgaacagctgctatattgatcatgtgttttctaagtactctgtaggaacagagccaatgtgccgtatcaagttgttctagtcacttgttcacttgcaagatgactatatataccacaaccgtgaattagaccaaggaaagccagtatgacaataagaaagtgagatctgattagatcttatctcatgtactgttatgttccaacagcactgaatactatcgagcctttccagattcgtcctgaactgaaagaactagacacattccgggtagaaacaatggtaagatgccaaggaacattttgcattggcagacattattacagggaagcactaatcgaacacagctgattttctcattcaggctaagcctatgccagcttctcagattcctttttctctacgagtttgatgaaattgcgaacaattgtcttgccttcggttgttataatactctccggatgaaattgaactccctgtgaatttttttttacaagacttcaagagctctgttttgaatggaggaggcaagaagctacattaaacacttgagtgggttttacctgtatatgcttgtactttctgtgacgggcagccataaccagaccatcttctgtccatgctgtaacctcgagttcatcactaggaaatgaatctttttcgatcacgagactgtgatatctacctacaaggaaagggctgaaaccaacagaccaacaagatttgtttcattacacattcttacagacttatgattaactatattatacaacacagaaaaacctgattcgtacttggataatccagagaacaagccttcttctcctttctcatcatagtgaaccattgagcttttcccatgcataacaccaaatggtgaccgcacaatctttcctaatcaatgttcaaacaaaattgcatttaagttgtcgatacataacataaagaataaaaccatgtcttctttatatgcaactaacctccaaatgcttctcctatacactgcaaacccatacatactccaaataaaggaacaagtggtccgagttccaaaacagtttgcaaggaaatcccagagtcttgaggggtacctatcaaattcaagagaagtgttaaattcttctcgagcacttcaaaaagacacaccacataatcagaggccaaactatttaccaggtccaggagaaatcaacaatcctcttggcttttttctgcataataaaggaatcaacaccaatcgattagccatattacgttttacacagaatgtattttcctcttaccttttcagctcctcaactgtaagttcatcattgcggtaaacttcaaaatggcaccctagctctcccatatactgtagaaaatatatacaattcaaaattttgtttatactgaagcagaagaaaccacatcaagagaaattaatagtatgcacctcataggcttacatagagaactagaagtaagacatgatcaaattgtaaatttgggatctatgtgggatattcagagcagccaaaatttcatgataaagtgatatatttcaactacgaataaccaatctaaagtcaaacatagcaactcacaaaatcaccaattcaaactttgaacgcgaataaagattctacttaaaagaccagtctttaggcagaaaagaagtaatgtattaggttttgctggatctaacaattactcgttacaagggcaaacaagcaacgaggagcttttccaaataaaacaaaaacacaattctccagagaagtagagtatttcgacataacgactctgatcacattaacaagagagaatctacactaggtagtctaatatctattagcatgtagaaactagattggattgtgaaacaatgagattctaacaatcaatcacaatgcacatacctgaatacatttctaataaaaatgcaaatgcagctgcttttacaccaaaaaagattcaaaaacattcacagaggtagtgatgataggagattgtgttcgaaatgaaacctggcagagattgtaagtgaagctgtcgtaattatcaatcacgatgataggaccagaggaattgacaacaacggaagatatcgaattcgattccgccatttcaatcgaagctttcgcaataacatctctacgactcttccacaaaaccgaaactcctatcacagaggaaacaaaaaacacagataaaaatcgaaacttttgattcgaataacgcttccagagaagacttacttgttgggttcgtaagagagttaacgagagactggtttaggcggcgagtggtgaagccatacttcggttgaagaagacaggaattgtacaatgtagtagccgccattgttttggctcgaagttgtcgtttggagaactgagaaactgaagaactcgtaacgttgtcgttttagcatagaaaattccaaaaacttaaaaataaatgggccactcggttaatatttgtttagacccgttagtaatcgggtttaaatgggtacccgttcaaacattacaaatagcccgtttagacccgtgggcctaaggtccattttaacaacacgacatataacaaacaaccgacccaagtcagaactatgggcagctttattataaaacatggcagtgtgtgtgtagaaatcagattctcatggcttgtatgtcaaatctctcgtcatagagtctccaatgtccatacctctccgtctgcgccacatcccctgaccttggcacatacacatctggcttctttacctccttaagccatttaagccttgacacgttgcttgtaatgtcacggcttgacaaatgcacacacccaaacaagtccaagtactctagcttgggacaaccctcacatatcgaagcaagacccttgacagataatctagagaactgaatctccaaatgctctagattgatcatatgtttcccaatcgcgtcagcttctgtgtctccgtcttgaggacaagcgtctaagtattctgtaggaacagagccaatgtgccgagaagaccaatccataagattacgtttcaagatcctcagattaggacagtttctaccaatcatcacaagagtgtcgtgagatatctcgtgacagtaactgatatcaagttcctttaaactcctgcaccgaaacgctatcttcgtcatcgatgcgtctgtcacgttaggactgcttctaatggcaagaacctgtagattcgggcatctattgatatgtccaaaatcagactcgtagccatagaaaattccaaaatagaggatatcacaaactcaatcacgatcttgataagaaagatatttacctatcggctgcgtaagagagagcgtggtcgctgcaatggcggacgcggatcttagtgagaccaccttcgctccaatcaacgactgatcgtagcattaagtctaccttctgctcgaactcaggggaccacaagtgagtcgactcgggataggaatcgaaccatggctccagatcgaagatagaccagagatacggatctctgcaaacagttagccacgatttttggacgaacatcggaccggtccatagctcctgaatcgtaagccttgaaatgatgttgatgagtatctctggagccaatccgccccaatcagacccgtcttcttccataaagattcttgttttgttttcaaagatcggttctttgtgttcggtaataatgtagtttaaagttacacgaaacgtgtctctttagacacgtgtcaatgcatctgaccgttaattttgttccttgacttttggatcacttccataaatgtcgtttgctgacacatgtttcggtatagaaatgtcacgtttgcaataagccaccattggataaggtttttaagttttcaagtcacaattggatatgttgttcaatcaagataagtaaataagcaagctaactttgatgtgaagctatgttacaacaagatctatgaggaggaacaaaaggttccgtcttcttattttagactctgagagctgcgacaggatcttgccatgaaattttcctcttatttgatccgtttccgccattcctgcaagaagatggcttcacatctttctgctgcatctcaatgctactgatcattaatctcttacatgaattactttcttcaactctcgtgttctcttgattattgtccactgcctctgtttcttgctcttcttctccctatataaatcaatttatgagtaaagacatgtttggtttctaagtctcttcacaatctgattaagagtgaaaaatgtgcttacagatatctgatttagatcaaacaaaggaactcttctcttaggactggttttggtttcatcgtgagccttttccgagtggtttaagtcaggaagcgaaacatgcttagtttccgcctcacttttgttactaggagacacttccactcggatcttcttcccaccatttgatcttctgacctttttaatctcttgtggctggtcttgtctcaaatgtctgtatctccgtcgcagaaatctgttaaagaggttataaacgaacgatatattaacaagtgaggaaaacatcaaaggaaaggactaatgatatattttgtcaaggattgaaactgtctttacctgacttcagccattagtgttgcctttctttctcgcactgcctgtaacctttttctcatagcttcggtttcctagtgtatataatcaaccaacacacgttaacaaaagctcataaccaaatgatctcaaagatcagagtatcgagctgataatatgtacacaacaaggttttaaatcctaaaactatgtttaagagttaagactaatagagatttgcataactaactacacatagaaatcttaataagtaattaactttgttaaggaagcagaagcaattaaacttaaaagtttcttctttctattattttaaagaagaaagttgttcctttttccgggttttccgagtagctctgagcccagatcaatctttgagcaaataaaattacattctcagatccagagacaactaaaaccagacccagaaactgaaacttgatctaaaactcaagaaaagagagttcgtaccatatgcaattctccatagtcttgcataaggctatgatgcctaaacctgacctttggatcctcgaaatgattagagttcaagggagtgaaatctccgtgagttggattcatcagatgagtaaattacagaatcacacaaggagagaaagagagagatgaagagcaaaagatgaaaacagaggaaagagagaaatgagaaagaggaaggttctgggtttcgtgtagaagtctaatatcaatgtgaggagaagtcagagaaggacaaagaagcagaaaagaaggacacatcatgttgttgctgttgttgttgttgttgttgttgttgttgtgagaaggaaagaaaagaaaaaagaaaacaaaaattaaaataaaaggcaaaatttgcttttttggatgtgagtgtgttgggttgagacagcagtgatgaagatggaagcagacttatgcaggaaatgggtaatgacttgtggcactaagtaaattgtgtaatgggtcaaagaaaacacataaaagcaacttccttttttaataacattttatcaactagacaactttttttatattaatgggttagtttggttagagaaatcttgaagaaaccaaacctttctgttttgtttcttgtgttccattgtcgtctgtaaatattaagtttatcttcattcaactgggtccattgtatagagaccgatgagaatggaggttgaaatatatttttcagactttttaatataatccctcaagaaaagtcagatggtggaagagaaaaaaaaagattcgccttttagttattacttaaaaaaatacggattttgcagaaaactctgtcttgatttctggaaactggtgcaaggttttagttttcttctatataaaaaaaaaatcttcttattacgtcaattgttaaaagattgccatctcttcacatgcattccatttactctgttaccccaaaaaaaaataaagtttaaggcaatgactttttgcgttcacatcgatgattctagtgtgtttaatgcatcagttagtcagtgaccatcagctgatgcaatggtgaaaaagggtttggtcacaattaacacacagctctgtagtaactgtaacggttagcttcttcattttcacgagctttgtttctatggtagtcacgttttaattcatgggaaggatttgtttggattcaagatgccactgacctatcttctcttatttattcttgcaaattctcatcatatgattaatcatcacagaaacataattaaacttttttgtataaccagaatgtcttcagtaatgatgtgttgttgtttgcttctcttgtttggtttgttgtctgaaggtagagagattctggtgggaggcaaatctaacacatggaaggctccagaatctagagatgaaacactaaaccaatggtcaggcagaacaagattcaaaattggagattctctctgtaagtaataagatttgactttggtacatggctctgttttgtttctcataaaagttcattttgtctttcaacagtgtggaaatacaatgcggagaatgattcagtgttgcaagtgagacaaacagattacgagagatgtgacagatcagagccaataagaggatacaaagatggtcacacgaatatagagctgaagaggtcaggtcctttttacttcataagtggagaagaaggacattgccaaagaggagagaagcttcgtgttgttgtcttgtctccaaatcacaacagaagcgttgttgatgctcctgctcctgtaaacattgtcttgtctccaaattacaacagaagcgttgctgctgctcctttaaacgctcatatcatgaacaagggaagcctgaacacagcatggagtttgcttcttcttcttccattaggccttttggtttagtcttgtgaattacctctagccaattcggttcgatttcggtttgtattttccggtttacttgttactttggcttgtgatttagtcttgtttcttagccaattcggttcgatttcggtttgtaagtttacttgtttctttgcattactctgtctgagtgtttaatacaatgttagttttggttaatatcctaaattcaaattggaaagaaaacattaaaggccggatcggttatacaactgtggaatttggaaacaaatgttattataagtgggcctaatgggaacttctgcccattaaaggcccattatttgaacttattagctttaagcttgtccacgatttacattagctatcttcttcgtctccgggactgagaccgctctctcttccttatcctccatcttccaatggtttaatccagcaactgtcgacgatgtcgataacgtactccgctatttcctgtaagtttcttcctcactgtgtgtcgaatccgtcctcaatgctcaattttatccatttattgtgagactgtgattgattttggtttccgttgttttatccagctagtacagtttctgggttttcaccaaaaagtgtaccttttgctattcatagcgtaaccaggaggcaatttcttaatcccaacacgttttatagatttgggttctctccttctcttcaggtcagattcctttactagtcagtatcatccaattctccagactctgcttcgttgttgttttggttcttagaattagaccacacttcgttgcttccctttgaagtagagagtcaatgtttactgttatgtgcggatatgttgtgcagggaagtagcattgagtttagccttcagttgaattcaagagttgtgcttagtaaagagcgtcgatctctgccattagttgtgagaaatgatcgtcctcagaatgaagacttacctaagcagtacacaaggcgagagaagaaacctttcccagtccctattgtggacctgagacgagctgcgagggagagagtcaagaacaacaaagacaaacctaagagacctctacctccgcctaaaaatggtatggttgtgaagagccttgtgcctcttgcttataaagtatacaatgcaagaatcagattgatcaacaatctccaccggcttatgaaagttgttcgtgttaatgcttgtgggtaaaaattctcttcttcttcttgtttcatttttggtctgttttgagtatggcctttttttgatgttgtatgattggtctcttaggtggtgcaatgagattcatgttggaccttatgggcatccatttaagtcgtgtaaaggtcccaatacttcccaaaggaaaggtcttcatgaatggactaactcggttattgaggacgttattgttcctcttgaagcctatcacctttttgaccgccttggcaagcgtatccgtcatgatgaaagattctcgattccccgagttcctgctgtagttgagctctgcattcagggcggcgttgaaatacccgaatttccagcaaaaaggagaagaaaaccgattatccgcattggcaaaagcgagtttgttgatgcagatgaaactgaattgcctgatccagagcctcagcctcctccagtgccattgttaactgagttacctgtctcagagatcactcccccatctagcgaagaagaaacagtctccttagccgaagaaacattacaggcctgggaagaaatgagagcaggagccaaaaagctgatgaggatgtacagggttagggtctgtgggtactgtccagaggttcacgtaggtccaacgggacacaaggcccagaactgtggtgcattcaagcaccaacagcggaatggccagcatggttggcaatctgcagtacttgacgacttgataccgccaagatatgtttggcatgttcctgatgtgaatgggccaccgatgcagcgagagctacgaagcttctacgggcaagcacctgctgttgtggagatatgtgctcaggctggcgctgttgtacctgagcattatagagctacaatgagactggaggttggaattccttcgagtgtgaaagaagctgagatggttgtttgatatgtagaagaccttgtaaacttcttcttgtacaaaatcctccattccaccttgtgttgtataataatatcacagcccaggtctttttgacttttgaaggacaaaaaaaacaatccacgctaatcctattatcaagggtaaaaatgtcatttgcttcgttttcatcttttctcgttgccattttcttttttttgtctgtgtcaagtcgataccacttgtctggtagctttatacccactttcatctttttcatgttcgtagttgttcctctggttatcctcatcaacgggacccttgaaaccgtgtagccatgtaagcctttgtctttgtctctttctcttgcttcagcaagttcacgtctgctctatttctaattttgttctaagattcaattctccttttttctatgcgagaaatttaagattggttctctagctctacctctttaaatttgttactatgtgtcggtgtccatcattcatcaaattttttccttttttatccatttgagttgatgtaatgatgttgcttcgcttcatactggtcagagttagtctaatcttcattttagcacaacttgacaacttcatatggttatgacttatttttacttgggtctttcaaaggttaagtattttagtcttattttgggatgatgcagcttgcttaatgattagagtcttaaagctgtgctctttcttcatcgatttgagcaagtgatcttggaaggctcttgagttctgaattccttgtaagcaatcatggcagggaaaagagaaaactttgtgaggttagtgctgcatccttttgttttaatacaaagatctgaagtttgaatgtgagaaacgtattgatttggcaatggttgtttctgatttgtttccttatgaaagtatagtgtgattgtactgaactatagcttgttggtgcatagtaatctgaaagtggtgttgttcataccttttatagggtggatgatttggactctaggttaccatcatcatctgtagccttccaacagaactacgcctccaatttcagtggacaacttcatcctattcatgcaagcaatgaaacttctagatccttcaagaaaggtatccagaagggttccaaagggcttaagtcgatcggacgttcacttggtttcggtgtttatcgagcagtgttcccagaagaccttaaagtatctgaaaagaagatatttgatcctcaggataaattccttttgtattgcaataaattattcgttgcgtcatgtattctttcagtgtttgtggacccttttttcttctatcttcctgtgattaatgctgagtccaagtgcctgggtattgacagaaaactggctatcacagcaagtacattgcggacttttatcgatgtgttttatctcgctcacatggctctccagcttaggactgcttatattgcaccttcatcacgggtctttgggcgaggtgaactcgtgattgatcctgcacagatagcaaagagatatctacaacgttggtttattattgactttctctcagtacttcctctccctcaggttggttaatataagttttgatcatttcagtaaattgtgtgttggaaaacatcattgcttaatttgttgaaagggtgcagtagccagtagttggtgatcagacatctctgtcaagcgctttctagttctagatttacagtactcattttgtgtatgtgcagattgtagtttggaggttcttgcaaagttcaaatgggtcggatgtattggctacaaagcaggccttgcttttcattgttttggtccagtatataccgcgattcctacgtgtcttacccttgacgtcagaattgaaaaggacagcaggtgtctttgctgaaacggcttgggctggtgccgcttattatctgcttttatatatgcttgcaagtcatgtgagtttatatacctttttcattttaagacgttgcttgtactattcaatgcttgcccattcaccatgagttatgtgactgtggcaccaaaagtgcaaaacaaggaaatatttgcatatccgtttcactgttatgaacttatgttcaaatgtttagtttcctaagacatgtaaaggagcttattgagctttctggttaagccgtctatgcttacctttgatgttctatgcaacctttcgttttatcttagttgatgttcatgcctcatgggatcacaaatgtcaagtttcttatgacgagcaactctgattgtatagcttatttactcttcaataatagtattgacttggtaagtgctattttgattgagccactgtttcgtatcttgcagatagttggagctttttggtaccttttagccttagaacgtaacgacgcctgctggcaggaggcctgtatagatgcagggaattgcagcacagatttcttgtactgtggcaatcaaaacatggacggctatgctgtttggaacagagccaaggaatctgttcttaagtccaagtgccgagctgacctcgatgataataatcctccatttgactttgggatttatacacaggctttatcgtctggaattgtctcgtcccaaaacttcatcgtaaaatattgttattgtttgtggtggggccttcagaacttgaggtaaccatgttctatcactattcagtcgaaagactattgctttgatcttaccaattctcactaaactcggctcctttatcaaagttatgcgtctatgagtttcagatattcatatagtacttctcattgttgcaccacagtacacttggacaagggcttgaaaccagtacatacccaatggagattatattttccatatctctcgccatttctgggttgatcctctttgctcttctcattggaaacatgcaggtgagtaattatggtgcaaccttagctactttcgtgatcattagaaatttcttgtaagctctttcaatggaagcatcatgcataatttgtttcctctgcataatgactatctaacaacattttgcaatcttgggacagacatatctccaatctcttaccatccggcttgaagaaatgagagtaaagaggcgtgattcagaacaatggatgcatcacagaatgttaccacaagatcttagggagcgtgtgaggcgctatgaccagtataaatggttggagacacgtggtgtagatgaagagtatctcgttcagaatcttcccaaggatctccggagagacatcaagcggcatctctgtctggctttagtgcgaagggtaagttctccccgctgttccttattcaagcttctcacatagatcacacacccttttgaacatctaggacccattgaataacagtcggctcataactaaaacgagctcttgaccatcgacaagctagcttggttcatgatacgtttttaccataatattaggttccattgtttaagagcatggacgacaagctgctggatgcgatctgtatgcggctgaaaccatgcttgttcacagagagtacctacttagtgcgggaaggagatcctgtagacgagatgctattcataatacgtggtcgcctcgagagtgtgacaacagatggaggcaggagcggtttcttcaaccgcagtctcctgaaagaaggagaattctgcggggaagagcttctgacatgggcattggatccaaaatcaggtgtaaatctcccgtcttccacgaggaccgtgaaagctctgacagaagtagaggcgtttgcgctgacctcagaggagctgaagtttgtagcaagccagttccggcgcttacatagcaggcaagtgcagcacacattcaggttttactctcaccaatggaggacttgggctgcttgtttcatccaggctgcctggcgtagatactgcaagaggaagaaaatggaagaggcagaagccgaggccgcggctgtgtccagctcaaccgctggaccttcatactccattggggctgcatttcttgccactaagtttgcggctaatgcgcttcgcaccattcacaggaaccggaacacaaagattagggatttggtgaagctgcagaagcctcctgagcctgatttcactgctgactgatgattgagcagcttgtagacattattgtttataatttatgggaatcattacggttgagataaacaaatattgcttggctttaaagctgcttgtgctgtctgtaaaattaatatatgaagtgtagaaacaaagagattatagccgttggatttaataaatgtacggttaggatcatatgccggttaaagaatgggtctattgggccttttaatgaagcccacaatatattcacggtgacatgctccggtcccaaggtagagagaagttgcgattgatttcggtgaaagaattaagaatcgatcggacttggagaagagaagagaagatggttggcgcgaatctgaaagcggagacgatggctctaatggacaagagaacagccatggagacggagatgaactctattgtcgaacgtctctgcaatcccggtggtcctggtctctccggcaatctcatcgactcggaggtactgtatctgcgtcctcactcttctctaatcttaaccgaaaattctgcttaattttctcctttgattcgtttgcttatggcagggatttcctcgggaagatattgacattcccatggtgagaactgagcgccgtcgtcttgctggtgatttctcttttcttgtgctgaattagtccatagttagggtgagactacaactccaaggttagtttaaacttaggaaacatagcagaatcatactgattatatgtagtttaggtttttgtcttggctagttggcttgaggtttattcatagttttgtgagctggaaatgagattgaaaggaatcaagcttgatgtgtagcttctacagtgaaccagttgttaagtttttccctacttcttccgttttgagttggtttatttatctgaaatagtttctacacccacacagagttaaggagtgagcacggggagataacggaaaagataaatgtgaacattcaaattcttcattcagtgaggcctacatctagagcttcatccacaaaagattcaggtatgactgtacaggaagaagctccaaatttcagcttggaatctttgattggcttaatcatcttttctgattctggtcctttttcttaaggctatgattaatagaagttcattttatagtttgaaaccatatgcacgacgtgggtggatacaaagcttatgaatagataatgatgcaggtccagaagaaacaagcttgtcaggtgctgcagtaaattctttatctgcctccatgcagacatctggcttcagtgttacttccggtcccatggatgtggatgtggttactagtattccctttgcaatggttgatgagataaacgagtcatctccagcagcagagggtggattacagcttggagatcaggttttgaaatttggcaacgtggagggtggtgacaacctgttgcaaaggcttgccgctgaagctcagtctaaccagggacaagccgtttctgttcaagttatgaggcaaggtgcaaaagtcgtcttatctgtcacaccaaggatatggcaaggcagaggtctattggggtacatactgatactgctaatatacttcaatagttgatctttttacaaaagagaaggaaacaaacatttctccttgtcaactgatgaattgttaactctttcccatatgatattcttccattgcaggtgccatttccgtttggtatgagcagcagatacttccttggattatcatctgggggtctggatatggtgaaagcttctgtgaaagctagtcggtgatgaagtctattattgcaaagtagagaacagtgtttttcaacttttgtatggagaacccaactaaacaaatagcatttgttctgtagctgaaatagacaattaagaggcttcattactcatcctaacaatggtttaggtggtggattaaacaaaaggataatagaatcccaaatcattgagtttacacccacttcactggaacctaataaagttgatgatcacccactaagaattggtgggggtggtagcaaagttgacgtcatactatccatttggaacattctcatattaatatttatatatttaggcaatcaggtgagaaattttgttactttgtatacagagcaagttttgattttacattttttgagacttgggttaaagatatgactccaccaccaaaattgagacttgcgttaaaagatacaaggatggtggtagatttttctctcgtaatagtagaaacaatctatgtattagcacgccctcgtccataagtataaaactcagctttggcggagtgttttgctatctaatacatgtccgtttatttttcctctctgctttgagaaactcttgagtttgagattagagtgtttttgggtcattgaagtgttgttattagttatagtacccaatgtttccaaattggatgctctatgtacaaaaagggttatcacttatcactgttgaaataacatttccagtgtcagttcacgatgtgaagtaggttcaagcttatcttgcttgtgtctagctgcattcctttttatctacgaatattctttactgtctgactgtcattctttgtggtgtgtatgatcagaaggttgtttgaattccttttgctttcggatgctttggcaaagcacacgtagcctccgattctgaccaagaggcaggccttcaggttcttgctatgattctggttcatcctctttggcttattgaagtatctttgaccaagtgtctcataggtttaagcagctgtgcaaaacgtagcggaacgtgtgccctgataagtgtcccattctctgtatattcctatatacgcaacaaacacaagacatgagaatcaaatgagttatctgaacaaataaaggaaaccaaagtaagatggtcggtcatctacttacagtttctttcaccattccaaccttgtgtatggtgcttagaaggtcccctttatcaaatggcaaaagggcttcaacccaaaccattgaatcctgttacagagttttaaaactaaatttctaatgtgccaacatcatgaacccaaaaaaaagaatcaatacattttgatgaaatgcaaaccttgagcttctcatgaacagcattgcagaagtcgtctagtccttctccagtcagagcagatatacaaattgtatccccagtttcctctgcttccagcttgaccttttgaggatcatccactctatcaacctaacgaaggagtaagtaagagagtattatagttgtagttgttcctactttatcttgcaactacagcaagagaccaaatagatatacaatcatatcatcatatccgtctctactattatagattaccttattccacacgaccaattttggaattgatgaaacgtcgagttcagacataaccttctccacagcttctatttgttgctctgccagtgggtggctaaacattttacaagcataatatcatcaggaggtgaaattatgacatatgattgattgacccaaattaaccaagataccaaacctgatgtcaacaacatgcaccaaaaggcttgactctgctatttcttcaagtgttgctctgaaagcagcaacctgcaagacacatttcagctaaattacacaccgcgtcaacatttgtttgttctctagtacagttttatccattaggaccttaccagagtggttggtaacttttggataaaaccaacagtatctgtgagaagaaattccttcccgttttgcatctgaccaaaagggacacagaaagaaaatgtcatgtcaaaaattgacatacagtttggttgaaagaaaagtttcaagatggctgtacatgttgcacaatacaattacgttaaacacatcacatagaacacgtcgtccgctagataatgtgagtatcaggagcatatgtattctttatgtagcatataataaaagaaacaactgtctctcgaaaaaggagggctgcagatctactcttccaacaaaattcactgacctgaacccttctcgtagttggatcaagagttgcaaacaaacgattttcagcgagaacattagcaccagtcaattggttcaatagtgtactctttccagcgtttgtgtaaccgacctaaacacaatgggtataaaacatttaaatgtaaactgaagtgttggtcatttcctacaagtctaacatgctgtggtgtacttaccaaggatacaacaggtacaggtatagcaacacgcctgcttctatactgcttccgatgctttcttacagattccaactcctttttgagaactccaatctgcccaattcaatatgaaaacgttcagaagatgcttctatcttaatggaccaatacagaaaaatctaaacaaagacagaacttaagaaagcattaatcacaaactttatcacacaccatttctttacaaatgaagaggatatcactagtagaacaggctaaaaactgcagaactatatattttttacttacttgagtacgcaagattcgcttatcaacttcaatttgtttttctcccatacccttaacttggccaccagattgacgctcaagatgagtccacattctagttaatcgtggcaactggtactccatttgtgctagagcaacctggaaacaaatacaatttgagccacggtttctgacaaaagcagtatcaaaaaaaattacagcggtcatctctatatatatgctttatcttgcctgcaaggctgcttcatgagttgcggccctttggttgaaaatgtccaagataagggcggtgcggtcacaaactcgaacatccccaccaaaggccttttccaggttacgcaattgcctgaaatataacatataaataagaaaatgtaacacatactcaattcacaagtcgacaaactagttttgaaacaaacaagagtaatgaaactccaacagactccaacaatccgatggctactttagtagatattattcagctgaatgaccgagacaagctacactatatagaaagaagaaacatagatggaaaattttaaacttataactttgggtgttaggaaacttcaagagcatatgtttccactaaaaacaaaagttacacagaaacattaccctggtgaaagttcatcgtcaaatatcacagtctcaacgtccaaagcattaattgcactttttatctctgcgacctttcctgatccaatgtatgttctaggatttggggaagctagcctgtagtataccatcaaacaatcatcgacttaagcatctgccgtaaactaacatggcagcagacactaaataaacaacaactagatcacaggggaccaagaagaatccagtcacatccctaagtagcaatacatagataactagaaacaactaacttttgataagtagaaccaaccactgcaagcccagcagtatccgcaagttgttctagctcctcaagagattcctcaatattaaacaagcattctccatcaccctttctttccacgcccactagatatgccttctcttcgaaaatctgaaaatcacatataaagtatccttcttcaatacttgaacagcaaatactaatttcatgctcaagcaaatctatataccaatttcatcgaatttaggaaagtaagcacttttctccgtttccgagcaaacatcttatgaacaaacgttatccactaaatgatgacgaagaagagaagatagaaataagttaaagtaacctcctttccatttctgagcttgaatctatcgtccaagctctcttcatctccttttttcttcctcaacattttagatggagaagcaatcgtttcgttgtcgagatttgtctcctctgttggtaagtcgagaacttgaaggatttcatcttcctccacagtttcctccaactcaataccatgttgagcaaggttacaagataatctccacgaatagcagttggcatgaagacgagaaggtggaaaagaaactattgcacgattgggtttaggtttatggtttgcgtgccactgaagtttgaaaattggagaagaagaaaggtaaaacgagctcatggtggagaatgaaggagcttctgagagattgagtgtgtggaaatgagttcatggatggtgaagaagcagtgagttcaactacgtgtcgtttaatttaatcctttaatgtacaatgattgccgtttttttgttttatttttgagttaatttgtttggttactagattagctgtatcttgtccatggacaacattattgatccataaatctatgtttatttattatgatttctctttcctctcgatttttcttgggaagaagaaactcatgggaattttcaggaattttgtcagccattttctctcatttgagaaaccactaaattaggtgtgcaaaaatcctttcttttctctgtcaagtcaaaatgtgctctttctctcttgtttattcacaaatgcaggcttgtttttgtcggtcttcaagaagcttatttatataatctgaatcattgacgttgctttttatgttacttctgtctgttagtgaaaacaagaacccctaaatttgtctggaaaggaagcttttttattgatgtttctctgtttactttgtagagcttcaaaaaacttctaaaggaatgaatgtttctttgatttccaagagagttttggttcgttgactgagtttagttttggagatctagcaactgaaagctggttaaatacttaaatggacgtagcaggctactgtttgtgaatcctctcgatggcgatgttgtttgtgtggaaaaagtatggcctgtttcagatgtttctctgttgattcaagttttaaacgagagccaagagtcagaaatcaggtcacaggctcgtgaaagctgctttgagtcaaacccatgtcaggtgctcctagagttcagtccatgaatgtggctgaagcagagaccaggtcaactctggggtctactgctaaaaaggctagtcctttcatcacacacaaagctgtatcaaagtcactgcgaaagcttgaaagatcctcatctgggcgtactggatcagatgagaaaacatcttatgctacaccaacagaaactgtgtcttcttcttctcagaagcatactcttaatgcggcttctatactacgacggcatgagcagaacctgaattctaatctgtcacttaatgcatcgttttcatctgatgcctccatggactcgttccacagccgagcatcaactggtcgcttgattaggtcgtacagtgttggaagtagaagtaagtcttacccttccaagccaagaagtgttgtctctgaaggtgctttggattcaccacctaatggttcagagactaagaagaggtgtacttgggtgacaccaaactccggtcagtttcatactcttatctacattcaggtgtagatggatatacacaatcatcgacttactttcaaagatctctctattgactgttttttgttttgtatgaaaacgccagatccatgttatatagttttccatgatgaagaatggggtgtgccagttcacgatgacaagtacggttcaagcttttctcgcttgtgtatatctgctctctgtttgattgatgaatattccttactgtcattctttgctggtgtatgttcaggaggttgtttgaactccttgtgctttcgggtgctttggccgaacacacatggcctacgatactgagcaagagacaggctttcaggttcttgctatgactctggttcactcattttgcatgaacgtttctctcatttctttgaagcagtacattccgttttcttatgaaaagtgtggaatgcagggaagtttttgctgattttgaccccaatgccattgtgaaaatcaatgagaagaagataattggtccaggaagcccggcaagcactttattgtctgatcttaagctaagggcagtcattgagaatgcacgccagatacttaaggtagacctctcttccactcttggttggttgctcaagatacccaattttgagcacattgattcaaagccttgcaaaattctggatattgaaataaaaggaggtctagaagttatcaaagtattattgtttcaagattcaagaaaaagaagatcaagtctggacagataggcttgttgcataggatgggaaactaaagcaagcaactgtccattgcattcagattgatgaatgctctatctctgttgacaggtgatagaagaatacggatcatttgacaagtatatatggagttttgtgaagaataaggcgattgtgagcaagttcaggtaccagcgacaagtacctgcaaaaactccaaaagcagaagtgataagtaaagatctagtgagaagagggttccgcagcgtcggaccaacggtggtttactccttcatgcaggcagcagggataacaaacgatcatcttaccagttgtttcaggttccaccattgtatattcgaacatgaaaggtatgtctgaaaagaaggacttcctaaaacttgttaaagtccttttatgttttgtaaagcctccaatttgagtctattattagtattcaaaacaatgaagaagcaatgtttgtagtaaaatgcaaaacaaaagaaacagtggataagaatcaaacagcaaatcggtaggtataatagtccaatgaagtagcatcgcttcgtctgatcttgacaacttgtcctcgcttgagtccatagtatctggcaagaggatcagtgacaaggatgcgaggcaactgtgtgtcttgcaccgtgtacgtgttgagtaatttcttctttgcttgatcgtcgagaacatagtacttgttgacgagtttatgctcagtgatgttggtcaccaattcagcttcctcaaagacttcaatcgttagcatcttgttgagttctgatacggccattctagcgggagcagttatggccattggaacaactacgatccctcgatgaactttatcgtctcgcatctttattgccacttccttcttaatcactgggactcccaccttaggcccttccgggtagaacacgtaaatctgcaccaagtcaaagatcaagataagattcagcaatggatcaaaagcttacaactttatgacatgttcttcatatatgtatgtaccttgtcggctggatttggccccttattggctgagacgaaaagagcttccttgttcactttgttcatagttttacaaaacctctgaacaaactcttctcttttcaagttcaagtccgattcttctatagtgtaacctcgatccctcagcatctgaagcaccgtgcgacgcaccttgaaaatcctcgtgatttcatcatccatgtccgacattctctccaaagtcttggttatttttcttttgccggcgaggaagaatgagattagtgaggtttttactagggtttatggcactcataaataatggtaatatagcatgttattatatttaatggtttggatattcagttatatcagatgaatttcttcaggtaatatagactgagatactttttcatgagcatatatatctcagatcttgtgccataaaattgccttaaaaatcaagagagacgagaaagaaagtgtaaataatctcactaaaaaacaggggatagggtctttctctgtttatcccaaagagaacaaaactgagaggaaaagagataacgaacaatgtctactactgtctatagcctatcttttcctcatttgttaacattactttacgccagatacagcagcatgtggattacatatatgtataagattatagtccttattcatatcctgtaggctgtctttgcgtcagttatgctttgtgtccatttcttctttgtctctttttgtctcttcgatgcaagcatctggaacgggttaggccctctatagctctcctctttaatccttatcttctttttcttccctcggtcatattcttcatccctgccacaatccaataccatttctatgtaagctaattgcctaattacaatatgtaactgaacccttggaaaataacccaaacactcaccactcatccgctacataaccaatgctgcttgcgccttcactctttgatcccctcttctgagaagctgaaatttcctcatcccatttggcaactgcaatagttataagattcaatcccatcaaaaccaatcacacgtaataagcccttgcattaaggtttggaggcctgattgatgccagttccaaaaatattatcatcagtgttgaataatggccaatgaatggaagttcattttcattagtaattaacatggccaagtgtctaaaagtgacaagttgagaaaagcaaggacttacccactgtctctggcacaccccgagtgagaatgttcacagcttctttctgtaacaaaactgactctctctttcttttggcgttttggcttgcctcagacaagtcagaactacccacgggttgctgttggtctgacgtaacggcaccatcactactcgatatcattttacttggggcaatgagacttgtatcttgatatttaactctcttctttgataggagctcctcagagataatctcgccagctaccgtcgtacttaatctctcccttctctgtaccttcttttttcgtaagcccagggccagcttgaaaaacttgaattccaccttcagagttttcgttttaggcttgcgagtctttttcggtgtggtgagagtctccctctcggaagttaacttcaatgactcaattgaagtggccgattcttccaagtgatgtcccatagtttgatcaataagaacagctttttcaacaggtggattaccaactgacacatttataacctgtagcagtagcgagaagcaagttagaaacactcaacccttttaatgaaaatacagactcgttatgatatgtttatatacacttaccttcagtgaattagcaggctcattcaaattgttaagagaattcttctcttcaacactattttcagctttaggtccaagggtaggcaacttcacaagagtctgagcatttgcgcttccatccaggtgaggagacaccttctctggtaatattaggcatgcagcctttgaatcctcctttaccaaagatccttccccattagcctgcggaagtggcacttccttttggaagatctcttttgtatttaggtctttctgaaccaagacagtaggggcagctaaatcacaagttttcacgggtgccgaaccattttccgtctcaaggatctcttttgcctccacattacttatggcattgttctgagtctctttggcatttaaatctttctgagttaagacagcaggagtacttgggccacatgatttcaaaggtgctaaaccattggcaacaagagcgccaaacccacattctttgatgactgttgagccattcacttgatcttttatgttagaagctacgatcaaagaagctctgtttgtggcaaagctctctttcttaaccacagggactgaattcttagggacagcattttgtctatcacggacatagaatagcatatatgccttttgattgaacacagtcttctcactaacttggacaacctacaagaacaatgtaaagaggaacttactactagctatacttgattcttgtctgtttgcttacgcatcatttagcaattaaaaatgtgccacctcaacacggaactatgtagagaaaaactacagcatcaaaccaaaattttgcaatacagaaaatgtagaacacttctacttaccctgttgtcatcaagggaataccacatgccacttgatgtgcgaacaaagcaggcgtagtgaccagaatggctgcttcgaccataatgaactaacacgccatatagagtatacttcaaattaccttcctgttaaacacaagtattgtatttgttaaaaagggaaccatgaagcttaaagatcaaaaaagacatgaacacaatcatcaaaacaactataagatcaagtcaacttcatataatatagagcagaaaaagaagcccacttacatgaggaccactgacgaaaggtttcatgtcaattgcagaggtaaaatctactttcctatcgattttttcggatctgtgtgcttcaaaccgcttcagatgtacggttagaacgtaaggtgctttagaaacagttagctgttttttagccttaactttctgcttgcatctttcacattggtaaacctttgcaccattatctaagagctcaacagcagtgaaacgcgaaagtgctctctgcaatgaatctgcctttgaaatatctagacttaggtcaagaaacggatcaaacttgttggagcaatgggaacattgctcgcatttcacctgaattggaaaagaaaatgttagagctgaggccattaatcatgtcacagagatcttccgcacataggtaaaatacatgctcaaaagatgtaagacttcccgacaccaaaacaaatttacctgacttcgaaggctaccgccaaaaatcttgtgtaccaaacttctcctgtaagcatcagaggattcacttggtacaccagaaggtagactacacttgtgcatgcattcaagcaaattgatcatgtactcatgtgcatcctcctgccggcaatttctgaagtttcgggatatgcctatccaatcagatgagaatcctcattagtctgattattaagccaaaattggcacacaatagtgtaaaccagaaaggtctgagatgcatacatcgcaagtttgagaccaaatcttttggtgctaatattctgccattagcttgacgggcagtcctgacatgtttctggatcgcacataaagcacaaaatccagcaacatgacctacaaaaacgtattcaaaagaacactgaatcagacactggaaacaagactaccaaacacactcgctaatctagaaaacataagtggtttggctgatcaaaaagcaacaaaaattaacattttgagcatctaaagcaacttacaatatttctgatgcgcagcggtttgcagagtagcagctaaaggctcagtgtatgtcaaacattgcaatacggaattaagaaaacatgtattcccgagattctgcaaacccgcaccctacaaaatcacaaacaccgttcacatatacacaaagtcaatgagaattatgacaagtattgataaaaaggaagcattcttacgctaatcagttgatcaaaatagagataggatggctaaaaggaagaatttgtacgataagcactcacgattttgcggaaggtaatgctaaaagtaagatcgggttcgaacccatgttccaacaaatcggagctgtcgggtttcttagcggacggtgcagataacagtcgctggttagaggagcaaggattcaaagtctcgatcttaaaatcggaacgcccattagagaaaccgttgaagggtttccttgcagggtgaaactcgatctttctgaagacggcggaagcggtagaggaagcaacagcgcaagatccgttgttgttcgacgacggatcccgatccgtttggatcgtgatttcggtgctgctcgtagcaacctccattcaccccaaatccagaggaatcaacaatccgtgtgattgtcgggaagagagattgtgtgaatgaagaagaagatgagagcctttgcggctgtgtgaaaagaaaggagagaaagagagcggaagctgcaacgcactattaaaccctagctaaagacccagccacttattttattttattttataaattttgcatttgatagagacaggagtttctgtttctgttttctgttacggtggtctataccgcgcctgattattaacccggggaatgaaacagtacttattatttatagccttaaaccctaatttaaaggaggttgaacttggaataatataaaaaccaattctaggcctaatcaatgtataagctataaatttagaactattctaaagcttttaaaatataaaaattaatgaattaaatccaaataaaagcttcaaaatgttgatattggttcttcacattttttttttatattttgtttaacttattttaaataatattaccataaaactaactcagtattgaattataaatggaattaaaaatcaatagatattcaatttttatttttctggtaggaatagatattcaaatttaacctaatgggaaagaaattcaaaaataatattgttaatttttaaattcagtcaaatttaattgaatcccttccttccataatcccctaaacccctgaattctgttcactaataggcctaattaaaaagcccatttatatgagtttgacgatttgttaggaagtttggaactaaaaggagaaactggattgggcttatttcgatgagtaaacccggagcttttgaggccatatataataaacccacactagttgcaaactggtgctgactattattaatctatgtaaaagtttcaatttaaataattttttatattggaaaaaaaaagcaattagtaaagaaatagatttactgcagaaatcttaaatctttttaaaaaaatatgaaattatgaatcaactttttaatttagagcaagagaaaggaaaacaaaagtttagtggaaaaagaaaaagtagaggaattgcatggggggagagaaaaattataaaactaaaaacaatagcagacagctattgtaattggtaaacatgtgtagtagtaaaaggatcccgagtcggtgaagactccaaagtacgtttgtatatttatatatttcagagtagtgaattggaggaaatcaatatctatctaatccccataagatacacccattattgaaaccatggcccattcatatatttacttatttgtttctgtgtgaccgttattacttatttgtctcattcttaaattagtgaatgattaaaaaaagattgtgtgtgtggatgggtcatcaactcatcatgggtttaggtaaatgttactcacaagtcacaattaacaactttttttttataaaagaaaaacaaatatgttcgttgccacggtagtttggctcactccaaatttaataacgtattgtattcgcaaaagaagatatactaggagaaagcaaaatgtgttttgtagtattaaaaaagagtctataaagagagagagagagaatgtgcatgaaaataagaaagacagagagaggggaggaaaacaaagaagcaggtgcatagggagaagtgccatgagtcacgtgccctcttactcgaccacgtgccgtcgaagcaatcccaatccaactccgattcgtgttccaatttttcattggggtctaaacttgattagtgtactactatgtaattaattagtgtggttactaattagacacgcacacagacgcaattgcaaattcacatttagattaaggagaccaggatccgttatagctgttaattaggtagggtagtttatccaatacaccaagcatgcatttaacgttaattgagtgtttgctagtacaatccatgcttgatagtataaatgtattgatattcatatattacaaattaaaatatgtatgcttgtactatctatataaagttacggattgtgactttttcttttggtgtaaaaccgatttattatcactgttttctgccacaaaaagctgtcggtggcactcacttcactaatccagtgacagtaaatttttataaaataagattatctaaattaaagttaaaataataacaataacacgttaaatacttaaattagatccatttgttcattctcatctcaaacactcgaccttttataaaggaaaatttagtttcactctctccgactccttccaaaatgatttactttttaatatccaaactcatctaaatttgggtctatatatggctccgtatagatatattctaatattgcatttaactgacgtagacaatattcaatgccataaattttcctcttggttagttggtgaaaaaagtcaaaaccgaactaatccaacaaatattcgttaaattttagctagtttggtgatgaagtaaagtctttaacatattcttacttttgtaaaaaaaaaaagttatattgatatttgatcaaagtatgagtatttacatgaaccatgtgaatacgtatataaccattcacttaaatctcgtgaggtacttgaagaacaaaaataatagtggaagaggacgcaattcaattgttaaacacggcacatgttgattgatagataacgtaaactttatttcataaagtaaaaaacaagaagtaatcaaaattaattaacttcaaataaaaaaagaaaagtaaaaaagtagagagattgtgatcataaaccttgatgattatgtttaagtaagcatctttgcagtgcaaccacatgcaaaggctttaggttaattttaaaagcagtagccaattatccaatttggtgatctatagctagtctcaatcttcatgagacaaacataggtccccctcctctgtctgatctaacaacccaactccaaattctgctttatcagaaattatatgaaatcaattaccttttggtgcccaacaacctccattttccttcagcttcaaggctcatcatcattactactttcaaattcacagctcgattactagtacgacatagacatagacataaagacagagaatggacccaagtagtatcaacagcagcagaagaaagagaattggaggagccgttgttgctgcaggttctgtttgggaaacgagaatgcagagcgatgatgaagtttgtaataacgccattgttcttcatgttacaaacgaagacaagacttcttctactaagcaaatgactttaaaggatgaaactttattaggtgttaatggaaagagacggacttggaagtctagagcgtccgatgtgaagaacccatcaacgcttgagattgttcgagccaattctctgaaggtgacgaagccgagatcaattggtactcctccgatgacgccgaggagatcgttgtctagtagtgattctaatgataagagtccgagtgtgtcggtggtggcgaagaaggcaagatctgaatctgtagaggggattgagaagaagactactccgggtcgagttaagaagatccgatcggaggtctgcacgacgatcgttaaagccggtgaatttgattcagttgcgttgaggaaagtgaattcgttgccatctccaaattctgagaaatctgatacgaaaacagagcaagaagtgactatcattgagaattcgaagatcccagaagaagtcaaggagtttggtgtttgtcaggagatgatcgtatctgctaaatcaaacgaaaatgagcagattgacaatggcgaccaggagattggtgatcaagatgattatgaagaagatggagatgaggaggaggaaagagaagtggagaagaagagtgttgatgtgaaggagataaatgtagccaaggaaaacagagttggtggtgttgagattaaaaagtttagtcaatttcaaaacagaacatctccatctccgtcgtccgttcgtaaaatttcgcctccggtgatcaaaagggcaacttctgtttactcggccccaccaaattctacttcaagcacaggttgtttaatccgaatttcagtgctttgtttcatcgaccgctatttgcttactgaattctgatgaatcctctgtttttcacgactgtttccagatagatttgcagagcaagaagacaactttactcattcacagagtaaattgcagagtctgggtgagtttcttaacagtttactgtgcataattccatctacaaatttttttactatgaaaagtctaaagtatgttaaataatgaaatgaaatctggacagtggatctggtgatgtggagggatgtatcaaggtcgacgcttgtgtttggcttcggaacattcctcatcatctcttcttcctacgccaatgatctcaatttcaggttctttagttcttttcaattgatcaaggagaatctacacacaagttagttaagtagtatggaactaaaatgtgatgaaaatgtacagcttcatatcggtggtagcgtacatgggactcatctatctcggtctcatgttcgtattaaaatcactgatccacaggtttgatacatagacctatttctctctctctatctttgcatgttgtttttgtgattgggtttaataggcatgtaataatggacgcaggggaatggtggaggaggagagacataaagtggttggagttagagaggaagatgtcaagaggatgctcagactcataatgccttatctcaacgagtctctgcatcaactcagagctctcttctccggtgatccatcaaccactctcaaggtaagtctttttcttctcactttctctccttcgtttcctctttctcccttgaccttaataaagaagagatgatgttttgcagatgggagtagtgttgtttgtcttggccaggtgtggctcttctatcactctttggaacctcgccaaatttggtacctctagacttcaagatttcttgttttaagaagtggtgtatgtagatttctgacttgcgagtgttttgtcctcgtgagaacaggctttttgggagcatttacaatacctaaaatcttcatatcatactcaacacacttctctgcatacggtaactaaaaactccttcaatatctttcagttacatcttctatgaaacagtttttaatcaaacaaagttgtgtacaattcaggaaatttctggatgaggagattcagggacgcatgggaatcttgcaatcacaaaaaggcagtggctttggcacttttcaccttagtttggaacctctcctcagtcactgcccgtgtttgggcagcattcatgttactcgtcgccttcagatattatcaacataagatgatttggacaactgatcaagctgatgatgatgaggatgacaatgaagaagaagaagcagaagaagaaaaagaacaagtccctcctaaacacaaaagggctcctcctcatatgatgatgcctaataaactcaagaaaatttcttaaatatactaattgtttttcctccatatataaacaacatttactatgtaatctctttagtttttagttacttctctatacaaagcttacagtttataatgtgaatctgatcttctaagttcaattaacttatgccaacaatctaaaactcacacacttgaaatatttatccattcttcttaaacttagttagacttgaacccaaaaacaaacaatcttaattaggcttctaacgggctttaagcgggccttattacataaactattcagctttcgtgaaataacaaatcggacagaagttgaaagctttacttcttcacttttacggttgctcaccgtcgtgacatctccactcttttcctttcaaaatccaaaatcacgatttgattttctctcgcctccgacgaacaagtttaaggtaccactccatgtttctctgcgatttcaattcgaactccatgtgaccttttctctgtctgtgtttaatttagggtttactcaattcgtgactttcatttgcgttgaaaaatttatctgattttgctttgttgtgacttgtgagtggttttcagatgagcgtagcaagtgattctccagttcattcatcaagtagtagtgacgatcttgctgcattccttgatgctgaattagactctgcatcagatgcttcgtctggacccagcgaagaagaagaagctgaggatgatgtagaatctgggtaaactcaactctcatatgtcatgcattctctctaattgaatcttcgaactctctactggtatttacagtgtgtatattttctcaaaccatgtttctcaatcttttaggttaaagagacaaaagttggagcatttagagggtgaagctctctttattgattcagtcttatttttctgtctttcgtttgttcgattgtattgaattttgaaccttatgcttgcagaagcatcctcaagcaaaggcgaatgcgagcatccaggatcatttgggaatatgtgctttgtatgtggacaaaaactggaagaaactggtgtttcatttagatacatacacaaggtatcgatttcagaatagcttctcttaaatcaaatcttagtttttatttaatgagctttgggaaatctgttttcttaggaaatgaggctcaatgaagatgaaatctcccggttgcgtgattcagattcgagattcttgcaacgccagcggaagttgtatttagttctcgatctagaccacacactgctaaatacaaccatactgagggacctaaaaccagaggaggaatacttgaaaagtcatactcattctcttcaaggtgatacattcagctacattgttttgcttctttttcaaatgtgatctttgtgcatggaacttcagtctagtatttgtctttttttttgttccatctagatggttgcaatgtttccggaggcagtcttttcctactggaatttatgcaaatgatgaccaaactgaggccgtttgttcactcatttctaaaagaagctagtgagatgtttgtgatgtacatatacacaatgggagataggaattatgcacgacagatggccaagctgctggaccccaaaggagagtactttggtgatcgggtcatttctcgggatgacggcacagtgagacatgaaaagagtctagatgtggtgcttggacaagaaagtgctgttctgattcttgacgatacagagaatgtaagtatgatttgtaatttgtcaatgtttcatgtaacttttaatcatgatattgagttgtgctgatgatacttggtttgatgctcaggcgtggccaaagcacaaggacaatttgattgtgatagagagatatcactttttttcttcgagctgcaggcagtttgatcacagatacaagtctctatcggagttgaagagtgatgagagtgaaccagatggggcacttgcaactgtcctgaaagtcctaaaacaagcgcatgctctattctttgaggtatgcactcactggatctaaataaaacttatctcttgtcttgttggagtttgttgattatattattcgtttgtttcagaatgtggatgaaggcatatcaaacagagatgttaggttaatgctgaaacaagtgcgtaaagagatacttaaaggatgtaaaatagtgttcagtcgggtgttcccaaccaaggcaaagccagaagatcaccccctgtggaaaatggctgaggaactgggagccacctgcgcaacggaagtggatgcatcagtgacacacgttgtggcaatggatgtgggaacagagaaggctcgttgggccgttagagagaagaagtatgtggttcatagaggatggatagatgcagctaattacctttggatgaaacagccagaagagaacttcggtttagagcagctcaagaagcaattgaccgaagaagagtgatttatgtaacaacaatgagaaagaagagatagcttttttttgttggatattaattatgaatctatgtctaaagtaaagttttgtaatgtacattacattgtatctctgatatttaaacaaggtactaatttttggttgatctccttaattattttgtttcgtctatgcttatttgcgaaggtctgtaatctaccgacaacttttttgggccgggcctaaatgggccgtatatttatgtccctcatctactttcatttgttttgtttggtgtttgtttctggtttctgattccgtcttcttcgcttagacatggctctcgatacttatgcgtcgtcgaaccctaatgatgttcatgaggatgttcttcttaaagctagagatgcttgttacaaggtccgtctttctctcttctcattttcgttgttgtgatactgatttgtgtgatttaggttaaattgtaagtgatcattaattggtgcaggccagagatgctttttacgcttgtctagaaaaggaatctggtaaaaaaccaactgaaatcgccaccgtgggtcttctctatcctaaggagtgtagcaattctagaacccaattcgtcaacaactgtcggtcctcttgggtactctcttctttcaattagttttgcaaattgcaatctttatatgatttgtttgggaattaatggaagaaatgaaaaattgtaggtgaaacatttcgatagagagtactgtaggaacaagagagttcaaaggctgttggatgatggagatgagaggaaaggtccaatgtcacttcctcagccttacactttcaagccttctccttccacttagaagattccttcctttctggtatcttattaactcttactcaatatgtccttatttgacttcaaccttagattctttaatttgtcttatgtttgcatatccctctagtgttctgtgttttcatcattgctcttatgatcaagcttttttaccttgatc

SEQ ID NO: 922 - DNA, 41087 bp, Arabidopsis thaliana
aagcttccttctgtatccatgctcactcttttccctcgcctccgtggaggtggaggagatggtggggcaacgggagccgagtctcgcgattgctatctcaatatgtacgcggagaagaaacctgacaaggttgatcctaatgagcagaggctctccaaatggttgaattgtgctttgtctaacgagcctttggctgagccgtgcgtgattgatctccttgggaatttgttcaataaagaagttttggtgcacgctttgttgtctaagaggttgcctaaacaattctcgtacattaagggtttgaaagatatggtgaatattaagcttacgcctgttgctggttctgatggttcatcgcaagatacgactagtgcacagtttcagtgtccggtctcagggcttgaattcaatggaaagtacaagtttttcgctttgaggggatgtggacatgtgatgagcgcaaaggcgttgaaggaagtgaagtcttcttcttgtttggtgtgtcatgcggatgtcaaagattctgataagattgtgatcaatggtactgaggaggaagtagatttgttgagggagaggatggaggaggagaaagctaagctgagagagaagaaaggtgtctcaaagaagagtaagaacggtgctgctgtggtggctgatacaggtgcgaaggtcgcaaagagacagatagaggatgggaatgtcaatggcaatggtataactgtgaagaaattcaaggcggcggataaagtgccggttaatgctactaaggaagtctatgcttctctctttacttcctctaagaagaagtctgatttcagggagacttactcttgcaggtcacttcctctcggcaggaattgatttgttggatcaatgttgtttacctgctcgcttcatttgctctgtaatctgttttgattatattgatatatcaacttgcttttgtaatttcgcctactggataatataatgtttttcttttccttttgcaattggtaaaaacagtaaacatgtttgcatccactatgctaaaactagtaaaagtgttgtatcataagctgcaattgtaacaagaggatatgtatgttgtttacatcaatgcacgggtcaatggctttgcagctcaattcaaaatgttatatagtcatccaaaaacagatagcagatttgcacaagcagttcacataaagccaatagtttccagatcgtggaaactcgtgaccatagtactctcattggcttagccgtgcctctctcttaagcacctgtgcggcatagaagtaaaacaactgtcaagaattaagtttttcccacaaatctagatgaggaaaagagatgaatgtaggcattaacctcatcagcaaacttgatcaaaatagtagttcgaggacgttgttgtccttcaatgggtacaaaatgagccgttaccacagcaggaaaccctgcgttatccagaactccctacatagaggaaaccgtgtcaggctcattatcttcttcctctaccaattaaatttgaaccctattcgtgaatatgtcaagggagcactcaccttcactatgccagcaacaaacgctccgcagttgaatgttcccatgtcttttggaatcgaaatgaacctacactttcacatttgttatcagttttcttgaccttaaaaaaattacattatctcagagtgtttatggaaagagctggagcagtataaacctgttaacaagaagctccttttcactgatcatgtactcatcttcatgttctgttcctttttcaagtgaatcagcaacctatggcatgttcgttaagtgtgagttagaatccaggaacaggcatgtcgatagaaacactcaacaactaattgaatttgaaatcgccactcacctttccaaacaacactttccacacagtactgtgaacgaaagacagaattcccagtaaccgtgtctctcttctgtttccctgaaacaatgaaacaatatatccataagacatgattgaactctgcattgctcttccatgaacaaaactagaagtatggaaacgttcttttttttttccagtttttgaggcaaaacacacaagtaagaatatcagattgcaaaaataagatgtaccttttcccggttgcaaagaagctctagaactcgagatccaactgcatacccagcatcctctagtctgagagtcatcataaaagaaaacacattgttaaggatggaatgtaaatgaattagactaataaaaaaaaatcatatgtatttctaagaatccaatcagctcaccttctttcaagttcagctatattgtcaacctgggtttgattgtactgaacgagctccgagaataagaaagcaaatgcggtcaagctcacctacaacacaagtacagttccaaaacgactaaccaatcagcagatgctcgaaatcgaatgatcacaataaagagatcaaagaagaagaagatcaaaacccgagagatttgaaatcgaaccctcccacaactattagatccggatccaaattgaacaatgttctcaatttccatacttagttcagtgtaaaagtttctgaggaaagctccgaaattggaagagaaaagtggatctacgtagcgaaaacgtacctcttgcttgcctttgctgagaggcttgtcaaggacgttggagtactgtttcattttcccgactccgatcatattcttcggttttccggtgagaacgagcttcccagaaccagaaccctaaacacagaacctttcttagttttccggtgaaagaatctgaagatgcttttgtttattgcaacctggtttgtcttttggttcgatgaaagtacaaaaaaagagtttatttacatttttgttaatattaatttttactttttcactaatcctaattggggtagaaaaaaaaaggggtaaataagtgtataaataagaccctagcgatgataaaaagaagccgagacttgttgagaagaagcccttaaagcttcaccgtctctctctctctctttctcgtgagcttcaattcgaatcggccgttcttcttcttcttcctccaatctctttactccaatggaagaggacgatgagttcggagatctatattccgacgttctccagccgtttcaacctcccgttgttctccctcctccgcctcctcttcctcaccgttcaatcgacctcaacctccgatcccaagatcaagatgtctcagaacctaattcagctccaatctctagggtttcggacaacgatgccgtaaaattatctactcaggacgcgactcgtcaagcaattgtcgatggtggcggcgacgataaggatatgagctttgatatcgaagaacccgatgccgattctacacctacgattcctggtcttttcgttactggagcgttacctggtttggctacagatcgaggcgtttcgcaagttacgacaagaattgagcagcaggttggtggtggtggcgatggaggctatggaggacaaggagaaggagatgattgggatagcgacagtgaagatgatttgcagatagtgttgaatgatagtagccgtaacgtcatgatcggaggagctgatagaagatcaaggatgggagataatgaagatgacgatgatgaagatgatgaagacccacttgttatagtggccgacacggatccaaatcaacctatggaggagcagatgtggggagaagatggtcttcaagggattgaaggagatggcaaagacggaggagaagctggcaagggaagtggaccaggaggtgctactggaccgcccaaagcagggtatagcagtcatgggtatcatccgtttcattctcagtttaaggtcagtgtcgatgcaacactgttgtcactggtcagattacttagtacctgggtttcttgtcgttaccctgttttagttttcttaaattctgagtgcatatatactttgtacttgtatctaaacctgaatgcaaatgcagagtgtgttaatcaaagaaattggagtctgcttctagattttgacaaaccatctctttacttgcttacccaaagaccgggtgtttggtcataaaatgaagaatgtgaaagggagataataacctattcactttctctcttgtatatcgcaatcctacaccaccatcaattacgatgttcaacagttttttttcgtaattccttggctattgaagaagaagactgtaagaagaacaataaccagtttcttgagacactaactaactttataaagccaacaccccttcaaagattttatttatgttatttggagttatcataccaacgttatgccgaaacaaaataagggtggtattgttctacttgacatttacatatatttttcttgcagtatgtaagaccgggggcagctcccattcctggaggtgctgcatctgttggtggaccctcctcaggtcaagttcgtccacccgccaaccttggtcctatggctggtcgtggcagaggagattggcgtccactgggaatgaggaatgcttctgctgcacagaaagggttccaccagccttggggtagtaatacagcagggcgtggactggacttcactcttccctctcacaagtaatttttcatctgttcaggaactagaggttctagtagcttaggctcatgtctgcatatcaatctttttgactgatttgttctttgtttcttttatttgctgtctactctgtgctttttaggactatatttgaggtcgacatagatagttttgaagaaaagccctggagatatccaggagttgagatgacagactacttcaactttggactaaatgaggagagctggaaagactattgcaaacagctggtaattaataactgtgtttcatatccttattttagcggatgaagagtactaagaggagtatcttttaatttcgtacaggaccaacaccgtatacagactacgatgcaaagcagaatacgtgtttatgaaagcggtagaacggatcaggtaaagtggattttggcacatattgtggtgtttacgagctgattattctttgcagctggacaatatttgtctacatcagataccaaagggtgacaatgtattcctaatcattctcttgtacaaatgatagggttatgatccagatctacccccagagttagctgcagcaacaggggcacagggtgttcccgttgattcttcaaatttagtgaagccagactctgttcaaggtgattcagcgaaagtgccagccaatgttagaccgacactagtatgatttctccttcctttgctttcattttaaagtagcattgtcaatatgtggtttattatattgtatatcacaatggtaacattgtcgctagacattatcttgttagttttcaaagcttaagagtatttcttgaatttgttttctctcagccccctggaagaccaatacctgtggagactggttctggtgaacgtcttccgtccattgatacacgtgctcctcggatgcgtgatctagatgctatcattgaggttgaacatgtttcaaatttctcttgattttggtttactggtgaggcatctttgcatactgtatactgactgctactaactgatattgatttttttgctagattgtatgtcaggattcacatgaggatgaaccctcgggtgaaaatggcacagatcaagctgatagtagccttcctggagaaaatgtaccagttgagactagttatgttaacaacaaaagacctgacacggaatctgctgaacatagtcctgcacaggatgagccacataaaaatcttctcaaaaagcaagacgatgagatctctagaagcacagatagtggccagagttttcgttcatcgtctcctgttggagacagaggcacaaggtcatcaagtgttgaccgcgaagatgtgggaggtgaagctggcaaagatgctgagatgggggaggagcttaaaatgagttttacatcccctcagtcagcagtgcaagaagatgatggaggggagtcaaagacggagaggagtagtgaaagcagcaaagcaagatctggaagtcacagagattttcagcaagaagaggacgttattcaagataagcattcttctcgaccagctaacaataggaaacagtacgataacaatgcacctcatcagagcagaaagaatcaggacagagggaaggaaatggaaagaacacgagcggcgagcaaaggtggtagagagaactctaatccacatatggagcttgattctacttatatctactcaattgcaagtcgcgaggattttgataaaagaaaagagcgagatgttgatggcgcagtctggcgcaggaaagaagatgacccatacagtagaagaggtggggatgaagggtctagaaaaagggatcgtgaagatgatccaggctttaggcagaggggtaaaatgcgcgagaatgaaatacgcagcaaagatgatcaggttccttccagaaaacatatggatgatgctggtatgagaaatatttatgaaccggatgatcacattaacaagaggaggaaggatgaagaatacttgagaagaagccggcctgaaaaaaatgaaatctcatatggtcaaagggaatcaatgagccgcgtgaaacgagaacgtgatgataggttggagcatcaaaagagagatgtccaacataagatcagagatgattttgacgaccacggttctctcaggcagagagatgatatctatatgcagagggatggaaacgagaggttgagggagcgtgatgttttggataaattgaagctgcctcacgaggatggtatatcagcacgaggaagagagaggcaggtggcagtaaggggccacagaggttccgaagatcgatcatcaaggatgaaggatgagtataaagcttctgacaaagagcatgtcacgaaagatacattaaggcatgctaaacagacaaagagaagggactaccctggtgaagaaagttcttcccatcatagaggacatgaagacttctctgcacggacagacaacatagttaacaatgagaaaaaaccaaggcaggagaggacaggtgctaaaattgataagtttattgatactttggatggccagcgattgcaagacagaaaacataaagattctagacgaaagattaaagaacagcgagagggcacagaatcacttagcaagcaaggggagcaaaatggcagttccgtagtgacagtatgctccatcagcctatgattattttttgtatctcatccaagttttgcaaactgcacatagcatgtttatcgtgaatgcaatatatcccgcaaagttttatgttctgttgcgtaacttacctaagatattacatggtttggtcagttttattctgcttcacggtcagtactgatgtttctttcatatcttccagggatcaaaaggaaccaacgacgcaaggaattgcaggagtgagatcccacatcagcctaacaccgccaaaagacacaaggaaaatgcatcctctggtgatgagatacacgattcaaagagaggacgtacaaaactggagcgttgggcaagccacaaagagagagaagatgctgtctctgccaagtcatcatccatttcctcaaaactagaagaaaaggaaaacaacactaatggccgtcttagtgaacctgttcatggttctattggaaagagccgggatgtaactgaagagaaaattggccatgatcttgcagacacaaaagatggaagcgagaagggaccaggagaccggcacttggatacggttgagaaactcaagaaacgcagtgaaaggttcaagcttccaatgcccacggagaaagacaccacgggagtaaagaaaatggagtctgagacactgccctccgcaaaaattgaaggccctgtggattcagaggtgaaagcagagcggccagcaaggaaaagacggtggacgagtagctgagagtcataaactggagttgaaataaaaagcgatgaactgtggccctctttggctgggttgaggaaagtttgattctcaatgtagcttacgatgcttaaacggatgacatgagattctcccatcccacggagcagttgtagcagtaatgcgatgaaagatcaagctcaatggagattatttaggtgtttagggagagtatgtgtgggatgagcgaagttgtgtaagaatagggagggaatacgcataaggataactctgagagaatactcttgtagtagttgatgtaacttttgtcaaagattattggtcttttagttttgttcttatacttagcgcctccggagagagcgagaatattttaaaaatacttgacagcactgtattatatactgtagtaattttgttactattttaaatttgtactcggcctttggtcttgatcattagtgttaacaatgtgagttatcagaaagcaacaactatgaaagtagagactgtggtaacgaaggatcgtaaataaaatatgaaagattatcaagactcaaaatctttaccgaaaaaaacattcctatgacaacaaagaaagtttctgtagagcttttgatctataacaacaaatcactgtttgatgcatattttggttaacatgagtaaaacatagataactcaagttgtgtcagtttgaaaacgctgagggcaaacatgttacaacctatatgaggttatatggtgtgatcaatctctttaggctgtataaaggagtcccaaagccatcattgccagcaaggaaaggctgagattagcagcaatggcaacggtgcctgaacgaggaggagtttgtggcggaccaccttcagttccattggaggccaactttgcaactggaggcagaggcggatcaatcacgtctttggcatcaagaggtgggtttgggggaatagctggtagttgtgcttccttgtctgccacggtgagtagagctccagcatctgcaggtaagatggcatagggctggtctttgttcaaatctgaacatggactccctgcatttgcatcaaatataattgatcagccttatcttggtaatgtttttgttttttgtttttttgtagaagtttaaacttacttaggtatctggtagcggtggcagggaactccgtgatgactccatcaacgcctctccctgcaatgaatgttgcaagctctatcgtaggatcagagaagtagtcgaacgctatggcgatgtactcatttcttagcaccgagacgtatacagagatattcgctttgtgcatttcctctaccacattagttttccccgtggcaaagctttgggagacggtgatgagggaagttctcaagagattgacagcatctgcatgcttcttgatttcttcgatggatgtcttaggagcatctccgatctccttgtcgatactcaagactcttgtgtaaggagggacagcctcgaaactagatagaactgaactgtcatccgactgaatcaaaaccttctgggttgattgcttgtcgagtgtggaatttgtaagagcagacttgactacgtctacgactcctaagcctttcttcgaggctaaataagcagcattctgtcaacaaaaacagtgttagtggagcttccttgtgttagtcaaggagcatttggaagttaaatggcttgcctgaatgttgattaaaactccggtgactgcctttgctttgccgagctcaaggaagtccgcaagagtcgtgaacttcccggcgttcttgtttgcggggtttctctggaagcccgtggcagtgaaggggttttctatttgtgctgaagacaaagatatcccaatgctcagtgacttagttgagaataagattagtttaagaaatctatagaaaagaaatcagtttcttacgcttcacagactggatctcggcccatgtaagatcaaaagagaagattccgttggtaggctggatctcaggaacgctggtggctcgggacatgaaagtagtcctggcggtggtacttgctgagaggtctgcagcatcatggcagaaagcgattccgtctttggacatctgaacagagcagtcaattatgtctgctccatcgtcgattgctttctggtaagccagatcagtgcagcctggatagtctccgcttgctccattgtgagttataaccaatgcatgccctgctttggggagattgccgttttggtgagaaaagcaagctgcaagaaaacagacgctttagcttcttcttaataatcagctatctgaggaaacatatatagcaagtcatctcactgattgattgtgatgctgttggcgggaaatcggtgatgacaccatcaacagagaactggccattgtccacaaactggagatactcagcagagggatcatagctgtagttaaagctggtgcgcaagtcgttggcaaaccctgaagcatagacctctagaccggctttgtgagcatcagccacaaaagtggtggcgggcttaaggtacttagctgagtcaatgggccaaatgtagtctttgggcacaagaacgcctgaagcaaaggccttgatggctgcgaggttctgctgaatctcgctgtacttcttgttggtggtgggctcaactgcctcggggtctttgaactcaaatatgagctttgtcttggccctgcccgcgtccatcccgatgctcttcaagaaaccaatctctggagatgagatgacattaatgccgcggaatcgcaagcttctcaggtactcggctgggctcagcttgtgttccatgtagaaggcatcgtactgcacatttgcattgtttgttgttttgatgaatcaacaaaaaagctccatatgttggttaatcatgttctcaaagagaagaaaacatacctgaacgctcaaccagaacttgggaggcttggttccaaggacatcctccactgcagaaaccgacatttggccgtcgaagatgctaggccgagagaagatgttctggaccactgctcaataatacaaaacatgaaaatgtgtggtggtggtggtgagcattgaagggaggaaatgaaagagaagaagacatacgagtgactttgttgaatatggtgtcggcatcgtaatcaatgacaaaccagcccttgaggtcctgaccgttgaccttgtaggtcttctgggctttggggaagaccgaggagatggtggttgcattgtcaagtctgatatctgacaagcaaaggcccacaccgtccttagtcatctgaaggttgcacaacattgtgaagccaggcgagctggtgccaatagccaagtcgtttgcagagatgcttgactcagggaaaagacccgagaagccccctctggccacaacggcaggctcttgtcctggaagacaaaagacaggtacggattcttagaaacaaacaaacaacatggtatcttaagtcttaacattaaacaacaacaaaaaaaaaaacatggtagtatgcaatatgggcatactctgtaaaaggatgcttaccgttaagggtaagccatttcttggcaggaacagctgcggcagcagcaggagtcttgggtgccgcaacagaagagtgtaagaaaagggagaaaagaatgaaaaacctcagcatctctatctgattgatcctgcatttgtgtgtaacgtacgtaccccaatggaaaagcaaagtcaggatacatgtaacaaaaacagaattgtcacatttaagaaaattgtgaaagagagatcttacagcgagaaaagaacatgaatcccctctcctgcttgttttcctcgtttagttagaggaaaggaaaaagaagagaaagaggagatgggtcaaacaaggttaattaatggtaaaaaaaagtaacttgctctcatatcctccatttatggccatttactcctttctatttttatctcttcttctccaccattcccttcttaaccgctttttctttttttgatgctttcttacatcttctttgcacaaatgggtgtaacacccctcagttttggactttgtactatattcatttgtcatacatgtatgtagttaaaatgacaatattagagtttggcattcggaccaaaccaagttgtccgatctaaaccaaaccaatattccgttaataagaaaactcgattggcaaaaattaaaatattctttggtttcagtttttgcctagacttaaaattcttaaaaatccaattctatgtgatggaaaaatctttgattccggtccaattctgcatcaatatatgctaaaccgaaccgagactgcccacataaaattgaattgaaccaaaggtttttaatttttacttcaacatagcgaataagaaaaagagggtatatattcattattcaatgttaatgagaaggcgtctgcgtttggttcgacacctcaaaacttgttttgcctttagcatctccgagtaaggaatccaggtccaaagcctcttctcttcctcctcctcgcttccttctcacgcaaccttggatccaccgcagctatgaagatcaccgccttgctcgttctcaagtgcgctcccgaagcttctgatcccgtcatcctctccaacgcttcggacgtctctcacttcggttatttccagcgatctagcgtcaaggagttcgtcgtctttgtcggtcgcactgtcgctagccgaacccctccttcccaacgccagtctgttcaacacgaaggttcttctccttcttcttctacctctctagatcgattgttttcaaatcttctttctcccggatctaatgcaatctcctttcctctttgatttttattcgatttctaaattcggatcggcttttcgattttgaaacttttatgatttaggatgtgcaccgtttctgattctagatcttcctggactatgccccggctttaatttcttgcgattctatcttattgttctagtcctcgaatttgggataattagggttcgtgtttttattttgtttttggtttagagtacaaggttcacgcttacaatagaaatggcctttgcgcggtgggtttcatggacgatcattaccctgttcgaagtgctttctctcttctcaatcaggtaatatcattatgttgaaagtggttctcaatgcatcattcgtaagttttcctgtaatttgggttgcttgacatttaattttgtctcaggtcctagatgagtaccagaagagttttggtgagtcatggaggtctgcaaaagaagactccaatcagccttggccatacttaaccgaagctttaaacaaatttcaggttcttcacttgtgcaactgtattcgctcttttactgtgaattttgttaaaactgtagttatattaagctcagttaggtggacattagaatccaatcgaatgattcattcttcatgaattaattttagtagcccccattgttttatgaccatgttggattttgagtgatttgatcttaaattgattttgggattgtcccgtatttgtaatcttcaggacccagcagaggctgataagctgttgaaaatccagagggagttggatgagacaaagattatccttgtaagtgctgtctccggtcctttcttgtagacccttatacataagcggtacttccttttctaagtttcagtatacttgccaattatacataaatgctgttctgtcggtgagtttactttcttctgaaaaacaccaaaacaagaagaaagtcttggtagttatgatggatgtccctgtctccgtaagactgattttttgttctgtattgtagcataaaaccattgatagtgttctagcccgtggtgagaagctggacagcctagtggagaagagctcagatttgagcatggcatcacaggtaacattctaaagtcacattctagaaattcttatagatttagtttccttttttccctgtctcgatctctgagcatagttggtgaacacgttagaaagggttgttgatttagcaggcttataagtgttgttgattgatagaggaactattgcatgttattgttggggtagataaatagaggaagaatgtggatttagaataccttctttgaaaaagctttctgcttcagcctgcagacatttgagtgcagtttgaactatacagttggattttggaattattaggtttgctacgaagaatcatagtgttttttgctatatcatctgaccatggggaggaacatatgtattagtcatatcctctggaatctcaagatattcttcgttatttagattaggtaaaccatgtttacttccaacatgaaaatctgatttggttgtattggttggaacagatgttttacaagcaagcgaagaaaacaaattcatgctgtactattctgtgagctggaagtcctgctgggtatatagtcaaccaaacttttgctggggggagactgttttttctatcgtcttatctatacatataattccgtctgtagtttgcatgcattattttgattccataagtctcgagtcgtgtggtgtgtttatccaaatacataatgtcaacttctgcaagatttgaattgtctttcccagatttgatctgattgaatttgtgtgcgcttccttatggtaaaagagacgactttgcataactagatgaagatgtcgtaaatagacaaaagcagatgatggaagataactagagtagacaaagggggtagtatattacacagacaaaaggatcaaagaggtgaaacaaagtctttgtgtgccgtgtaatctatttgccgaagagagatttgaaccaccaaacgcccttggagtcttcaggggcagtgttggactcaggtggtgtgtcactctgaggagtcttgtgaagcttgctgatgtcataaccttcctccactgccttctccaccagctgcttatacgtctcttcctccatttgcgccgtcctgctcaatatctacaccacccacatatacagagtcaatcatttttgggatcaatttcgattattcgttaaagagaaaaaaaaaagagtaccaacccagagataactcctggaaggctggccaatgagagcgtgctggtagtcaggatcgatgtagagcacccagtagtctccggtgacgggaatgattgggaggaaaggagggacatagaacttgactttgagcttggcttcgtcgcttttaggatcggccttataggcgctgccttcgataaaacccctcttcccgttgctccacgtttcgttcaagacgtgtatggtaccgtcggggttaagggtgtaggtggcgcgagtgtcgacgccgttctttggctgaaaccttgatgggaaagaagcaatctcgtaccaacggcccatgtatctctccacgttgagccctttcaccacttccatctctttcttctctgtcatttctcttctttttcttttcttcttctctaagatttcgatgttttctttgaggtaaaaggataagaagagattctgttctttataaggaaataaaaaaataatatcaaggagatttcgctgggacgagaggatgccacgtggaaagcgtgtagggcaagggttctagtagcgtctagcagttacaaatgtgaataaaggtggaggacacaaatgtcttccttgttctgtgggaagaaggatacaatacaatgggccatacagtcacattttgatttgacttcctctagccgtttctaggccccaccaaattatcctatcgacatctaaatatctcttcttgttgacacttcaaaatagctccatatgtaaaccaacgatctcaattaggcccattactattcgtatattggttttgaataacaacacttattcagaaactttataaaataaatttttgtaacaggctcgctttcaattccaattcataaaagagagtatgaaacaggttggtgtactatgatctattgacagtcggaggaaacaatgtgggaagaaatttaaaaaaatcacatgaaaatggtctcaagtggagaaacttaatgcaactggtagagaaagagatgactagctaaggtggaggaaatgaatcaaagccaaatctagtagccactggcaccattccgttattctcctcctgcaacaaacacattcactttcattttctacaaactacaaaagcttttaatccaatcaagaaaacaaccgcgttacctgtttcatcatctcattcattatgtcatcgaatacatcatgctggttgtcattctctggctttcccgacttcatctctggatccagcattgtagtagcttttccaacatactcttgactgttgtctattgggttcatcagtgactcatccaagcctttgcttctggttgaattgttgtctctgaaaaccatgttatctgcgggtagaggatactcaatgttaccgaatggattgttcagcatggtgcagttctgttgctcccatttctgtccgcctaacggattcacgttctgcatgaagccgccaagtaattgaggatcacactgcatctctccaccaggattctctgcagaaaccaaagaagtacaatctcccagattgttccctgcacatgtcacttgatccggcaagaaagcaagatttagtggtaaggaactcggtgggaatctggttgtgttcaaattcccttgccagctatgaccaggaaatctagataagccttggaaactgatgtttggggaggcagagttggacggagttccctcgatgcaaggctgaattccatctgaggctatatgcaggggttgtgtatagtttgcttgcaacattagaggattggtggaagcacttggtaaagaggtgctagagctaccaaatggcatacaagtatctaggaagctaccgccaatagctctgtcccctaagcctttaaaatctccaatgtatgacttgcttctaggaaactggaggggttctagtggagatgaagttcgctgaaacagattcacgttctggattcttggtgacagagtactgtgatatgttccaaacggattagctgaattgcttgagttctggtgatgcccctgttggatgaagctggaggagttcattccttggagatttatcgatgaatacatagggggttggagtttggtgagatgggaacgcgataagagtcctgagcttggaatttgtcttgcggcagtaaaatctctaagtccatcaagttgagccatctgaaagtaagatgaatctcttgttccaaatgcatctggggtcatattttgctgctgaccttcgtctatctttttcaagtacagtctgtacttctgcaaccaaaaccagagaataaaacaagtctaaccatccaagattatatttgcgaaagaaggggaaaaatgcaagagagaatggggaattagtacctgcaaatgactggctacgttttccctagtgagaccttctatactcatgagatcaagtatttttttgggaacagcctctgtgatgaacacaaggagaaatgaaaagaggatcccacacatgaaagcatcaaaataactctataggagaaacaagagtggacatcacacataaggaaaggtttaaagaggtctatggggaaactcactgtcgaggcccaattgctgaacggcactgacaaacttctggtgaagctcctgagaccaaacaacacgtggcttcttccgcgtacctgacccgtcaccatcctgttcactcccctcaccatcatcctcttctctgtcactgtcatcttcatcaccactgtcattgactttgtctttccgtttcctgctggcgcttgggacggaatcagattcagaaggtgggagcagttttgcgtaagatttaatgttcttcttcacaacatgatgccatatattctgaagctccttgagtccaacaggcttgaccagataatcgcaagcgccatgtataatacctttcataacgctgtcatagtcgctatgagctgacaacactgagacaatgaagcaggttacaataagggctagagttgatatgaaaaacaatggtaggagacgtactgatgacaggaaggtccatttcaagaccaatttcaagcaacttaaaaccatccgtgtctggcatctctacatcgcttatcaccagatcaaacatgttgctgttttctctcagcatttccagagctttcctcgactccattgtctttgtcactggcgtaatcaatcaaacatcattgaccatgcaccccaattccgaagcagacaggtaaaaaaaaacaaaagcaaagaatatgtagtaccatgatacttgcaacgaagcagcaactcttcgagtttccgaaggcaggttggattgtcatccacagcaagaaccctcattcctacaggaaacttgtcatgccttccatcttcagtgcttccaaactccatatttgatgcaatacgtttgcaagtctcctctcttcaaaggaatatagtacatagactaaaatctgatctgttttattcttaaaacctcaagtttgggactagaagaagaccatagtcctcctatagacaaatgtaaaaagataaagacgagtggcccaaaagagagagtgattacgcggttaatctggcccttaattctccaaataattagaaatttccttctgtttctgctcatatttccataaatgaggacgtggagagagtcacatgttcctctaatttctcttttgttggttgaatcttgccttatctgagcacaaaagacaaacttttcgtaaagtgaatgtaaatgtccccattttgtttccttactcgcaaataaacgttcaaacccaacgtttcaacctttcctggctttccttatatatatgcatttcctattttccatagaaatgtttttcctttttagtcttctaagtgaatgcaccaaaacaaaacaaaaaaaatctgatttttgacataacgcgtatggtctcagttccaaaaaaaaagagaattcgacaaatgcaatggactgacctgatcacattcaggcattcgaatccgtcgactcttattactccacattcttagtcaatcgtcatacttgtgattactctgccattttcttgattattctatctgaaatcacaaccaatgtgaaaactgcgtcacagatgattgttgctgatgagtctccaacagtcttaactttatccatcaccaaacccttggaactatgcaccactccaaaaaatagtctttgatctgatttccactaccacagagacttattttccagtttccttccatttgaagaaatcgacaactctgtgatcttcttatactcagattattattaccattcgatttcttcaaatggaaggaaactggaaataagtctctgtggtagtggaaatcagatcaaagactattttttggagtggtgcatagtgccaattggactcaaagattaagaaattagataatcgtctcctagtttcctatctagaagaacgagagcaaggagaaagggaaacttcatatgaagaattggaagttgtacaaatctgtagtactatagatgtctaaaacaacaaaaggacagtctctccagcatttatgaaacagagctccagggagaaagagagcgcaatagactttcccaactactatagtacaaattcaaatgctcatttgggcctgatttattgaacatggcaatatggcattgttttaaggtcagtttggtcccagaaaacagctctaataatcacttggtctaaggaagagaaatcagaattcaagaagaaaaaaaaatagttcaagccatcacacagaattacaaattgacaagaagaaaccatcaaaaaatagagactgcgatggctgccaccatcagtagtgggaaaaagaacccgtgttcccgggctgccccaccgtagtaaggttctatcataatcggaaatctgcaagttccagtagatggatctgtcttggtcacctctgatatgtttgggaacttacaagctgtatcaagctgatcctgtatctgataataactgttgaatgcatacgatatgttttgtttcccgtcaagattagcacaggacgtcccaaccccaagactagtacagtccccaaggctacacgcgtagctcacggctggagctacctgcggatcatccaacctcacatttggcttcatcacacaccacttcctctctaggtagcgtacccctttggcctggatcagagctcctgtgttcgttgtccctaggttcaaggcatattttggtaagccgtcaaatgtgaatatcccccagtgtcgctcaaagtatcctggctgaacactcttggcgtcctcgtctatcaagctgaacaggtatgcatcgatagggccaggtctcctcggagtccctttcccccctgagatgtgagccataaagccttggttgaacttcttagcgtagtccaaattcgcattactgtccccatcagtaggccaaccaatttccccaataatgataggcatgttaccaaacccattcttctccaacgcgtggactagggtgtcgtaatttgcatcaaacatgttgtaataaaaagtcccaccatcgttcaggggctgtgcattgccgtcaaagaaggcgtaatcaactgggaaatcggggttggtgtaaagactgatgtaagggtagatgttaacagtgaaaggaccgccattttcgctcaagaacttgacgatagtgatcatgaggtcacggatattggccctgaagtcccctccagaaggaaaagtggtggagctgtcatagacatcagcgttcaagggacaagtgaccttcacttggttctgaaggccagcctttataattgcaatttggatgttcctcaacgcagggaaagtagtactcagatagctcccattataagtagacaagaaaggttcattcccaacagccacatatctgtccaacaaccaaatcacagcatcaatttagcacctactctagagatttgtgtagaattatctcagaaaaagacagtagcccgtaatttcaggcatggctagtaactgtttagggaatccaaactcagtcactgattccaattaaccagctagtacagtacaaatgtgaaaccctaataaaggaaagaaacagaggaagtacctgatgttgacgttgtcggtggagatgtgagtagagacatttttagcaacccatttctcagcagctttcaggctagaggcgagagtcgcaagcatctcattgggaataccaaccatgacttcgattccggatttgcccaaagctctgagagtgtcgtattcggcgtcaaagagctttactttctgaataccattctctcttagcatccgcacaactatgtccggtggaagtgggtgcgacgcctgtgtgccccagttagctccgattgaacttgccctctgacaaagaagagccaccgccagtaatagcaacaccgaaccccaacccatctcaggctcgccgatctgactcttcgttcaccaaaaaagctatacaattattaaacactgagctttgagctgcgagcttagctggtactatttcctccagaccagtgggttttaaagcggccacgcacgagcgagtgccgctgctttttggcaaccccataacgacaaaaaatgacacgtaagctacgcgtcaaacgatgtctttaaagtctaaactgttttagttcggtcttctcaaaagtcattacggataatgtgggcttttgtatcacaggcccatatcttgaaaataatcaatcagtttatattgtctctttagtgctctcatagagtcattacggataaggtgggcttttgtatcgcaagcccatttcttgaaaataatcaatcagtttattatattagtcaatgttatttaaattcattgaaaataatcaatcagtaagacttttttttttttggttgagaacttgagacggtaagaaaatattggctaatcgaaggccggaaaaagaaatctgtggaaagacaagaaaaaacgagcacagtggccagtgtgggaatttttgctggacgagagagcaaaaccctactgcgatttatcgactactaggagaagaagaagaagaagacgatgcggagattcggggctgggaacagatccgtttccaagctcgtactcaccatttgtgtagctatcctggtacgatcccttcgttcgatctgtcgcaagattagtatttgatcaaaaccaaatttgaaaattgatgatgagctgcgatgttatctgttaatgcttttgtttttaaactcacctttctctttctcaattgagtttgcgtaatttgtttgattgatttcgtggcttagttcataccatctctatcgtatggagcttcacaagggaaccggaagacggcgaagtcttctgtgttttccttgttcaatcttagggataaaagcagattttggagcgagtctgtttttcgtactggtatgtgttctgtttccaggcctctctttgcttttggatttcctatgtcttcatttgcatcacaatttttcgtgctgttatcagattttgatgatttggagtcttccgttcactcgaattctggtgtgctgaattacactaagtcaggtaagtaattgcctttcgtttctgtgaatggctaaaggacttactagctcaattcgcaacaccacgttctgatttggattgcatcctttcaggaaatattgcgagttacttagagcttatggaagtcgattctgtctatcttccagtgccagttaattttatcttcatagggtttgaaggaaaagggaaccaaggtgaataacttctgcctgtcttgcttttatttgaattggagctatcacttgactttctcttttgtccgtaactttttccacacactttccagacttcaaactccgtcccgaggaacttgagcgttggtttaataaacttgatcacatgtttgaacatacacgagttccacaaatcaaagaagttctcaatcccttttacaagattaacattgaaaaggaggtgcagcaccatcttcctatcatcagtcgcgtgaactacaagtacagtcatctttttcttaacttttttcctggtggttcattcacggtggtgttggctttaagtaaagtttaattgggcatttgtttccctttgtcagcttttctgttcatgctatacaaatgggagaaaaggtgacatcagtaattgaacacgcaatcaaagttttagctcgcaaagatgatgtggctaccaataagtaatgcattacaaagaccttttttttgcttcagtttatgtcgtatggacgtccatttctgtcaatttatatgcagcgatatctgagcctgcagaccacttggttctagtaactttatgtcactcatgctacctgcttccaacttttttaagtggtgtcctgattcttattttttgtgttggttctatattaaactatctcgttttatggtaacagagatgaggaaagtgctctactgcaagtggatgctgagatgatggaattcattttcactagccttgtcgaatattttcatctcgaggatgcatacaacctttttattttgaatcccaagcacgataacaaaaaagccaaatatggataccggtgagcacctgctgtctatatgatcatcttattgtaatacagtcgaggaacatactagacttataaaaggattttgcaggagagggttttcagagtcagagatatcttatctgaaagaggtatgtcaatcttttcatgcttgaaagcaattacatcataaacaatcctcactaaaaaagaagaatgtccttggagtgatctcttggttaagttcgctgttaagtgcttctatgtttttaccaagttcatattactcttactatttctcgcagaacaaggaaatactaaaaaatcttcttcagtctggaaaaccgtcagaaaatattttaggtacagaatggaaaataacaatgatatgtctccattgattatgtacattccagttttcttatatgaaacctgctgcgagtatgttgtagcatttgatatggtgaggaagccattgtacgacagacatccaatgctgaaattttcctggacaaatgcagaggagactgatacggttagttattttagccactcttatgttcaagttttattattccattgattaacctcaatgtttgtaagatatggcagttgttgattttggcaatgtgtttagttccgcagtgtgttgcaatgactatacttacattagagaaccagagctgttatgcttcgagtatctggtgtttattatatcttacagtgttggctattgtgttttacagtgttgattgttgtcttgctttcaggctgagtggtttaatgcatgccaggatgctcttaacaagttggaacagctatctcttggtaaagatgcagccgaactcattcagagtaaggttttgcaggtactaatctacttttattttggcctaatactttctggccccagaatttcctttttattctaaatggatgttcctgcatgtgcgtaactttggatctttctcaatggaaatttcaagttgcttagaggaaaaaatgaagatatgaaggtgttcctagagaaggatttaagagctggagactttagcaatcttaacgcagaatgtctgactgatatctggatcggaaagggcaggttgctattctgaagctctcaattcatgtgtgtacatatatttaaccttgtcattctggcttagagcacatcttatgcatgccaataaattgacgaagctgtatgtttcatgattttgtgagcaattcctctcaggtgggcatttatcgatttaactgctggccctttttcatggggaccttctgtcggtggggaaggagtgcgaaccgaacttagtttgccaaatgtgggaacgactattggtgcagttgcaggtactattcgcaataaatcttctgcataatggctcctaagttgtaaaaagcatgactattaaccttaactgttcctgaatttctgttaatcttgagaccatgattttatttcttgctagaaatttctgaagatgaagcagaagacaaactgcaaactgcaattcaggataaattttctgtatttggagaggtgtgttttaattggtgaaataagaagccatttcagttcatcaaaagagctttttgggagtacctgagttcatttgggcactgttatactccagtacgaacaaaagtaggactaacaaataaagtagaacaaccaaattactggtactttaagaggcgggaaagcataaagtttacctcagtggtgggggaatacagtgggaagtggtggggaaatacagtgggaagacttacgataaaatagtgataaggtcaatgagggaaaacttaaaatatggtgttgagaaaagaagagtaagggagagtttgagtgtaggactcaggggttctaaaaatttaggaatcatctcagacaaagctccatgaaaactagtttctctgtgttttgtttcatgtcctctaaatatgaacataacacttattaagtaatgatctggatccttagagctgtattttctttgaggctgacgcatgtgggttcaggtttacagtgtacaatatttctgagttatggtttcatttgccttatttgaaatgcttttggcctagacttctcaatatggcttttgttgtttcagaatgaccatcaggctgttgacattcttctagcggagattgatgtatatgaactatttgctttcaagcactgcaagggaaggaaggtgaagcttgctctttgtgaaggtgcttatattaacgctgctttattttcatgtaccctctttgtaaattctttttccttggtctcaaagaaggattctgtacagctcccgcgtcattttcttgagttactctttcgagattttgtttgtctttcctcattttgtcttcgctttacgtgtccaagaacttgatgaaagaatgcgggatttaaagaccgagctccagtcatttgacggagaggaatatgatgagactcataagagaaaagccatggatgcactaagacgaatggagagctggaacttgtttagtgatgaacgtgaggtattttcttggtcctactccaggctttttgtcttctgctgctatcttccttgctggttgaaaatgtgacacattgcatcgtgatgtcgattgtacaggagttccaaaattacacagttgcacgcgatactttccttgcacatttaggtgctactctctggggatccatgagacatataatatccccatcagttgctgatggtgcatttcatcattatgagaagatctcttttcagcttgtcttcatcacccaagaggtatgttcttgtcaaatgctctaaaagatttcccatcaggtaaagcatattttggttaaaaactatgattaatcttataatctaaaagtcttaaggataaagacatgtcatgggatgaataaaatctaacattatggaatacagttttgttcttttcttttgaaggttatgtaatttatgtttgagaatgaaataacattgctaccaatcagttttacttcatcctaccaataacattgcctacagtttttcaatctagtttctatatagatgctgaaaggaagtcgtcactctgtaattttattgatgtagaaagttcgacaaatcaaacagctaccggtggatctcaaggccctcatggatgggctttcttcgctgttgttaccttctcagaagcctttgttcagccagcatatgtatgcactgaaaggcttgatctttctaaccctctttgataaactgtatctcaaactatggttaaagcttgaaattagtagcttttcctggccccaaaaaagatagaaacgtatttattattcttaggtgatatttccccctctgattcttgtatgcaactccttgctatattgacgtgtcaataacaattgtgataggttaacactctctgaggatcctgcattggctatggctttttcagtggcacgaagggcagcagctgtccctctattacttgtcaatggaacttaccggaagactgttcgttcatatcttgattcatcaatcctccagtaccaattacagagggtgaacgatcacacttcccttaaaggttagctaacaacagtaaatctcgctctgttaagtagtttttaaaaaaaaactgtcaccattcatctcttttgttgtagcaccgttgtagtcatgaaagaagcctttccttgatgctaaactagaaagtagaaactatcttctaccagttttaagtgattttgtgttccttttgtctgctaaatttgtatattaatgtagagactatggctcacacatctatatagatgaataatgttgagaacttttctccgttttacatgtctttcaagttttcgtcctaaggtagtatgccgtggtaagaaaactgcataagttctgaactaccgtattatttactgtcctaaagtttgtgatatctttatactgttttcttcgtgtagacttgatccgtttgagcgattgcttttatcctactgctcagcatttcacttcagatgtctttattcacgtcctattcaaattttgtcaagttatttgctacttgatgtcatgcattggtgatgttgatataatatcatgattggcattaacgctgtaagtatccttgtatataactcaggaggtcatgcccacagcaggtccactcttgaaattcctatcttttggctcatcagtggtgatccgctactgattgacaagcattatcaagcaaaggcgctttcgaacatggttgttgttgttcagtcggaggcctcttcatgggagagccatttgcaatgcaacgggcgatcactattatgggatctgaggtaataacacgtatatgttagcagcttgttatgagcagaaattttatgatactttcctagttaaattttgctcgtcatgagggaattagagtagatgagtttttccttactccttcatttttataacataggagccccgtgaaagcagccatggcttctgttgctgaacatctagctggattgcttcctcttcatcttgtctacagtgtagctcatgaaagtgcaattgaggtatagaattatgcttagatgattctaaatagcactgctttgtagttccatgaatattatcctgttcctggtaactactgcaatcttgtgaatccagcacaaactctgattaaaactctccagataaagaagctgataatctgtcttaccatctcttaaaaattgtgtttcacaggactggacatggtcagtaggttgcaatcccttttccgtcacttctcaaggttggctcctttcacagtttcaatctgacacaattgcccggagctatatgattacagcgcttgaagaatcaatacaagctgtcaattctgggattcatcttttgcggctggagagaacgagtatccttgggagattttttatctctgttttatgcctacagaacagtagaggttttgaaatatgaagaaaatttattacctgctcatctttatttgctagtgttaatatccttgattcagaaacaagataaaaagacgtttaagctcttccaatcaagggaacgtgagctgatgaacaagtacaagtacgtggttagcctgtggagacgagtgagtacacacctctgttcctatagtttgatttatacggttatgaagcctatatgttactggaaggcttcaaatgatgtgtatactaaatgtttaacagctttcgaatgttgctggagaaacacgctatggggatgccatgagatttctgcataccttagaggaagctactagctcgtaagtacacacattttactcttgctacagtttttttaaaagaatgatttgctaatcaatcaggctttccattttatcagatttgtaagagaagtgaatgcaacagtgggtgttttgcacccaattcactgcacaaaagagaggaaggtgaaagtggaagtggacatgacaacaatacctgcctttatcatagtactgattttactttacgctgtcttaaggccaagagctcctaagccaaagatcaactgatgtcaaaagactcccccatacaaatttttttgtcactttctgagacagtaaagttcatcactcttctgtatctttacttgaacaagaattgttgtaatctaaacctgattcgttactgcaaattgcaactgtagaatttagcaaaagttagtacagtacttgaagagattaaaataagacaagaatgaaagaagctgtgtttgggtcaacagtgaacctgtgtttgggtcaacagtgggccctttaaagacaacaacatctttaagccacaaacaaagactcgaaagaaaataataaaataatttggatctgaggcaggaaacttccggagacatcggaggaaccctaaattgaatgagaagaggagagtgagacgggagagaaagccagagcgagcgatagagcaaagacatggagagagaggaggagaagacgaaagagggctcatcgtataggtactgggtgagagaagccacctcagacgcagctcctcctcctctgccccaaaagctcagcaacaacgacgtctctctcaatactgctcctgcgtcccttggctctctctggaatcgggtttgcttcttttacgttttgatctgttaaactcgtgttacaccattcttctttgcgttctcttactcttctcacttgtttccataggctggcacttgggaggagaagagtctcaccaaatgggctactgaccgattaaaggtttcttctttcttttctgttactctgtttttttgttgttgtttgcttttctcttgctaatttgatatcttttggtactttgaaatcgtgcccgcaggagctgttgggatcagtgggttcattgcagttctcttctggaaaagctgagattatagatgttaacagatgtgttggagatgtgagttcttttcttcgttttttggtatatgtgttctctatgtttgttcttgattgatgattccttcttccactgtttcgctaggctttcttagtcacagttcggaacaagaaaagagttggctatacttacgagctttcccttaaagttgagggtaagactatccacggttttaaagacaagaatcttctactttatttgtgttgacaaaagaaaagaacttttgcttacattctcatgaaatctagtggtttagctgaggatgtggtgcatttgagttttataattgttaagttaggaactttcattgtctcatgtaatatttgcatacataaactcatattatggcgattttcttaggagagtggtcatttgaagagaatatgaagaaggtgaaggggagcctcgagattccagagttttcattcggcgagcttgatgatcttgaggtaacattttttatgcaactattgagaatcttgagtagaacgttctgtttgtaggttagacgaagttatgtagagactctgatttgatttgaaaaggatattagaatctctggatggtgatattttgtgcaaatgagcaggtggatgtgaagctcagcgaagacaaggagctttcccagcagctgaagcagcggattaagttggatatgaagcagttcttggagcctatacgcctcaaactcggcctgttcgaacaggaactcaaagatagataaggatttgttccctatatttttccaatttcagccattttcagttagcagtaacaagaacttcgtaaaacattgcatcttacgcttttctgtatccatgcttgttgactgtcaaagttcagttgatcaatcagattttatctaatgagatatacttttatagaagtgtagattattacaagtatatatatatgactactatattttggttatatgcttatacattttggatatatgttcgggtactcattcggttcgagtttggttatggttctcgggtcttgaggttttgatcccgttcatgtatttttgccagttcgagttggggttggttctgtttactttttctagtccatgtattttgcagacctattaaaaccattctgttttttttttggaccaacaaaacccatccgtttttagatacgaaaataaaattttattaaaaccattatttttcttggaccatcaaaacccatccgtttaaagatacgaaatgaaattcgattgataaatacaaaataaagttcaccaaacttaaataaaaaggcatagatgggaccaatgagaaagaaatttcttttctcctcaatttccccaaaaatatataaaccttaagtttacttttttgttgcaaggaaaaacattaatctttttcaactttctaaaaacaatcatttcaaacgttaaaggaacctcctcctttctttacgcgtttgcaatataacccaagaagaccgcttgtttgtacaactttccaaaaaccaaacagtagtgtaataaacctctgacttcttttttcttctctatttttgtgggtgataatcaattcactcggtttgaaatttcgtccacttttcaaagatgagtgaatgaaaaagccacgaaactttccatttcttcctctgtgtataactctcactgagtacgacttgccattttctcatccaaaaaaaatgtttatccaaatacatatttgtgaactttgcttttaaaccactcaagattcttccccatggcttcttcgtcttcttcttctcggtctcgcacctggagataccgcgtcttcacgaacttccatggacctgacgtccgtaaaacattcctcagccatttacgtaaacagtttagctacaacgggatttcgatgtttaatgatcaaagtatcgaaagaagccaaaccatcgtccctgctctcacaggagcaatcaaggaatcgaggatctcgatcgtggtgctctcgaagaactacgcatcatcgaggtggtgtttggatgagctgctagagattttgaagtgcagggaagatataggacaaatagtgatgaccgtcttttacggagtagatccatctgatgtccgtaaacagaccggagaatttgggatcgcttttaataaaacttgtgaagggaagacaaatgaggagacacaaaaatggagcaaagctttgaacgatgttggaaacattgctggagagcacttctttaactggtttgtttgctttccttcaactaatttggatcttcttgatgattttcacatgactatttgataaaaacagaggttttttgtattctctgttttagggataatgaagcgaagatgattgagaagattgcaagagatgtttcgaacaaactaaacgccacaatctcttgggattttgaagacatggtgggtattgaagcacatttgcagaaaatgcagtctttgttacatttagattatgaggatggagctatgattgtaggaatctatggtcctgcaggtattggtaagactaccattgccagagctttacatagccgactctctagcagttttcagcttacttgttttatggagaatattaggggaagctataatagtggtcttgacgagtatggtttgaagctgcgattacaagaacaacttctttccaaagttctaaaccatgatggtataaggataaaccatttaggtgcgattccagaaaggctatgtgaccaaaaagttcttatcattcttgatgatgtggacgatttgcagcaacttgaggctttggctaatgaaactaactggtttggtcctggaagcaggattattgtgaccacggaggatcaagagcttttggagcaacatgatgttaacaaaaaatatcatgttgattttccaactagagaagaagcttgtaaaatcttttgtacatatgctttcagacggagctttgcaccatatggttttgaaaagcttgctgaaagagtaacatggctttgtagcaaccttcctctaggtctccgtgtcatgggttcaactttacgcggaaagaaagaagatgactgggaaggtatattgcgtaggctagaaaatagccttgatcgaaagatcgatggagttcttagagtcggatacgaccatttatgtgaggacgatcagtttctatatctcctcattgcattcttcttcaactacgtcgacgatgatcatgtgaaagcaatgctcgttgaagataatttggatgtcaaactcgggttgaaaacgcttgcgtataaatctctcattcaaatatcggcggaagggaatatagtgatgcacaagttactacaacgagtgggtagagaagctattcaaagacaagagcccacgaaacggagaatcttgattgatgctcgtgagatttgcgatgtccttcgatatgggaaagtaagttgtactttcttgttctgttttattcatttttcccttacaagataaagaaagatcttacctttgtaatgacattttttttgttctttgtgacatttggtatagggtactagtaatgtgtctggcatatcatttgatacatcagatatgagtgaagtgactataagtgatgacgcttttaaaagactgcatgatcttcgattcctcaaagttaccaaaagtagatatgatgggaaatatagaatgcatatacctgcggggatagagtttccttgtcttctaaggttactacattgggaggcatatccaagcaagtgtcttcctcctacatttaatccagaatttcttgtggaactcaatatgcagggaagccagctcgagcacctctggagtggaactcaggttggtggcgcactttaaatacaatttctccttaatctttatgttgtatgttcgttcttatgtctcttattgtgtggttttattatattcagtcgcttagaaatctcaagaatatggatttgggatggtccccgaatttgaaggaactcccggatcttacaaatgctacaaatctggaggatttgaatctaaatagttgcgagagtttggtagagattccatcctctttttcgcatcttcataaactaaagaacttgtggatgagttactgcataaacctacaagtcattcctgctcacatgaacttggtatccctagaacgcgtcactatgacaggatgctcaagattcagaaaaattccagtaatttcaacgcacatcaattatctggatatagcacacaacacggagttcgaagttgtgcatgcatcaattgctttgtggtgtcgtctccactatctcaatatgagctacaatgaaaatttcatgggattaacgcacctccccatgtctttaacacaactcatcctaagatattccgatattgaaaggattcctgattgcatcaaagctcttcatcagctgttttcacttgatctaactggctgcagaagacttgcatcattgccagagctccctggttcgctccttgatctagaggcagaagattgtgaatcactggagaccgtatttagccctttacacacgccaagagcgctcctcaatttcaccaactgcttcaaattgggtggccaagcacggagagcaattatccgacgacgatcagaaattatcgggaaggctctcttaccaggaagagaagtgcctgcagagtttgatcacagagctaaaggtaattccttgaccattattctcaatggttacaggccttcttatgacttcatccaatatttggtctgcgttgtgatttcccctaaccaagaaatcacaaaaataagtgattcttccaccctattatgtcacacgaacggctacatattcccatcttatgaggaggtgtacataggcgctgtctcaaaatgtcgaaaggaacatctatttatatttcgctctggctattatctaaacgtcgacccctctggagcaagcagagagattgtgttcgaattcagcagcaaatcgcaagacttcgacattattgaatgtggtgtcaagatctggaccgcacaaagcatcgaacggggttacctagtgtttgaagacgacaatgagattaaacacgatgaccatacaaatagagttaggggacactacaaagcatcaaacgtggactacaagtctgtatccaggaagcgtccgaggaagacagatctgaagttggaaatcccaagacgacgtttttgaaaagaaaaagaaaaatgaatcatcagtctcttttgatcgcttcatgaggttttttattgtatacgaaaccttcagaaaaaatacatgtatccatgcttgttgttgacgtcaaagttcagttcatcaaaaagatcttatctaatgagaaatgctttttatagaagtgtaccttaaaaccttgaattaaaaaaaacattgtattgtgttaagcacaaaaactgtggagggatacataatttgaagagcctctgatagtattaactcattcttcgctatttttctttctcctgggctcactcaatgccttcttagcctttgcccactctttcaaagaagtcgagcttctcataaatgtgcaagtatcccccgacccaacctttctcttaattatcttcttcttcgcacccaatttagctccttcactcacattcttaccattcagacgctgccgattctcatctaaacttctcacaggggtactatccacagggactcccgcagccacaaaaccaccgctgctagatgcgtaatctgtttgtttcattgcacttgcagtctggttagagttggagaactggtttcctacattgttgatcactccagctgcttcgcccttgtctgaagttaaatctgggaagagttgagttatactgaatgaagaagtatttttgtcgctaaccagctgagtccacgaagccttctgaagccatgaagaacctcctgttgacttgttactagctttcagcggtcctttacccgcctcttcttcatctacaacattttccttcacgactaagctttccttttctgcattcaaatcctctgctacattttcatgcttctccacattcgacttgccgtccacactatcgccctctgtgtttgcaacaaattccagggggacagcttcaacacttgtgtcactaacagtatctgcaagtgatcctgagtcgtctgaacctacatcgtcattagctgtgtcatcgcacatagagtcaatagctgtgtcatcttccacattatcaccatcatcgctctcagccatagagttactaactgtgtcatcggccatagagtcaatagcagtgtcattttccacagcatccccatcatcactctcagccacagagtcactagctgggtcatctgccatagagtcaatagctgtgtcatcttccacagcatcactatcatccctctcagccacagagtcactagctgtgtcatctgccatagattcacaagctgtgtaatattccacagcatcactatcatccctctctatgtcatctgccattgtgtcactatcatccctctttatgtcatctgatacaggtaaatcctctgccatgattgtagacgttacacgctttcttttcgtcttcttcttcaaattttctcggctaggaagcccagcaagatcagtgttgcgtggtgcaggttgtactgctttactggagccaacacctggcaagaaactggatacactaaaatcattgctgttcccatttgccataagtgatttccaggaagacttttgggaccaggaaatattgtcgattgactgctcaagatcttttgttctgctcggttcatccgatgatttatctggtaccacttcagaaggcttcttctttccacgtatggcctgtgaagattcctgtcttccagtttcctctaggctgattgtttgcctattcttgcttggatgagtaaggttcccttttcgtccttcactatatccttcttcacttggtgtttttttgttgagaattgatttctgagttacaatcaaagaaagagccagatcagggatgaggtagatgactcattattgggttaagtataatagaaaaaatataagtagcactacgtacccgttttctagacaacatatccagcgctgagtccatatcattgccactagatgccacattgatgatgaggttatcttggtctgcttcaatctcattgtcttcttcggggtccacattgtttttctcaaagagcttattcatcaccgagttcataacattcacctcggcttcttgtcttcccacattaaccgcttccagatcatgaagatgtatttcccgaggagtgagagagctgttagagtgctcttcacaatcacaaaagctccttggaagagaagacgacactggaacacgctgaaagctatacttatgtttaccagttccactaagtggcataggtttcacctgcaccacacatacgtagctcaaaccctaatctcttactactcctagtactaactatgtcatataaatgttacaactttgaaggagcattagtagtacctttctgagtctgggaaagaagatgttaaggtgagtggcaggtggtgaatcggagggagctttaatggtgttatcagaggtagaagacgctgcctcccactctcgctttaagcgagctagataatgctcttttgctttctccagtctcagcctccctcctttccagacacatccattatactgccaaaatcgaattagggttaagaataacaagagtaaggagagagagagagagagagagagagagagagagagagagagagagagagagagagagagagagagagagagagagagagatcgaattcactcactgtagagaagagcttggtgagtgaattggtggaagatggagagaaatcgatgtaggcaaaggaacgacctttggtcctgacgaattcgacggcatcgacggtacccatcggagagaatatcttgagaagatcatctctcccgacgctttctcctaatccgccgacgtgaagcctaacgccgccgccgctgcttttttcctccattgctgcttgcttcagttggattcagttttccctcgcctctccctcactttccttacttcttaatcttaactaataaggcccattagagaagacccactaggacttaatgggcttttagcgggaaaataataaggcctaacaagtttttaggggtcccttctctttaatttcatcgacattatttgaaacagacagtgaaagaagaaacaaattgtggattcgtcgtctgcgaaagcatctgggagagaagaagccacagtcattttcttaaacgtgttcatttttcgtctaatcaaatcatggcgcatgttctgttctactacaatcgtaagtttactgggttttatctatttattgtttattcattttacattgaaacatgtctgaattattgtactggaaaaattgatgtgaggggtgtaataaattcgtttgattatgaagaaaatttgtgaaagaagagggaatgatgaacaagagtgcacgtattaagaggaaacagagttgtgtggtccttgaccttgagggtgaaaaagggtccatgtgagtttgattattgatagcgatgtctatcctcccaggcttccgcatcgctcatttgcagcctcagaaacatgattgtctttttaaaataactcaaataataatataactgggttttggaaacagtacagttgtgttttttaattggtctatctctctatctttctcatcgtctttgctccttttaaagactgtgtactatatttccatgagttgcagctgataaagctactctggttggtatatatatatttttcatttattttatctacttcaccttctttaacgtgttttgttgatttgcttctaaagacttttaatggcatttattactttgtttctcgaacctacagttgtgtctgcctcttctttctatctaacttgtctatgtggtgtctggttttgatttgcagactattcattactctgtttcgccataagaaagagaataaagaaacgttatggagaggccaagagcccctccatctcctttgaatgatgcggagtcattaagtgaacgtagatctcttgagattttcaacccttcgagtggaaaagagacacatggatcaacttcttcttcttcaaagcctcctcttgatggcaacaacaaaggtagtagtagtaagtggatggagtttcaagattccgctaagattacagaaagaaccgctgaatggggattgtcagctgttaagccggattcgggagacgatggcattagtttcaagctgtccagtgaagtggaacgaagcaagaacatgtctaggaggtcatccgaagaatctacatcttctgaatcaggggccttccctagagtatcccaggagctcaaaactgctctatccacgttgcagcagacttttgttgtctctgacgctacacagcctcactgtcccatagtctatgccagcagtggattctttaccatgactggttattcttccaaggaaattgttggaagaaactggtactgctcatctcgtatcttgcttctagtttcattcccagttattagttagaataatattgcttttgaaacccatgccaacttactctgaaatgctcttaatctttgtgggtaaaacgccagccggtttctgcaagggccagacaccgacaagaatgaggttgccaaaatcagagattgtgtcaagaatggaaaaagttactgtggaaggctgttaaactacaaaaaggacggaactcccttctggaatcttctcacagtcactcctatcaaggacgaccagggcaataccatcaagttcattgggtacgtcccttaattcctccctgtttttccctaattaatcgactgtccctcgatcaatcattttcacatttccatctgcaggatgcaggttgaagttagcaaatacacagaaggggtaaatgataaagcattgaggcctaatggactctccaaatccttgattcgatatgatggtatctgtttttttgcatctcttcgttaattcaacaagttttttttagccaaaaacaatgatataatttagcaaagagtgctgatccacaatctttaacatgtaatggttttgatgatgatatcagctcgccagaaggagaaagctttggattccatcacagaggttgtgcaaactataagacatcgtaagtctcaagttcaggaatccgtgagcaatgacactatggtaaagcctgatagttctactacacctacacctggtagacaaacaagacagtcagatgaggcttcaaagtctttcaggacacctggacgtgtttctactccaacggggtgagtcttcgtaaccactaaccaccagattacagtagtcttcctgaacataaaataaggcatatatattgcccaaaaagtgtgatggcagtgccaaagttttgcagaaacaacttgctattatcattgccaaatagtggtaaaatatatactacacaatctcaatctagttgttgtgttagtcaatatttaactcatagataatttccattcgaatacgaagatgcagttgcaatctcctactattgttctgtttcttatttctcgtgtacttttgtaactttgtgctgggccttagaatgtatcctctgacatggattgggtagtgaattctgaagctgtgtatatatatgtatacatatacactcaaggatttctgatctagcttcgtgtaatgtgcaggtcaaagctcaaaagctcgaataacaggcatgaagatcttttacgtatggaacccgaagaattgatgttgagcacagaagtaatagggcagagggacagttgggacctatcggatagagaaagggatatacgccaagggattgatctagctaccactcttgagcgcatagagaagaatttcgtcatcagtgatcctcgtctccctgataatcccattgtatgttttttctgtctaaaattgagatgaacgtttttttctcgaaccttaatgtatcaattgtagagtatatttcatatattgattgttcttactcaagtgttctactatgtttgtaagcatataatcttgaattgataatggaaatcgttttatttgca

SEQ ID NO: 923 - DNA, 87090 bp, Arabidopsis thaliana
gatctttgcatcagacagctttcttgaattgacagagtattcacgcgaggaaatattggggagaaattgtcggtatgtgaaaattcttctttttgtatcttctactcatgagatttatcatgccttttaagttatgcagtcttctccggctgcgtttttgttgtttcgtgatatggatatgtgcaaagtggttggcttcaggtttcttcaggggccagagacagatcaagcgactgtccagaagataagagacgcaattagagatcagagggagattactgtgcagttgataaactacactaaaagcggtagttatcagatactgaacattttaaaacgatcatactgaaaagtttctatgtggttgtgtcattaaaactctaaaccattgcaggaaagaaattctggaacttattccacttgcaacctatgcgtgatcagaaggtcttcgtgagattattgttatatctggattccgattcttgaagaaaaccgtgcattgttgctgattacatgactttattcatctattagggagagcttcaatacttcatcggtgtgcagcttgatggaagtgatcatgtagagcccctccaaaatcgtttgtctgagagaacagagatgcagagttcgaaattggtatgtggttcatatcctactgagttttttgaacatctctttcctatcaaaggagactatgacattggtcacaattttaggtgaaagctacggcaacaaatgtagatgaagctgtcagagagcttccagatgctaatacggtaaggtgtactagttcattattacttaacaaagatggaaaagtataaatgcaatcgaattgcaatgtattttagcggcccgaagacctgtgggctgcacactcgaagcctgtctatcctctgcctcacaataaggagagtacgtcctggaaagcaataaaaaaggcatgcatcgaaccatgttactttttacttggtttctcattcatcctgttcttattctgacagtctcctttgtagatccaagcgagtggagaaacagtgggactacatcatttcaaaccaataaaaccgttgggctctggtgatactggcaggtacaacattgcatgtgtccatagcaataaattcatctgtccatgaatcgccttgtacttcgtgtatacttatatggcgttttttggttggaaaaagtgtccatttggttgagctgaagggcacgggtgaactatatgccatgaaagcaatggagaaaacaatgatgttgaatcgtaacaaggtatatgatggagaatgagtttccttttaataaggaaagctgaaaaattcaacatttatattatttctttcgttgacaacatgcagctttatgcaggctcaccgagcgtgcatcgaaagggaaatcatttcccttctggatcatccattccttcctactctctacgcttcttttcaggtagatgtttttctgttttgcttgcatcatgtcggtttgcccgtttcattgctcaattgctcttctttttcttccgcagacctctacgcacgtctgtttgattacagacttctgcccaggtggagagttgtttgcactacttgacagacaacctatgaaaatattgacagaagactctgcaaggttccctcttttcctcaatctaaacgtataatgtgtaacagaagatctcctggtgatgttttaactaaataggggcactatgttagcaagaaaacatatcaccttctagcaagcattcagttagcggttactcggataactgatgaaggcaataaatcccattgtcattattatatctgcagttatgagttaatctgatcaatctctgtcatcaggttctatgcagcagaggttgttatcggcttagaatatcttcactgcttaggtaataataatcattgtctctgttgatctaaacattgcttatttatacattgccacatgccttgagtagtctcttcttccaataattttttagctgttgtttcggttaaagatctgtatatattttccataaacaggaattgtatatcgagacctgaagcctgagaatatactgctcaagaaggatggacacatagtattggctgactttgatttatcattcatgacgacctgcacaccccaggtacttttttgttcaactctaccattttctattggcatataaagaaatatgataattaagagaagtatggtttgcagcttattattccagctgcacctagcaaacgaaggagatccaaaagtcaaccactacccacatttgttgcagaaccaagtacccagtcaaactcgttcgtaggaactgaagaatacattgcgcctgtatagtgatgcatttaacgttttatctcttgcaatcttcaattacagctgcatctcattgtgtttcagtttattcatggtttacttaattatttcaggagataatcacgggtgctggtcatacaagtgctattgattggtgggcactgggtataatctgccactatctttaccttattttgatcacaaactgttattaatatgctcatctccttttatgtgtgtttgttgtaggtatcttgttgtatgagatgctttatggtcgcacacctttcaggggtaagaataggcaaaagacatttgccaacatcttgcacaaagatctcactttccccagcagtatccctgtgagctaccttgtaacaacaacctgtgtgtctttcccaaagtaaaaaaaatactaatctaaccatatgtgtttgtgcaggtgagtcttgtaggtagacagttgatcaacacgttgttaaatagagatccgagcagtcggttaggatccaaaggtggggcaaatgagataaagcagcatgctttctttcgcgggatcaattggcctctcatacgaggcatggtaggactaataatcgttatttttatatcaatcagccttttccgtgtttgttgttggctgatataatagagtgattgcatacagagtcctccaccactggatgcaccgttgagcataatcgaaaaagatccgaatgccaaagatataaagtgggaagatgatggagtgcttgtgaattctacggacttggacattgacctcttctaatcctattcttcctctctctgcctttgattctcaaattatgcaaaactcttcttctcaataaaagccaaggtgttgttgtacttgtagttgcttaaatataaacggctcttttcatgtttttccatttcttctaatcaacaacaataaacatacaaacttaagagccatgttaatattcatgttaagtgtgataagcccattatgaggcccataactagcccactagtagttgggagaaatgtctttgagaagtccaaccacctgctgcatcgtaggtcgcttccatggcagatcggcggtacacaagtaccctatcttcaccgcctccgcgatttcatcctccggaactgtctcttgcatcgtcggatcaatggctctcaatccttgtccctgcctcaccaaccctctcacccaattcaccaagtcaccctccggcttcttcccactcacgagctcaagcaaaacaactccaaagctatacacatcggattctaatgtcggagaagcatttcgctcctgttccggtggtgtgtacccgtctaaactttcggaaccgggaaattgctcgtccaagagtttaactaaaccaaagtctgctaagcgtggctcctggctagagtctaacaagattgttgcagccttcacttctccgtggaccattggaggaatgcagccatggtgaaggaaagctaatgccctcgctgtccccaaagctatcttatgccgaagtctccaaggtgcagaatcatctccgttgttatggagtagactttgcaaattaaccatgtctaagtcctcgtagattgcaattctttgctctgtcgctatacagtatccacagagcgggaaaagatttgggtgattgatcctagcgagacgttcaaatgcaatcgagacttcagtatcagtcaatgtggttccacttgggataacttttagagctgctctgaatccaccgggtaagactgctccgtaagtaggaccagacttgccttcccacaacattgtgcctctgtcgaagttgaaagtcgcagcctttaggtctgcaagcgtcattttcattaatggcttgtcgatcattaccacagggatttgcgttgcttgcttgatatcagtggttgagtcgtgttggtctggggagttgggttctgtgttgtttatggctagctttgttgcccaagttcttgattttcttctaactctcaaggctacaagtatgagcagtagtcctataagtaagaacgccatggagattgctaaccccaaaccaatcttaagccctgtattcttcttgttgactttctttccttttgtaataattggctttgcagcgaaggggcagttgtttctaatattaatgaaggatctctggattgtttcttgggagaagttggggttgcaaaaggttagattgttgaaagagaagttaaacctttgcatcatggcgagtttctccaaaagcggccttgggatatctccgtctagcttattcaacgagagatcaagtacttcaatgttcttgacgctcagcataggcacgtggccagtgagattattggaggagagatcaagaaccttcagatgactcagccgcgagatttcacgcggaatgatattagtgagattggtccttgatagattcagataatgtagcgcagaaagcttgccgatttctgggaactcttgtgccctgaatcgattgcacgcgaggttaaggtgtcccagcttgtgagctgaactcaaaccattgaatatatggccgacaaagctattatcggacaagtcaagatgaatcagactagaccagttgtgtttgtggccgggtattaactgcaagatatgcccatcaaatcggttttcactgagatcaactgtttccacgttttcatgcaagactcctatcaatgaaccctgaaacagatttcgtgaaaggttcaagctttttagtagtgggaaagctgaaccaaaaccgacaggcagagactcgttgaggcggttggatgagaggtcgatggagagtagagatcggcaatggacaagttctggagggacgccaaactgaaagtcattgttgtggagcttgagagttgttagattgacaaggttgcttattgcggcagggattttgccagagatgctgttgaaagaaagatcaagggtgtgaagcgacatgaaattgccgatgttgctgggaagaggctcagaaatccggttggaggagagattgagactctcaagcaagctgagactccacaaatccgaggggagagacgtaatcttgtttccactgagatctaaagtttggagcttactcattttgccaatagtgttgtcggggatcgaaccagacaggtccaacccagaagccgaaatatgcaacacattctcactagagtcacagacgaccactcctggccatgaacacaaggaagaaaacgtatgagcttggggagaattgggtaatctcattgcggagaagaagctagagagatgataagcgtcggtgttgggatctaggctcgtcagatgcttgacgaagaaggagaagaacaggagagatccccatagagacaacctcataacttggtggtgtctgggactggagaaagttggatgggaaagctcagaaagaagacagactgtgtgaaaagaagaaaagacataatggaatcacggggcatagaggtgatgatagtttagaatacattgaaatccctttcacgtgcacagcttcaaaaaaaatcagaacttttagtcagaaagctatgaaatttcagaagaagaagataagagttgaatagtttgggggagttccggagttgagagttgagtttttggttgtatcgtatatggacactggagaaagtgggaagagaagagagagtcgttgaaagtcaaaaaaagggatatgtggagattataattaggtaaagtatttcgctagtgagttataagaaaaatatgataaatggaatctgtctcagaccttttgtgaatttttccaaatcccaaagttgtcaatggatttggtgagtggaggagtgggtggttgttgtggtttctcatttcagtagtgttttggttattaatgtaaaaattcacttttttaggggttttcacacttttttgactctgtcacagataccttggaaattgagaatcattcattcctctgattagcccctaaactggcgccttaatgtccgcaaataagagaaaataaaaacaagagccatcaatgtagtttaaaccaactcatcagattcatagctcattttctggataaaaatagccactcactattttaagcaatcttatgctaaaacagagctccaatagctatctgagtttcatcggattcaaagactgaaacttgcaattagagagaatgaagaaacaatgctagcaaaacagagtcgagatatcacaacttgtgcgccgaaaaggaaaagcccattaagaggaattaaatgggccgagagataaatgccggttcgtccgtagatgagaagacacgtgtcaggtcgggtagagagttggcggctgatcgtgggatccacgtcatacaacgcgccagctgaccttttcctctgttcgaagatcaatcaacatcaccttaacagattcataccaaaaaggagcatctttcgctacaaattctgtaatcaaacgaaaactcaaaagttgtcgatttttgaaattcgaagagaggttttaagactttgataaaatggcattgtttcgcaaattgttctaccgcaagcctccagatggtttgctcgagatatgcgacagagttttcggtctgtttctctcccaattctctgcttcatttatctatttttccttagctcattgtacttgttcggtcttctgggattgagtgtctgaaaagttgggactttttacgctaatttgtctgaaatttgggagttttacaaatcaagatatgaaatttcattttatcatgattggcaaaaaacacattgaactgaaaaaagtttcttctgtgtgtgttgcagtgttcgattgctgcttctctaccgattcatgggaagaagaaaactacaaagtttatatggcaggagtagtcaatcaactacaagagcatttccctgaagcatcttctcttgtgtttaatttccgtgaagtgggtactcgaagtgtgatggctgatgtcttatctgaacatggcttgactataatggattatcctcggcactacgaaggctgctcattgttacctgtggaagtgatgcatcattttctccggtcaagtgaaagttggctctcgcttgggccaaataacttgttactaatgcattgtgaaagtggggcttggcctgttttagcttttatgctagctgccctccttatatacaggaagcagtatagtggtgagtctaagactttggacatgatctacaagcaggctccgcgtgagcttctgcgtttgttctcgcccttgaacccaattccttctcagcttcgttatctacagtacgtgtcaagaaggaatttggtctctgaatggcctccattggatagggctctcaccatggattgtgttattttgagatttattcctgatgttagtggacaaggaggctttcgccctatgtttcgaatatatggtcaggatcccttttttgttgatgataaaaagcctaagcttttgtacactactcccaagaaagggaaacacctgagggtctacaagcaggtatttctcagaatattcatagcgttcttataattatgacctctgactcagcctgtgttacattgcatctgaaggtcttagaaaaagaaatatatttgatcactgattagccctgttggttttctgtttcttgtgcttcttagctttctttttccttgtttgcaatatgatttaatggcttttcgatgttgtttactcaactctttgtgttttgcaggcagaatgtgaactagtcaagattgacattaattgtcatgtgcaaggtgatatcgtgatcgagtgccttagtttgaacgatgacatggaaagagaggtcatgatgtttcgagtggtttttaacactgcttttattagatcaaacattttgatgcttaaccgtgatgaagtcgacacattatggcatataaaagaattcccaaaggggttcagagttgaggtatgtactcatggagctcatattctctttacatggtacatatagctactccattgtaacttagtactcacaaagagtactttctgtgtgaagcttctcttctcagatatggatgctgcctcttctgttgacttgatgaatttttcttccttggaagagaaagatggtcttccaatagaagttttttccaaagttcatgagttcttcaatcaagttgattgggttgatcagacagatgccacacgcaatatgtttcagcagttagccattgcaaatgctgtccaagaaggactagatggtaattcaagcccaagactacaagggttaagccctaaaagtatccatgatattatgaagcatgcagcaattgaaaatagtgcaaagttcaaattgtcttcaatgtccgaggttgaaacaatcgacacaccagaaaagcctcctactgattcagtcaagaagtttatagcagaagatgtacattctgtccttcagataaataatcaggaacaaaacgccagcgaggatgcaacaaagttgttacatcaagagtccccttctctcaagcttgtgcatcattctgcaacagttaaacctcttgtggacgattctaaatctccagaaaatgccgaggagaattttccgaagagtccttcagcacatgatgggaaagcaatctcgttttcgccacccacaccgtcaccacctcatcctgtaagaccgcagttggctcaagcgggagcacctcccccacctcctccacttccagctgctgcttctaaaccttcagagcaattgcagcattctgttgttcaagcaacagagcctctgtcacaaggaaattcctggatgtcattagcaggctctacgtttcaaacagttccaaacgaaaaaaatctcattacactgcctccaacacctccccttgcttctacatcccatgcctctcctgagccatcttctaaaacaacaaattcattgttactgtcacctcaagcatcaccagctactcccaccaacccatcaaaaactgtttcagtagatttttttggtgctgctacttcacctcatttaggagcttccgataatgtggcttcaaatcttggacaaccggcgaggtcacctcctccaatatctaattcagacaaaaagcctgctttgcctcgaccgcctcctccccctcctccccctccaatgcagcattccacagtaactaaagtcccccctccaccaccaccagcaccaccagcacccccaacaccaattgttcatacctcttctccccctcctcctcctcctcctcctcctccgcccgctcctccaacaccacaatctaatggaatctctgctatgaaaagttcacctcctgcaccacctgcacctccccggcttcccacccattctgcctctcctccccctccaaccgcgccacctccaccaccattaggtcaaactagggcaccatcagcaccaccccctcctcctccaaagttaggaaccaagttatccccatctggtcctaatgttcctccaacgcctgctttaccaactgggcctctttcatcgggaaaggggcgaatgttacgtgttaatttaaagaatagtccagccaaaaagttaaagccataccactggttgaaactgacaagagctgtcaatgggagcttatgggctgaaacacaaatgtctagtgaagcttctaagtatgcattgttcatcttgttgtcacttatttctctgatgcccccagattcttgcatgatttccaattcattgatactttacctccttgttagggctcctgacattgacatgacagagcttgaaagtcttttctccgcatcagctccagaacaagcaggaaaatcgagactagatagctctcgtggacctaaacccgagaaagtccaactggtaaattatgtttaatatttagtatgtcatagtgtctgatttctttttttgtcacagtaggattactttctctatggttgaaattactgaatatgatgagaaactctaatcttgcagattgaacaccggcgagcctacaattgtgaaatcatgctttcaaaagtgaaagtacctttacaggatttgacggtaatataaagctagacaggtttaggttgtactgtaatcatagctttttaatctggtacaatgtctatgtgtcgctatgtctgccatgataattaaaagctaagtgtctctaaaatattacagaactcagtgcttaacctggaggagtcggctcttgatgctgatcaggttgagaacctaattaagttttgcccaacaagagaagagatggagttactaaaggtataagacgtgtactcctagaataatgttcaactgctttgttttccaaagtcggaagtccctagaaaaaattggggtgttctgtgatctagcttttgtatgttcttttgacatttcttcatttcatactcggtttgtagggttatactggtgacaaggacaagcttggaaaatgcgaactggtacaaaactttagaaaaactttttagtttcattggagtagccattagagtctaacaccatatatgcctcttgaaattgtttgaacagttcttcttagagatgatgaaagtcccacgagtagaaacaaagctcagggtattctcattcaaaatgcagtttacctctcaggtctgagaagctaataccttgctaattacgattctttgttgctttattgtggtacttatgattgctgctaaccacatttttagatttctgaactcaggaatagtctaggtgttgtgaactccgcagcagaacaggcaagtcaaacgcaactgggtctaggtgtcctcccgccatgattaatcatacttactaatgctcttttgtccctcttttaatcaggtaaaaaattctgaaaaattcaaaagaataatgcagacgattttgtcacttgggaacgccctaaaccaagggactgctaggggtgagtttgaaattgtaatgtgttaactctgaatcttatcttttatcctgctctaaaagtagtgtttgtctaggtgctgcggttgggtttaaattggacagtttgccgaaactcagtgaaacacgggcacgtaataaccgaatgactctgatgcattatctatgcaaggtaagcttttatagtctgcgcttctgtagctttgtggatgtactagaggaagaaagatatagtctgatggattctttacagattcttgctgaaaaaatcccagaagttttggattttacaaaagaattatcctcgttggagccggcaacaaaggtactccactttcacattttacatggatttctcctgaaattgataagaaaacttggaactgcgttaattgtcttgtctgaactttgatacagattcaactgaagtttctggccgaggagatgcaagctataaacaagggacttgagaaagtcgtacaggaactttccttgtccgaaaatgatggcccgatttcccataactttaacaaggtatcactgtcattgatcactagttgtctctgtaaggctttctaaagtggaacaaaatagaaggctcatagattgtaggggctttgatccctgatttttcagtgaaatgttctatacaacaactaataaggcatctagacagttgctaactaacaaattgtgttgacagtgcgactgcatagacaattaaagagttgataattgattcatttgattcttgtttgaccatttttatcaactgctgtttcccctcagatattgaaggagttccttcattatgcggaagcagaagtaaggtcattggcttcactttattcgggagtggtatgtcccagaagtctaatgtacagtagatattattgcatgctctattctatcgttggttgagaacttgctcagaataaataaattatgtattgcagggaagaaacgtggatggtttaattctctattttggtgaagaccctgccaagtgcccttttgaacaaggtatgtgtatccttctctgtagcttaatgtgaaaccatgtgttccaaaagttatctcaacctagcaagtggttgtaaattgcagtagtgtcgactcttctaaactttgtaagactgttcaatcgtgcacatgaagaaaacggaaaacaactcgaggcagaagctaagaagaatgctgctgaaaaggagaaaccaaaaacaggtggattagatacagaaatcaagaagcccttaaatgaagaagttaaggaggagaaaacaaaaacaagtggattaggtaaagaaatgagtgaccgactaaaggaaagaaccgctccttgaatgaccggctgtaccgttttctatatggaaatggtctaagaccgaacgggctttgagaagaaaaagcacccggtgaagccgtgcgtaaaactggctttagaccatggaacaacagggagtgggatgctaaggacaacaatattttatctctttaacggcaaagctaacttgtaaaatagggaggggtataaaataaaattgtaattagaaagcaataaacataaatacattagtataccacatgtttggtcaatctcaataagcaaatgtcactttatttacctcattcacttgtttaaaactgtgaaagaggcaagatgcgatttttgcatatatgtaaatctttttttctcctacagcagctactttatcactagggaaattatgatttcatgctttttaaattcccaagtgagtgagtgtatttttctattgtgatccaattactcagcacaactgtattttaaacctacggtgatttgagttttgatatcttattcttcttttttcttttgcagcttcactatcttgagagagcattagatgcagaaaaacgttgtggagaaggtttgtcacgataatagaaaaagatataaaataagaattggtagattatcaagattccaatttctgagctaatcaacaccccgacacaacaaggaaggcttctttagagctttgatcgtagtgtgcatgtgtgtgtatgtatattgtcgtaacgtatgataaaaacatatagcatatgtgtctcaacgagaggatttcatattacaaacttttgcatcaatctttattttagactcctaaggccaacattgccagcaaggaaagaccgagatttgcagcgttggcaacggttcctgaagcaggaggaggatgtgactgagctcctccagttgcattggaggcagccaagtttgcaactggaggcagaggcggatcaatcacgtctttggcctcaagaggcgggtttggggcactagctggtggttgtgcttccttgtctgccacgacgactagaccaccggcttctgctggtaagattgcatagggctgttctttgttcaaatctgagcatggactctctgcatttgcatcaaatataaatgatcagctttatctttgttttgtatatctattgttctttcatgaccttgtcgaggtttaaacttacttaagtatctggtagcggtggcagggaactccgtgatgactccatcaacgccactccctgaaatgaatgtggcaagctctattgtagggtcagagaagtagtcgaacgctacggagatgtactcgtttcttagcactgaaacataaacagagatattccctttgtgcatttcctccacaacgttagtcttccctgtggtaaaactttgggagacagtgactagggaagttctcaagagattgacagcttctgcgtacttcttgatttcatcgactgatggcttgggagcacctccgatttccttgtcaatgctcaagactctcgtgtacggagggacagcctcaaaactggccaggaccgaactgtcatctgactgaatcaaaactttctgagttgattgcttgtcgagtgtggacttggccagagccgacttaactgcgtctacgactcctaggcccttctttgaggctaggtaagcagcattctgtcaacaaacaatgcgttagaagctgccttgagtaaatttagaagcattttggagttacaaagtcttgcctcgatgttgatcataactccggtgacagcctttgctttgctgaagtcaaggaaatccgcaagagtaatgaactttccagcgtttttgtttgctggatttctctggaagcccgtggcagtgaaggggttctctatttgtgctgaatacaaagatatcccaatgctcagtgacttagttgagaatgagatagtttcagaagtctatagtaaaacaaatcagtttcttacgcttcacagactggatctcagcccatgtaagatcaaaagaaaaaatgccattggtaggctggatctcaggaacgcttgtggctcgggacatgaaaatagtcatggcggtggtacttgctgtaaggtctgcagcatcatggcagaaagcgattccgtctttagacatctgaacagagcagtcgatcacgtctgctccatcatcgactgctttctggtaagccagatcagtgcagcctggatagtctccgcttgctccattgtgagttataaccaacgcatgccctgctttggggagattgccattttggtgagaaaagcaagctgcaagaaaacagacgctttagcttcttcttaataatcagctatctgaggaaacgtatatagcaagtcatctcactgatggattgtgatgctgttggcgggaaatcagtaatgacgccatcaacagaaaactggccattgtccacaaactggagatactcagcggagggatcatagctgtagttaaagctggtgcgcaagtcattggcaaaccctgaagcatagacctctagaccggctttgtgggcatcagccacaaaagtggtggcgggcttaaggtacttagctgagtcaatgggccaaatgtagtctttgggcacaagaacgcctgaagcaaaggccttgatggctgcgaggttctgctgaatctcactgtacttcttgttggtggtgggctcaactgcctctgggtctttgaactcgaatatgagctttgtcttggccctgcccgcgtccatcccgatgctcttcaagaaaccaatctctggagatgagatgacattaatgccgcggaattgcaagcttctcaggtactcggctgggctcagcttgtgttccatgtagaaggcatcgtactgcacatttgcattgtttgttgttttgatgaatcaacaaaaaagctccatatgttggttaatcatgttctcaaagagaagaaaacatacctgaacgctcaaccaaaacttgggaggcttggttccaaggacgtcctccactgcggaaaccgacatttggccgtcgaagatgctaggccgagagaagatgttctggaccactgcacaataacataaaagatgaaaatgtgtggtcgtggtggtgagcattgaagggatgaaatgaaagagaagaagacatacaagtgacattgttgaagatggtgtcggcatcgtaatcaaggacaaaccatcccttgaggtcctgaccgttgaccttgtaggtcttctgggctttagggaagactgaagatatggtggttgcattgtcaagtatgatatctgacaagcaaaggcccacaccgtccttagtcatctgaaggttgcacaacattgtgaggccaggcgagctggtgccaatagccaagtcgtttgcagaggcgcttgactcagggaaaagacccgagaagccccctctggccacaacggcaggctcttgtcctggaagataaaagacaggtacggattcttagaaacaaacaaagagcaggttatgtaatatggggattgagaaggatacttaccattaagggtgagccatttcttagcaggaaccgccgcggcagcagcaggagtctggggggctgcaacacataagtgtataaaaagggagaaaaatatgataaacctcagcatctctgtatgattgatcctgtttgtaacacaaaagaaaagctatcataagatagaaactttaaaatttaagaaaatgtgaaagaggcgagagagacaagtaaagagatctcacaaggcgaaagcaagaacatatgaccaccttcctcttctgcctctttatgcttctttttcccttatgggtttgagattttgaaagaataagatgaagaaaaacggaagcttggggccaaagaaagaaggggtttcaaaattggaatgaagaaaaacaagttagttaattaatagtaagaaagaaacttggccatcccatttatggatcaaacaactcatccacacctatttttatctctcctttctctcttaccgcgtttctgtcgttcattgagaccttgacgtatcaaaaaaatatatactaaaatatatcctccatttttcacttacgtatataaattagtaacacgaacaaatattaaaaataatttcgttatattaataaataaaattttaatttttttttttctatatggcctaaccctgaaaggtcccttaactaaaaaggtctctggaattcaacaacgattcaactctcctctctgcatctatacatcgtattgtcgatctcgtctcatctgtcttgtctactctctgccccggtaacacctctctatcttgcttcttctctctttagcttcttctctgtctcttataacatatctgctcgaacactctttatctcgtctactctctccttgttgtttcaaaagctatgttttttttcgagtttctgtcttatgattgtatagtaacaaaattagtctctcaccaactgtgactttgttttttttacgtttttagctcatagtaaaataaactcactggaacttcattggttctgtttcatgattcagaacccttgtcatgaagatcactgccttgctcgttctcaagtgcgatcccgaaacacgcgaacccgttatcctggccaacgtttccgacctctcacaattcggaaaattctctttttatcgctctaacttcgaagagttcattgtattcattgcccgtactgttgccagaagaacccctccaggtcagcgccaatccgtcaaacacgaaggttcttcttctttttttttggctcttggatctgtcatatatatgtgtcctgtttataattttgtaattgacatcgctgtgttgatatgtagagtataaagtgcacgcttacaacataaatggcctctgcgccgtaggattcatggacgaccattatcccgttcgaagtgccttttctcttctcaatcaggtacaaaacaaaatctaacttctggtacggtcttgtttgaaggaaaatattttttctttcgttggcattctgtttttgacaggtattagatgtataccagaaggattatggtgacacatggaggtttgaaaactctagtcagccgtggccatacttaaaagaagcttcagacaaatttcgggttctagaagcactaacttttttgtatctatgaatcttgtttaagactttaggaactatttgctgtgtcaattattcttacttttttttggaatatcttcaggacccggcagaagctgataagctgttgaaaatccagagggaattggatgagaccaagattatccttgtaagtgccgtccctggttcttgattgttgacctgcatgctttgcttcctttttacattccaatacataccagttccctccattaagttcttgtttccaaggtcgcttaaacatggtcgttttatgctgacttttgttttatactacagcataaaaccattgatggtgtcctagcccgaggtgaaaagctggacagcttagtggagaagagctcagagttaagcctggcatcgaaggtaacattccaccctagtattacttactactgtttcttcagtggattctgagggtaatgggagatagatgaaatagtttctgacatgagaatattggtttgttttggtgtttggatgaaacagatgttttacaagcaagcgaagaaaacaaactcatgttgtacacttctctaagctgtaatgcaactcttgaatgtccctctatagaatagtctaccctacttgaactgctttctatgaacttatgaacatatctcaaggaataagttgttccatgtcaggttttagttttttttttttttgttatgtgggaaaaaagatcaatgattttggtcatgcattttatggaataatagagaagacgcacacacacatacaaggatagatttgaagcacgaatgtgaaaattgggtaaacacgaaagtcatacagtcctcaccaaatggccactttcatctataagtagtgtagggcctttgaagtcccattttgcactcaaagttggcccacagcttatgaatgttcgtgatcgtataaggcatggaaagagcttgcagtgtgacaaattaataaatgccacattagcgataatggaatcagaaaaacaaacaaactggtgaaagataatataccataaatcatttagactaatgtgtagttttttttttggttttttttttctgtaatgtgtagtttttatccaagagatgttagctaagaatgacagtttcatcatattgggataaaaaattatataaataaaattaacataattaataatttgttaactagtaaagctattgtatcggaaaacattatataagttcaatttttcacggcttactttcaagtttaactatgtatgttgatgtgtatatgtattgcatacttttaatgtacattgattgtatcgactctcatttcgatgcaatcaatgaattaggcgttacaaaagaaaaagaatacaaactcaagattttataatcgaatctagatactctataacattctaattttcgtaacggctagtaaaatctaaacagtctaaatattcaaattttcgtgacaaatagtcgagtacagacactctaaacattcaaattttcgtaacggatcaaagactcgaatctatgataatttaattcaacctctgcattggttacaaatgttcttttgaatttttgtcttaaggggaattgtgactttgtgagaaaaaagcattgcacaaatctgaagaagaaaagtggtatggtacagttaatgggactactactactaacattgaaaaacgaaaaggctcaaaaccaaaccgctttaaaaggaaggaacctctctaatatttttcgtattaactcataacgggcccacaacagttgcaatagtctttcaaaattctcctctctaatctcacaaaaacctctccgatctctcgctctctcagatctcctccatggatcccgcttcttcttcttcctcaaatcagcgcaaccgaatcgtctcttctggtacactcttttccccctcatttttcttttcgtatctcttcgatctccatgaacaaaatcccccaattgaacccaaaccctagaacattatagagccgttgatgttctgtttctacttctgacgagatatgttgacttctctcgcaggggaaagaccagtgatggctgataatggcgtccaacaggtaatttaattcaatcttcttcttcttcttcttctattttgaattattgtaaaaccaccatcctaggtttaaaatgcgttgttcctttcaccaccagcaggtttctcacgacgatggaaggaacattgtttcttcgtcttatagttcttccgtggttccttctcctgatcccgctccttattataacgttcttcaaacccctaccaatctctatcactacgattgggatatcgcaaattctggtaattttttgtcttcttctctcttctaataaatcaaacaaaatctgtaagtgctcattgcattgttgtgttttctctaggctatgcacaaggcatcaatacttgggatggatatccacgatatgctactactacccctgaagccatgcatgtgccaccggttagtatgacttgccctatttatgttctatcttcctcttgctacttaattaacttagttattctttatcctcaggttgtctacaatgacaattcatctcttatgtaccaatatcctggttatggatttaacccttatccttctgtaatgttggagggacaaattccagtctccccagcttattacccacaaccttttggtgcaccttctgcaatgcattatttaccctcagatattgacccaacatctgctgcttatatgattccttacgggcaatatggtggagggaattattccggaaatcaaggggacatctctttaacatctcatataccttatcctcaaacgatgggtatacttgggccatacgaccataatgcttcacaggttaatactcttccctctttagttttaactattatgggcttatgtacataacctttatttggtttggttcggtaaacatttgcttactaggaataaaactgcataaaagtgccactggttattagtatcactagttttttgtgagtccatctctttagctttgtcgtgcaagataatgaatacatgctgacacactggaagagccatgatattttctcatatatgattgaactttcagttttgttcttccctgtaatggttttggggaatagaggtgtctttggcatacgccttggattcaaatcagttcactgttttattggcttatcacatttctttggcaccttttatcaggtagcgttgcatgggagcggggttgcttcaagctcttctttgggaggttattatcatgtaggatcttaccagaatcctagctctaccccctcatattatggagttgataatcgagtcagattaacccctgacataggtaaaagacgagagaaggatcagggctctatatctagcaccagtgatctgtatggtaatcgaggaccacgggcatcaagcagggtaaagagcaagaacagctccaaaccttgctctactattggtgattcagcaagcgattcaagtacagctggaccaaatcccagtttgtacaaccatccagaatttgtgacagattataagaatgccaaattctttatcgtcaagtcatttagtgaagacaatgtccacagaagtatcaagtacaatgtctgggccagtacaccgcatggcaacaaaaaattagacactgcttatcgggatgctgagaagatgggaggaaagtgtccaatctttctgttcttttcggtatggcttttccactgtccaatctctctgttttctttctgtatggttttttttcgatgtagtagtatatataattcctgggaataaccaaaagcgtaattgataagctgcttcaatgaaacagtaagcttaaccaaagtttaaaatcttgcaggtaaatgctagtggacaattctgtggggtgtcagaaatggttggacctgtagattttgaaaaggatgctggttactggcagcaagacaggtggagtgggcagttcccagtgaaatggcatattgtgaaagatataccgaataaccgattttgtcatattcttttacaaaacaatgacaacaagccggtaacgcacagccgagattctcaggaggtgggcattacttatttttttgtcttatgatcattgattcaatgctctcttggttgcggtgccatagtgatatttgtcttggtgtcactgtgttaggttttatgtggacaagtcttgggcaatttcacattatcatgtatgactaggtgtatatacccagtaatagggaaatccttgcatatgtgtattaggtcaaacgttaatagttggtatagggatttggaagctacttaattatgaggtacttgaaagttatactttatagtctcccagggaattaaagcttgcactttttgcgttgggttttcttgagtgggatattaagcaaaaaatggaacatagaagagtaagtttttgtggtagggagagagatttggaacgcattaattggatgttgcatggatttataactaaattgattgatgaactgtaacaggtgaagctacgccaggggattgagatgcttagaattttcaaagaatacgaggcacacacatcaatccttgatgatttcggctactatgatgagttagaggggcaaaaggtgggagaagatggaacaaggaaaaaagctggggaagaagagacctccgtggagcaattatcagagcgccttcaagctgtcaaagtagaagatgggaaggaggaggaaaaaaaagagttaatagctgattgatacagtaatagtcagtagaaggagacattcttttggtaacaataagcaatggggttctcttttttctatttgggtggggatgtatactagaatggtcgggacaaaaaaaatccaattccttgtaggcttgtaagcaattattgcttttgtagcattgtatcgtaaaacggcaacgtttcgccttttaacaagagactcgggttatataacaaaaaataaatataagtcttcttcttctccaatggcgtcttcttctcttgttcgaatcgctgtcgtcggagacatcgtaatgtttattatatcttctctttatctctcactcgctttctttcatcttgttgatatgtctttatctttttcttctcctgttaaagcatggcttctggaacctagatgaagatcgaaaggctctacgagttctccaggtcctttgatgtttccttctatctttctcaagctctctttttctattcacacgtactcgtgaccctaaatcctcttctgaacctgatttgcagccggatttggtgctcttcacaggcagcttctctgttactgacgtcaaattgatttccttttttttttgaatttctccatttctcttcacactacctctaatgattttgattaaagttagaacatttgaatccaattccaaattctgtcaggtgattttggtgaagaaaacgtcccactggttcaaagtgttgccgctcttactttccctaaagcagtcatattggggaatcatgatgcctggttcacccaagattttccaaggtgtcttgccactacctaacccttctctgaattaccgtcttctagagattttggtcttgtgctttgatttttgatcgtggatttctatttttgttatgtttctctcaggaaagaaaaacaaaaacaaaacggtgttcaaatgcaactcgatatgtgagtttttttccttatgtgactctcatgctatatcaactaatacctatgatcagttactgctttgaggcttatgtcctttgaatacctcgctcgttgtcagtttcaccctacctatggattctgcttgctcctccattttttctgctggtctttttgggatgctacttgtaatgtaacacgctgctgcactggttgttaatttgttattatgttcagcctagtctagtttgtaatgagcatcctgcccaatcccaaagttaagtcgtaaaggttcatgagacctatctcggggaaatagatttagggagagggattattggtttaacccaaataattgttttcttttggtgttcttgatttgtttgcaaaaaaaaaagttggtttttctgtttgtgatcctttagctctatcattattcatgtaatttttggttttggtttactggacacagattctgaaaagttttcttatgtttccctctgcaaccaaacagccttggtgacgagcacataggatatcaacgcatggacttcccatcttttaagctcagtattgttggtggtcgacccttttcacatggtggggatcgattgtttcggaaaaatctgcttgtccagaggttagcatttgacttacatggcaggaatttcatttatgttgtgtatgaagaatttatttggtcaaaatagctttcatcttgcaaaaatagagcctatgaatgaatttaggttcagaagaagatgagctgcctagatctttgtatcggtaattgaagaaaaacgaattgacagtttagtgaatctgcatccctttctatacttattttgtgtttgtggggtgatctctgtgaacgtacaagtcaagtgattacgggtagcaattttaaacattctggtttcaagtcagagaaaactaccagtcattgacacttttatatttttctaggtatggagttcatgatatggaagccagtgctgggagtatttgtcgagctgcacatggaacaccggaagatcacgtggctataattctcgctcacaatgggccaacaggtgcatcaacctttaaacctttcttattggtctagtcttacgccaatcaggtttaacatataaatattaagtagcggttttctttgcaggtcttggttggcaagcagaggatatatgtggaaaagactggggggctgaaggcggtgaccatggtgatccaggtgaaataatttaccatcttttcaattcggcatcagtagcatttcccatgttttagactccaaaatgctgattgtagttagtttggtgaaatctcattgtaatgtttcagatctagagcaggcgatacgacagttgaaggagacgactaagttgtcgattcctttagttgtgtttgggcacatgcataaggagctgcaacgggggaaaggaaatcggaaaatggtagtgcaagatagtgacaaccagactgtgtatgtgaacggtgcaatagttccaagggttaaagaggcaaagaaaagaggagcagcagagtctgagagtggtggcacaacaagagctttcacattggtggagattttagatgggaaaatcaagaaaatagcagaaatttgggtacatgtaaatggaagtatggctaagattgtggaggaaaatactttgtttgaagatgtaacctgatttgaaatttaaacaattaattcgggacaagactgtaataactaattatacatttgtcttggcgaacaagtcccttttagaaagcatagctattaaattaatagtagggaaaattatttacgaaattatttggtaaaagaatttgggagaacaaactccggtcggcgccgtgttttagaaccctacttgttgttcttccttcttaatcgctctccggtcggcgccgtgtttttcgcgtctctctcaaactccaattctctattttccgaccaacagagagtagcgactggttattttctgtaaatttctgatatttatcgctttttctctgggggttttctaaggttttacttggaatccaaatcgatgtttattgtgatgtttagctagttatggaattgttgggtggagttgttcgcagtgacgtagaagtagcatactctcgagtgcagtgatgattctgaagcagctgaaacaatttacctgtaacaaagctaaaccctttttactcatgtttcctttcaatgtctgaaacttgtttgctgaatgtttttttttccaaccttgatgtcattttgcagtgtctgctactcgcagaaatgctgttttcaaaactgatgttaaacggcttgcaaggttctatggctctcctgctgtttgcgaatctttaacaacatctaaaattcccaaaagactctcaaaagatgatcggcgagctttggtggagtcctttgtcaacgagtaattctttctccatcgattagttttcccatattctgtagaggttcacatgtcaactagatagcaatatgtgcagctgtatgaatctcaaggtcctgaacataggtactgtttgtttgcagatacagagcaactaatgctggtagattcccttcattggatgctactcacaagcaagtgggaggctcttattacattgtcagggacatctttcaagagctgaaactcaaaccaaaagcacatatgccaatcgtagctaaagccctctcagaagtctcttcttctgtaccaggtgatgcttcctcacactcctctccagcacctgtgccaaccgttgaagctaaagccctctcagaagtctctccttctgtaccagctgatgcttcctcacacttgtctccatcacctgtgccaatcgtagaagctaaagccctctcagaagtctctccttccgtaccagctgatacttcctcgcacttctctccagcacctgtgccaatcgtagaagcagaagccctctcagtagtctctccttctgtaccagctgatacttcctcacacttctctccagcacctgtgccaatcgtagaagctaaaaccctctcagaagtctctccctctgtaccagatgatgcttcctcacacttctctcctgtggttgttgaacctgagtttcaagtaaagaaaaaatcttgctttggtgtgatcagtttaatttccttaggcttcagttatcaattggcttagttatccttgtttctgtttcacaggctggcagtgtggatattgagataggaagtgagcagaggccggatataatagatacttctcactctaattctgatgatgaaagtaatttccagggcaacaaccttgtcattactgcaaaagatgacaaaagagaaacagaggcaactcagggaatagaaaactcggagactgatgaagagaggaacttgacgcacttaggcaatcaagagtcaaaagcagaccatcttgaaggagctgatgtttcagcagatgttgtgcctactgagaccaggtatcaaatgcatacaactaggtctcttctttactggtccgatccttatattaggataatttacttcattgatggatctcttgtttttgagtaatagaaaaagtcattcaagttgatcatattggcaccacttcagtttgaattcttatatcttttgtttttacagacaaatttcagagacaggagccggtgaggtgaaagagacggaaactggtgaggtgaaagaaaggtcaagttcgtggagcaacataatgtcatttgcgaaagaatttgcgaacttttggagatgagggtagatatagccagggagctttagacacgctcaggaagggtaggtagaggtgtgtaaagtataccagtagaagctgttttgttttgacattttgcgcaaaggtttggaatcgaccaagatgtcttaatctagactattattgtcctgctggctatgagtctagattaaaacacacaacagttttagaggcttgttttgtgatcgaccattttgtacaaaggtatagaatctcccaagatgtttaacatggtaatctatactatcgttgtcctactcacaatgagtctagatcaaagctcgtattttcgctaattcattgtttgttctacagaactacaaatccaaataaatactcgaatagacattatttcatagcaatttttatacatgtcgaataaagacttcatttcatagcaattttgatacatgttcccgtagtggtacaaccaaaacaaaatgtgttggaaagttggtgccgcagacagcagtagcatagctctagctcccacggtatgtggagaaagaaaaaggtgcaagcaacagtgggacatggaaatgctcccatttctgtgattctgtaacctgaaatacaatggaaacatagggaaagaagcagcctggggaatactttgcagtgtcgaagctaatcctatatgtccctggattcaaagcgtcaaccaaatccatcagtggcccactgcgcccatctctatcagtagctgatgtgcccacactggaccagaccccaccacctccatgaacaaaggaaggaccggtagtaccactccacacttctaagtgcacttcaacacctgcagctggagcaccacgtgagacgtctaagacatgagtcgtgatcggtggcctacttctcttgggagcttttgcttcagctgcaacattcaaatgccctccaatgattctcagacgatcttacaaagcgagaaagtagaaaaggtcacacagataacaaagatagccataagggtaaatccttgtattccaaaagacacatacttgatatcatactgaatcctaacaggttcaaacccacacagtcaaacacaaaactttgacaaggaaaagatttggtaaatcatcaatataccttgaggttttgttgaaacaggagagctagagctgtcagtttctgatataactttagccttatcggagaacagctttgccattcgtagctctgttattttcatttgttccatagcagcaatctcaagctccactattggcctattttcatacctttcctgaaaaagagacgatttgatgaatatgtaactttctcattcactcacactcaacaaaaactgatttggaaatgcaaaagttgacctttaacgcatggagcatctcagcgtgagtcctgccagaagcgcaaataatgaagataaagccaaacttctttttgtaaagtacattccattcggcaagctcctaagaaattgaaaacaattgatcatcagaagaagaaatcactgaagagatgaaggaaaaaaaaagtgaagatccatcacctgtaaagcagaagcagaagttgtggcaaaggcggttgactgttctgatacgctccgacgagcaaaatcggagttgatagaaggtgaaggagtattcccaatctgaggatgagcagagaaagcttcaagccaatctgtcacattaacttggttgaaccagatgtctcttgcagtatatattgcttcttgagaagttaacggtccagacgtagacatctgcttcgcgaattcggagcttccacagcaaaccttccattcatcttctccgatctccatcgccattttttctctcttttctccaatcctcacttctgttgactggtgtaagatcaaaagtcatctaattgggccttttcataaacgggcttttcaaaaatgggccttttctttatcttcttcctttttttattcatcatcttctatatgtgaattattcagaaacagaagcgagaagtttcttacaatttgtaaagagatctgttttagggttttgccttgttcttgtggcgggaataacaaagacatcgccgatatggggaaagacgaagaggaaatgcgaggtgagatcgaggagcgactaatcaatgaagagtacaagatctggaagaagaacactcctttcctctacgatctcgttattactcacgctctcgagtggccttcacttactgttgaatggcttcctgaccgtgaagaaccttccggtaaagactactccgttcagaagatgattctcggtacccatacctccgagagcgagcccaattacttgatgctagcccaagttcagcttcctcttgacgataccgagagtgaagctcgtcagtacgatgatgaccgctctgaatttggtggctttggctgtgcaactggaaaggtgcgattttttatttttgtttctcatttccaactttctagatttgattctagggttataacgaggtaaaggatgataaatgttagtttgattgcttgtgtaggtacaaattatccagcagataaatcatgatggtgaggttaatcgagctcgctatatgcctcaaaaccctttcataattgctaccaagacagttaatgcggaggtctatgttttcgattacagtaagcatccatctaagcctcctcttgatggggcttgtaatcctgatttaaagcttagaggtcacagctctgagggatatggtctctcttggagtaagttcaagcagggtcatttgcttagtggctctgatgatgctcagatctgcttgtgggatattaacgctactcctaaaaacaaatctctggacgctcagcagatttttaaggtaatgctttggatttctattcgtttttagttttgttttgtatcatctagaaaggaaggaattgcacccacttaacggaatcagttacacttatgaaagctcatagatagatattcaggttggtttctgtgttttccttgctgatgattattttctgaacttaaggctcatgaaggggttgtggaagatgttgcatggcatctgagacatgagtacctgtttggatcagttggagatgaccaataccttctcatatgggatctgcgttctccatctgccagtaaaccagtacagtctgtggttgctcattcgatggaggtgagtttgcaatatattagctttagatacagataatacttctggtttttaagcttgctttccttaacactaaaaaccattgaatcatattgcctcgtatgtatttgctaattgttgagttgtttgaaatgccttaggttaactgcttagccttcaatccatttaatgagtgggttgtggcaacaggatcaactgacaagactgttaaattattcgatctacggaagctaagcaccgctcttcacacatttgatagccacaagtaagaatgatacgccataaatattgccgctttgagatggattttgtgttactaagaagtatttacaagttacagcaacatcactaaccttaattatgtgcttgatctccagagaggaggtttttcaagttggttggaacccaaagaacgagactattttagcttcatgttgccttggtagaagacttatggtttgggaccttagcaggtttgggccgtagactttagttctttagtttaatgttcatgtatggtcatggaggagcaatattgatatgtttgagggtgtcttatgataggatcgatgaggaacagacagtggaggacgcagaagacggcccacctgagctgctgtttattcacggtggtcacactagcaaaatttcagatttctcgtggaacccttgtgaagattgggttatttccagtgttgctgaggacaacatactccaaatatggcaaatggctgaaaacatctatcatgatgaggatgacgctccaggggaagaaccatcaaaagcttcttagcttgttatttagtatccaaagcgcactgatcttatgggacagtatttatttatacatctctgctattgtttagttcaagtatttagtgttcattgtgtaaaatgaggcatgagaggatggtagcaagtgggaatttttctttataacatgaaggagttgattctaatctcactaagtagtgtcaaccaaagctataactcttagtttatacccagattgggcgacattagaaagaaattacaaatttgaatcaaagtctctgacataaaatttcaaactgaaagtcacttgtcacaatggtccttattaaagctactggatagcttggtttgatttgatattgataaatgataactagcaatcgaaaagagatctgtattgggaagcctcgtcagccatctcctgaatgctcctatcaacccggtctttatctagatcaagcttctgcttcagttccttctccttctcatcaagctacaagaagataccaccataagatttgtataaaaccaaagctaggaatgtgatcaaaatgcaacaacttacagcatcatagatttcatcattcttctcaaagtcaccacctttacgaggcaagatatgaatgtgtacatggggaacagtctgtcccgcttgagggccatcctaagccattttcatgaaaccaaagttagatcgtttcaattccaatccattaagatttagacgcaagaaacaatgacgaaagaaaggagatgtttagtttacttggatggctaatgtgagagaagacgcattatggaaggtctcaagcttagagccaaccttctgagcagtaagccacaggtcactggtctcatcagctgtaagatcagtaaatcgtggcacaaggcgtctcgggcagacaagaacatgtgctcgtctggttaaagtcatccaatagaactcaatttacaaaacaaaaccgaaaaatgaagaacacacaaaaaaaagaaggatatgacctgcaaaaaatagatgaaaaagaaggtcagaagaaagttgaagaggttcgatgaataattagagaggaatgaggcataccaggaagaagcggacggagattaaccatggcataagagagaggcgttgcgtagaacacttcacggggatcgattttgtacggcccaaatgcgtacgaagaacaagtagacgacatctgcagcaatcaaaacactcaaaaatcaatccttctaacttgtaaagtagagacaaaatgttggatcgtataaggaacttacctttctctgacaacgaatactagataagatcgtcttcccggttacttgcaggttcagcatctcagctccgcctccgtcgccatgaaagtcacagttaacgcctttcccttttctttcttacgggcttgaagaaacccataacaccttattgggccattactgaagcccaaataacattaaaatcaattaaaaattgagttgagaaagggagagagagagtgatgataataatggatgacccccggcaaaaaagataagatttttacagattctgcctcgatcaacagactctaatcagcagcaaatgtggagcgtcaccggagcattgactgtggcggtgccgcctaccgccgccgcttgccgtacgaaaccctttctcatctcctcttcctttcccaagcagacaaagaaactccatctctcttcgccttctctgtctctaccatcatcacatttctcctcctctttcaaaaccgcagctacctccatcgagcaacagtcttctgttaacaaggtttctcttttctttctctctctctcttttcctcttgaccaatcaaaccaaacagcttacgttttctggatgattgcagggagagagcaccaagtaccatttcctggtagcaaacgctaaattcatgcttgacgaagaggagcacttccaggagcaattgtttgaacgtctccgttacttcggtgagcgtgaattagtgcaagacttctggcttgtcattgagcctaaattccttgacaatttccccaaaattactcaaagacttcgtcgtcctgctgttgctcttgtttccaccaatggcacctggatcacgttagaaccctaatcccaatctctctcttttcaaaattacgttcctcactccctccttatctaacgcatttgtgttttgcaatttgttgttttatggcaggtttatgaagttaagattggatcgtgttctgtatgattcctttgaagctacctctcttgatgaagctttggcctccaatcctaccactcttgagttcgataagcctaaaaattgggtggcgccataccccaagtatgaacctggatggtgggataccttcttgcctaaagtaacccaagaatctgcagtatagaactttgctttttgtcttgtttttgcattctccaatctcagctttgtcttagtgcttcaaagttttgtactactgagctcattatccaagtctatatctttcctagtgtagcttctattactcaaagttgcctgtttgatacgtcactgactcaaggttaagcatagaactagacaacaaaaagcatcctcacatttagctccatcaaagtcttaagggtgaccatatttgttgatttctcacgagaatattggcaagaaccttcagttaaagctctaggtattaagttgtctagtcacaggagggcaatatgcctactcgctgaagaactttgcaaaagatctgaattttttggttttcaaaacgatttgtggactcggaacatgttgttactcgttaggtctagtgactggagttgatcaaagtaagttgcacatgtttctgctgaatcaagtgttctatgttgtacttctggattgctctgtagtctgtatctaagcgtgtcctatcaatcttactgattatacatacttttatttgtgacaaagcagagtcagaaattatctttaactactccatgggaatatactaccaagttacaaatacagattttaacttttactatgggatgagtattgctacacttgcgggagatgcattcatgaaaaactatacactggtagctccacttgtgccattaagttactcttgtgcagctagatttgcaatttctgctagaggcttccacacgaactttctcctgcaggggaattggtaatggtcatgcaaattgcaaacatagatgattagtgtgtatggtaaggaatgatatactcaccagttgccacattcagcaataaccctgacgttaggacgaagagagggaagtaaagcgagaaattgaagctccgattttgagaggacctgagtgaaatggaaatatgagaaagagcatgtgggagaacagatcaaatgagagaaactcaaacctttgcttcgaggacccatacaacaagacccttggcactagggggaagagcagcgagcctgtaatcaacttctggtggataataccatcttgctataggttgtttcccaagatgagcctaaaagaagagaagatacatggttcacacaaaattatattgaaacaagattaaagtagaagatggatgaaagtagacatacagggcaaacagggtagttcttgagaagggtagtctcagggtcaccaaggccacgagcagagatgtcaagaaagtagtagccctgcattttgagacggttaagataacgaccttcgtaaccaccctcatgaggagcgtaaatggcgattgccttgtgttcttccacgtcttgaagccattgtccgatgtccggcttcaccaagtcacctccgatgtagtcagctatgctgctacatttcacaccagtgcttcttcttctcttactcctagtattcaccaaaaaggaaccaactgttttgatcttcttcacttgcgaggcttcaaaacacggtggtgccacacgttgtatacatattgcacggcttcccatttctttactaacaatgacttcttgtggaagtagctcataataaacattgcttgacgacgatgatgatgaaagaatggtggagaaacgacgactcactccacaaagggatagacattaatgggcttaaaatgtattgggctttatttattaggcccattaagcaccgccgaacgtcgtgacattgttagctagctcgccggagcaaaattcagtctgtgaaactttcggagaagaagggatgtcgagaggatctcgattcgttagggctcctgggctcttactctgtcgcgttaatcttcaacctcaacccaaaatcccatctttttcctacagtcttcgctctgattatcgtcttcataatggtttctccaattacatcagacgtaactcaattcgaacatctccggttatcaatgccttcctctcagataactcaccatccccgtcaccatcaccatccccaattcgttttgttcaacggagttcaatgcttaatggtcgtctcttctcgacttctactcccaatccagaccaaaccaccaccaagactaaggaaatcaagacaacctcgtcggattcagactcagctatggctgacatgaagattctccgtacgcttgctggctatttgtggatgagagacaatccagaattccgtttcagggtcatcgctgctttgggttttctcgtgggtgctaaggtcttgaatgtccaagtccctttcctcttcaaattagctgttgattggcttgcttcagctaccggtactggagcctcacttaccaccttcgctgctacaaacccaactcttcttactgtttttgctactcctgctgctgttctcattggatacgggattgctcggacgggttcttctgcttttaatggtaactctcaatagctctagttttctttaaaaaagaatgcacttttcactcttggttgttacttttcatcatcgcagaacttcgtactgctgtgttctctaaggtagctctccgaacaatacgatctgtttctagaaaggtatgctgctgctgctctaaactatcttgtcgatagagatattttaatgtatgaatcaatttcatatggtcgctttgcaggtgttctcacatttacatgatcttgaccttcgttaccacctaaggtatctatctctcctctcttactcttgtgagtagtctcgctcattccatcttagattcatctcatcataacttccttacttaattgcttatgtccagtcgagaaacaggcggcttgaacaggattattgatcgtggtagccgtgcaataaattttatcctctcagctatggttttcaatgttgttcctaccatattggaggtaaagcttgtctgaccacttggtgctttctcatgatcattgttttttttctcattttgaataattggcagttgctcattcatatttggatttcactattcattcgtctctaaaaacactcgacgtaattaatatgtatctttcagatatctatggtatcaggtatactggcatacaagtttggagctgcttttgcctggattacttctctctccgttggatcatatatcgttttcacattagctgtgacacaggtactgtgcctttttcggtattctcttttcaatgccaactataatgcaatacttgcgttattatcatgataatccagcaataactgtgatattttatttaagaaactactatagtatacattgttctggaattcgttactaagcttctctaatcttaactgtatcaactctttggatcggcttaaatcattctagttgtgatattaggtttgatgatgtatagaaggatagttgtcttcatacattctcttcaactttcattatcttgttacaaatctttttggtgtcaaacgctttgctcacggttttatttattttatccagtggcgaaccaagtttagaaaggctatgaacaaagctgataatgatgctagcacaagggccattgattctctgataaattatgaggtaaatttttaatcttaatcattttgcttgacttgcagttttgacagaatttctttttcgtttcagactgtcaaatattttaacaatgaaggttatgaggctgaaaagtatgaccagttcctgaaaagtaagtaactctactagctgtttagatgaaaacatttatcttaatttccaaaaaaaaagagaaaattctccagttttagtttgagcaagaatagtagcaacaagccaacaagtaacaaatgtagatcagaaaatgcgctgatgactctttttacatctttatttacacgttctttttctaggaagaaaaccgattgatattttaccataatatattattgctccgtccatttaccttaatttatcttgtgacgattctgctgcttatcccagaatatgaagatgctgccctgcaaactcaaagaagtcttgctttcttaaactttggacaaagtatcatatttagtacagctttatcaacagcaatggtgttgtgctctcagggtatcatgaatggccagatgacagtcggtgatttggtcagtgcgtcctttgatttttccttgacattggtattttatgtttctctgcattttttatccaaattgttttctaataagcttttgcatatttgggtgatgcaggttatggtgaatggacttctctttcagctgtctcttcctctaaattttttgggtagtgtttaccgtgaaacaattcagagccttgtggacatgaaatcaatgttccagttgctagaggtatgtgaggatgttataattgtttctttaaactctgcatttggttaagtttcttaaacacttttttttttatgataatgctttaaatgcatgctttttagtatgcactcctggcatgttgaattgattatgtggtattctcttactgtttcaggagaaatctgacatcacaaatacaagtgacgcaaagcctcttgtactgaaaggtggaaacattgagtttgaaaatgtacacttcaggtaggtgttgattttagtggaacattactgtcatactaatcgttggagccatagtatcttgggtatgaaagtgtgttaagattaatatgagtaattaactcaaattttatttaacttatgaactcaatacaccccagaaagtctttactaattagctttgttgagcttatcaaagtggcaaattataagacattgcatgatttggatatcagcttcatgttgtggctgaagacgaagggggttaataacttatgtctattgccacatcatctttctctttttctacaattacagttaccttccagagagaaaaatattagatggaatttcctttgtcgtaccggcaggaaaaagtgtggcaatcgttggtactagcgggagcggtaattcctaaacctcttctgtttaagcatctaagttctgtgtaaatttgttattctggtatactgttgcaaatcttattatttgttctatggcaggcaagtcaacaattcttaggatgctattcagattcttcgacacagattccggaaatgtaagcattttttttgtttgtgaaatgtggggtcttgtttggaagcattgtagcaacgaaagtacaccctgctgcagagaaatttagtgaagaaaatgcttggtatctagataacatcttttttgtcatgttggttaacagataaggattgacgggcaagatataaaggaagtgagactagatagcctccgaagctccataggagttgtgccgcaagatactgtaagttggcatttctctacttctcatcgtgaggctttttgttatatacaccactatgacctgcattcatttgtttctcgcctttcttctcattgtaacttctctggtcatgctagacacttgattttttttatgttttttttcacttttcttctcttttatttttcatatgtatcattgttagcttttgtgaaggtatagcactccaagttttgttgttctcaagggtaatctctactgcactgcaggttctcttcaatgacacaatatttcacaacatacattatggacgtctctcagctacagaagaagaggtaccagtcaacttatacttggtggaaatgtcaagtttaatatcaataatcctcatctaacataaattttcaatccaggtgtatgaggctgctcggcgtgctgcaattcatgaaacaatcagtaatttccctgataaatattccacgatcgttggggaaagggggctcaaggtcagtattttgatgttatatctggaatgcatgattgagttatggggagttagtcacccgtcgtttttgtcattgtcataatcaaagtaaaacaagctaagtcaatcaggcttccaagtcaaagttcacctgttgaaaacttgatgaagaatatgatctaataaactagtttcgcaggactgtaacaatcatgaaaaataaaagatttaactgattgaggttttctatataatggcaaagagtagcattgatgagtgaccatcctgagtttgagtagagtcatatattgatggggtttttgtattgtgataaccatggagtggtgttgtgtgcagttgagtggtggagagaaacaaagagtggcacttgctcggacatttttgaaatcccctgcgattctgtaagtaactttgcacagaagcagcattgagtttacttatgtgattatgtacgtgtctagtcctcacatacatagagatggttggtgtacacaggttgtgtgatgaggcaacgagtgcgctggacagcacaacagaggcagagatactgaacgcactcaaggcactagcgagtaacaggacatctatcttcattgcccacaggctgaccactgcgatgcaatgtgacgaggtttgtagtaaatagtgtttgtcaacttagctcaaagaaacaatgtttttgcataactgaaacttttggttgcgggcagatcgtagtactggaaaacgggaaggtggtggaacaaggcccccacgacgagctattgggaaaatcagggagatatgcgcagctatggacacaacaaaacagcagcgtggatatgcttgatgcagctatcaaattggaatagtgaacctcagagccaaatgtgtaaaatttatatttatctcattgattttctatggagcttatatagttaatagagtcccaaagaacacaaaacaaagggaataataaatagtggtgaatgatataattttaacacgagtttttgttgagcaagtaaacttacgataaaaaaatgatcaattttattagttaaagcccaaataggcccaactagttattaattaattaacaagaagaagtccgtgatttcgaaattcaaacgaagcgccatttctttctcctcctaggaaactctgcaatggccatggcctatgaggaagctcgcaagctccgtcttcaagagaatcacaagcgatttcaagttacccttcatcgttaccgcgtttcttcttctcctccttctctgattcgtttatcaattttgattattgaatctcaggatttaggaatttcccagatttctaagactctgactcagattacaaagaaaacgcctcaggtttcgtgttttttccttccatttctgcttcattcctagtccaattttgtagctttaccacaatttcagcttcttcagcagcgtaatcacaaacccatcgataaagccctcttagctactgctgaaccaagacgctcttcccgtgttcgtaccgtaatttcttcctatcgcgatgatgtaattttcccagctttctcttacttctgtaatagatttttcacagcaatcaatcaacccaatcccttgtctcttttcaggtcgtcgtagacactggtcgtacttcgaatctgaggagatcgcgacatagctctacatgggcgacgtaagtgccctgctccacaattttgccctaaaaaactatcctttcatctgatcaattagttaaaattcatcagctacatttctcgacctctccatgagtgcaagtttgcatcttatgaagaaaaggttggagcattcaaggctgcagagaagttccagaggagccttaaatctccacatccttactttgtgaaatctatggttcgctcccatgtttacagttgcttttggctggtacgttcgttcacaacacttgtgtgtgtttcttcttcaaggatttcgtgttagtaccttacttgacctacatgggtttgcttgcaaatttcaaggggcttccttcaagattctgtgcagacaattttcctgaggaaactatggaaatagaactagaggatgaagaaggcgaagtgtatgaagcagtgtacattggtagaagagctggactcagtggtggttggaaaaggtttgctcttgatcataaattggatgatggtgatgctctactctttgaattggttgaaccaaagaagttcaaggtatgtatgtgtcttgaacaagagtcatgtggttggagttagttgacattctcacatgttgattataaaatgtttgcttggtgcagatctatgtgtttaaaggaaatgagaacgctaatcttacaagcgccagaaagagaggcagagcaacgacgccaagtgaagaagaagaagaagaagaagataaggatgttgaagaatcaggtgatgaggaacacagctcaagagccactaagagatcatccgtaaggttactaaggaagaggaaagcataagagagctttcttttgtctacatgccccatatatttttttggtttttgagtgggctgctaatactactaatactaatggcatatttgtaagtttatcaacccaaggtaaactttgtttttttcaatttgaaagtagaactgaaactctgatgagcggctttggttcggaaatttaaattgtttcctctcagttttggttactaggcgatgatgagctatatacttctgatgataccatttagaccaactccgtcacaaaataaacaaattaaaatggagagagtaaacgggctattaaatatcaaaactgggccttactatgacaaaaggcccatttaatctattttccttttatttagatgagtcggctcacaaattaacatttcttttcctctactccaaagatatctcggttcgcaaaagtctatttaatttcatagcaatctcacttttctcttcccccaccctcaaagatctctcaaagaatggcttccgcggctgttgcatcgatggttcttgaccctaaagcatcaccggccttgatggatctatccaccgcagacgaagaagatctctatggccgcctcaaatcgcttgaacgacaactagagttcaccgatatccaagaagaatatgtgaaagacgagcaaaagaatctcaaacgagagctgttacgagcacaagaagaggtcaaacgaattcaatccgtgcctttggtgataggtcagttcatggagatggtagatcagaacaacggcatcgtcggatctactactggctccaattactatgtcagaattctcagcacaatcaatagagaactcttaaagccttctgcttccgtcgctcttcaccgtcactccaacgcccttgttgatgttttgcctccggaggctgattctagcatctcccttctcagccaatctgagaagcctgacgtctcctacaatgtaatgtttccttttttccaaatctcgactctgttttctgaattaaagttagggtttttgaaacgatctttggtttcttatgtggtgctttatctttttgtgtaggatattggaggatgcgatattcagaaacaggaaattcgtgaggctgttgaattgcctcttacccaccacgagctttacaaacagattggtattgacccacctcgtggagtcttgctctatggacctcctggtactggaaagactatgttggctaaggctgttgccaatcacacaactgctgccttcattagggttgttggatccgagtttgtgcaaaagtatctcggcgaggtattaaaaatcatagctttattgaaggtttaggtcctattgagcgattctatttggtgactaactggttttttaattgcagggacctcgtatggttcgtgatgtcttccgtcttgccaaggaaaatgctccagctatcatcttcattgatgaggtagatgccatcgctactgctaggtttgatgctcaaacaggagccgatagggaagttcagcgtattctcatggagcttcttaatcaggtgagaacaaataatgaattttagttgtaattcagatcttatgttgtagaataatggattttagttgtgtccttaacttattgtgttgaattcgatgtagatggatggatttgaccagaccgtgaatgtcaaggtcataatggcaacaaacagggcagacactctagatcctgctctcttacgtcctggaagacttgatcgtaagattgagttcccccttcctgatagacgtcaaaagaggcttgttttccaggtaagttaattactacaagcacttaaataactagttaaagagatatgaaaccaaatgttttctcaaaagaaagttttgactgatatcttagtttctgtcttattgattggtttttccttgtgtaggtatgcacctccaaaatgaaccttagcgatgaggttgacttggaagactatgtttcacggcctgataaaattagcgctgctgaggttagtttattttgcttaccattctattcttcccgctatagtttacttttaccatgatatatcctccagtgtttctgggtcaccacctaatgatgttcttcaaaatatgcacttgagcataatcatactgtttcaagcattatgtatgaatgttagctgagtcgtttgttaatcattgtcctgaactgaattgttgagaaatcaattgttggcagtaatatggtttgattttatcatgtacatgggaattgttcctaaaaagattgcatgtaatgatgatagttattaatgacactattttgattttatgttgaacaatgcagatagcagcaatttgccaggaagctggtatgcatgcggtgcgaaagaacagatatgtgatactacctaaggatttcgagaagggctaccgcgcaaatgttaagaagccagacacggactttgagttttacaagtgaagagaaagcagaagtggaaccagattatggctgttgttaaaattccagtgtgttttgagaattattaaggacatggaatcaaatttgcagttaaattaagaactaagttgcatctcctaatttctgtaactcgagttcacatttgtttttagtctatcagctttttacagtttaatgtataagaaaaactggggatggtgtccttagaattgccagagcatggtaataattatgtctcctctgattaaaaagacaacaaaaatagtgatgatattaggagcacgctgcactgctcaatgttcatagaaaacttcagacttcaataatgcctaaatgtgttggatcttgttttggagttggtgatagatgatgaaatgaccagtattactattacatagtatccgcaaatcaagaatgatgcaaatcaagagaaaacagtagcaagagtggttggacaggtaagaactattaccatatctaaatgattactttaaaaataacaacttggatcaagatggtttttgttttcatgtatttgtcattttgctatctcataagaatcttaagcttggtcagtctctgggtctctctacattagcgtttgttgcggtgtttacacaccaatatgatttgatctaaagactccttttgaagactgtcttacccttaacgaatacgcctcttttgtttaacttcaccacactctctctctctttcttcttcttcttcttcttcttcttcttcttcttcttcttcttctccactagtccccacatacattgccttttcttctttcttctctttcaccatttcaagattgtgttatagtccgctcaatgcagtagagtgcagaggtctgagcgctccatctgcataagttcttcttcctctattgctgagttcttcagtgcccacaattttcttacttcgctagcttacctctctactcccaggttctctttctctcttcttcttctttttggtttttgtatttttccttttaactttctgtaattgtctgtctctcattgttgggaattatacttaaaaatcgccattttctccggctaggtgggtaggaaactttcaagactttagatacaggctagtgacgtggtatattagttccaattcgctggctacacgttgtttgttcaacaactccgataaaaatcagacactcaaaactcatctttatttacttagtgacattgtccacatgatggacagacctctgcttctttctctagtgacaatatcttttggcaaaaggagtctgcttttctttgctcatcaaagttttgtgttaaagtttggctctttagctttattccttttgcttttttttttgtgctggatgcttcaatctcttatcttagcctcttggattgtttaatctcccaatgataaagataaagataggcaatggcatactttttcttgaagatctaactagtatctttatttgttttttcttcccatctgtagttttttatataactgatatgcttttttctttcacaaccgaatattagttatcaactttcaatgttgtgatccaataaatgaagcttgcttggccagttccttagagatacctgattagcttagctttccttgctgctgcatactggcttgtgtagtggaagtcattgcttatcatcttctgcttttcttttggagcagggtcaagaagtcaagctgatgatgcagttccatttccagttttatgttggtccagtatttaccttgagaccgtcaaaggggttcttgtctacttgtcttgtctctttcttgtttgtcacaactactttctgctcttatgctattgccgacctgaactcggataggcaagctcttcttgcatttgctgcttctgttcctcatctcagacgactcaactggaattccactaaccatatctgcaaatcatgggttggcgtcacctgcacttctgatggtactagtgttcacgctcttcgccttccaggaattgggctcttgggaccaatccctccaaacacacttggtaaactagaatcactcaggattctcagtttgagatcaaacctcctcagtggtaaccttcctcctgacattcactctctcccttcactagattacatctatctccaacataacaacttctctggtgaggttccttcctttgtgtcccgacagctcaatatcttagatctctcatttaactctttcaccgggaagataccagcaacgttccaaaatctgaagcaattgacagggttgagcctccaaaataacaaactttctggaccagtacctaatcttgatacagtaagtctgagacgtttaaacttgagcaacaatcatcttaatggttcaataccctctgcacttggtggctttcccagttcatctttttccggaaacacattgttatgtggacttcctctgcaaccctgtgccacctcctctccccctccttcgctaaccccacacatttccacgcctccattgccgccatttcctcacaaagaaggttcaaaaaggaaactacatgtaagcactatcattcctattgcagctggaggggctgctctgctgttgttgatcaccgtaattatattatgctgctgtatcaagaaaaaggacaagagggaagacagcatcgtaaaagtaaagactttgactgagaaagcaaagcaagaatttggaagtggggtgcaagaacctgagaagaataagctggtattctttaatggatgctcctataactttgatctagaggatttgttgagggcatcagcagaagtactaggaaaaggtagctatgggacagcatacaaggctgtgttagaggaatccacaactgttgtggtaaaaaggttgaaagaagtcgcagctggaaagagggagtttgaacagcagatggagattatcagccgggtcgggaaccatcctagtgtggttcccctccgtgcatattactactccaaggatgagaagctcatggtttgtgattattaccctgctggtaacttatcatcactactccacggttagttttcttcctaccttcgtttaatggtttatatttacctcgttggtgtacttaagaatatcttgatttcgatgccatgacaggtaaccggggaagtgagaaaacgcctcttgactgggactccagagtaaaaatcacactatcagcggcaaaaggtatagctcatctccatgcagctggaggtccaaagttcagtcatggaaacataaagtcctcaaatgtgattatgaagcaggagagcgatgcgtgcatttctgattttggactgacccctctgatggctgtgccgattgctccaatgagaggtgcaggctaccgcgcaccagaagtaatggaaacaaggaaacacacacataaatccgatgtttacagtttcggtgtacttatactagagatgttaactgggaagtctccagtgcaatcaccaagccgggatgacatggttgatctcccgaggtgggtacagtcagtggtgagagaggaatggacaagcgaggtgtttgatattgagctgatgaggtttcagaacattgaagaagaaatggtacagatgctgcagattgctatggcatgtgtagctcaagtgcctgaggtacgacccaccatggatgatgttgttagaatgattgaagagatacgagtttcagactctgagaccactcggccatcttcagatgacaatagcaaacccaaggactccaacgtccaagtttaaatcaccccttggatctcattccctttttatctatgtttttgagtttgtatgtcttataaggctttatgttgattgtttgaacaccactcgcctgagtaataccgcagttggaggcgcggtaacatttacatagcaattattattgtaggctcctttttctgtatctcataatatatatgaatatgattcagttttatgcaagctaagtaagtatccaaaagatggatttaaaagagttccagagagacataaatatcagggagaaagagatgaggctgcttgaaggaggaattgatagagttcttgaggttgggagaaaaaagcagagtggtcactgtccggaagaaggaaggtgtgagcaggaggccacagggccaacattacctcttgaagaactggttcgaacaaatggtccttgcctgtcttcacgtacactcttgggattttgtcagtctctggagctcccggaatatccattatgcctatgaatgccatgacaggggccggacgcagaagtgtggttgccagtgtgtaatcctgatcagaatgaataaatgaatgatgatgattctctacaaaaaaaattgaggcagagatgagaacagagttggtaataaaggacacacctccatggggctctcgttgtaaaacttgtcccgaacatactcaggtttcatcatgatgcttgttgggagattttgtggtccatttccgaaagtaaagtcccatatcttctcagtttcctcctctatcaatcctgaacatatcttcattacatttttgagtctttcaggaatcaaggtaccaggtttgaccatggctgctgcgacgtaaaccgccaaggaaactttggaaggaaagaggcacatggcagccgtcatgctccctcctccaacgctgtggctcacaagaatgaccttttgatcgttgggaagttgggagaggaaggcatagagaggctcgtcgtagtcatccaaagaagagacagtgtttggatcagttgggttgataccagcacccttgaggtctatacatgtagccttatgtccattatccctcagtgaattagccagcttgtaccaacaccatcctccatgccctgcaccatgcacaaacacaaaatgatgctcactcatctttaatcctcttctcgtacatcacattccttgcactatcttttgtagttagtgtgatatttctgtatggctgtaatgttttcatgatcatgatcatgttctttaaatgaacgatgtaaacggcagctttgtccaaaactcacaaagattacatctaaaagactgccattaccagtctttgatgtgtactgggtcaactttgaaggcccaaacacatattctatagtgaggcccaaatcaagatagataccgtcttcttctttttttaatttcttaagaaaatatgtaccgtacatgttttttgtttttttgaattgagatttactccttcaactaatgagtccacaccactgacacttcttattttctacgctataagttttttttattgagatttctagttttcaaaaattacataagaagaatagacagtgaaactgaaataaagactcttacatgttgcatctatagatttccttttaaatataaaatatagattttaatatgaaaacttgatagttacaaatctacttaattttaattatatgattctaactagaagatattgagatttgcaagataatattctctatttgtgtgtatgaaataaaacagatttttaattatatttattcaaaaagtctaatagctctaataacatttgttgaacaatgtctgtttggtgaaaaagaaattaaaatcaggtgttgacaacttcatgaaaaagaaatgtaatctaaaatctagtcgcttacacattggcagaataattttctttgtgtttacatcatcttcatatatcttagagatatctctttataaaaagttatagtatatatattttgtttggtcaacatacgtaattttatatcaataattaatgatatagaatgacattttaaatgcattaaatttgaaatgaaatgaaaaagctagagaagtggagcgccacaaattgaaaaggtgatagaaagtgttggcctctcgagactaattaataacgtggattactccaaaacccttaaaagtattacatttaggaaggagaaaagccatttcaagttttcaatgactgtataaatctgatcttttgactgcatgagccttcaagtattcaaatggcaacagaattaaaacgagagagaaatagtcacgacggccattaatcttgtgaatggtcggttttgattagtggagaaggagaggtcaatgactctctataatacgattctctcaccacgtggacacagcggaattagtcccttaattacatattttaattacagagagacaacctaatcacttggccacgttgaaattgctaggtactagttaagacttgttccgcaatatctgtcttaaaggtaagtgtataaattcatttgactatattttattttcacggtttttcttcattctaaaaagtagtttcatcttcttccctcatccatcatcattcatcatcatatcttctacttcttcttcttctcaggttctcttttttgtcctcttttgtgtaaatacgttttgtcatgattctctgtgaacagtaccgatcgtttttttttgggattagcgaaaaataaaaataaccgacgttttttgtattatttgtctgacagacagaatctgtattattttgtcatcttttttcaatagtctcatgattgtctcttgtgtgtttccagctttcccatagggtccattgatttttgcagccatggattatgatctggtacataccaaaaccatcaaaagtttgtctttcttcataccaaaaacaaccgaattctcattcttgattcttgtttttttttttttttgccagcttcgttccaagaagagtatcaaacgcgtagaatccaccaaatcaaatccatggtggtgggatagtcatatcggtctcaaaaattctaagtggcttgagaataatctcgatggtgagtccattcacattatgtcgttttcatgtaatgaaaataccttattaggcttagggtttcccaaattaggtggttagtcttttttcataaaggaaataaaaaatatgccaagtttatgttttgtgtgatgattatgatcagagatggaccggagcgtgaaacggatggtgaagttgatagaggaggatgcagattcttttgctaagaaggcagagatgtattaccagtcaagacctgagcttattgctcttgtggatgagtttcaccgtatgtaccgtgctttggcagagcggtacgagaacatcaccggagagttgagaaaaggctctcctttagagcttcagtcacagggctctggtctttctgacatctctgcttctgacctctctgctttatggacctctaatgaggttaataggttaggtcgtcctccttctggtcgacgtgctcctggttttgaatacttccttggcaatggaggacttccttctgatctttatcacaaagatggagatgattctgcttccattactgattctgaacttgaatctgatgattcttctgtgactaattaccctggttatgtgagtataggctctgactttcagtccctaagcaagaggatcatggatcttgagattgagctacgtgaagccaaagaaagacttaggatgcaacttgaagggaacactgagagcttgttgccgagggtgaaaagtgagactaaatttgttgatttcccggcaaaacttgctgcttgtgagcaagaactgaaagatgtaaatgagaagttacagaattcagaagaccaaatctatattttaaagagtcagcttgctagatacttgccatctgggttggatgatgaacagagcgaaggggcagcttcaactcaagaactggacattgagactttgtctgaagagctgagaattacaagcctgaggcttcgggaggcagaaaaacaaaacggtatcatgagaaaagaagtcgagaaaagcaagtctgatgatgcaaaactcaagagtctgcaagacatgcttgagtcggcacagaaagaagctgcagcatggaaaagcaaggctagtgcagataaaagagaggtggtgaagctgcttgatagaatctcaatgttgaagtcgagtttagcaggtagagatcatgagatcagggatttaaagacagcattgtctgacgcagaagagaagattttcccggagaaagcacaggtcaaagccgatatagcaaagctgttggaagaaaaaatacaccgggatgaccaattcaaagagctggaagccaatgtgcgttatcttgaagatgagagaagaaaggtgaacaatgagaaaatagaagaggaggaaaagctgaagagcgaaatcgaggtgctgacactggaaaaggtagagaaagggagatgcatagagacgttaagcagaaaggtgagtgagctagagtcggagataagtcgacttggaagtgaaataaaagcgagagacgataggactatggagatggagaaggaggtggagaagcagaggagggaactagaagaagtagcagaagagaagagggaagtgataagacagctctgtttttcactagactactccagagacgaatacaagagactacgcatagccttttcagggcatccaccaacaagaccatcatccattcttgcttcttaattcttgtgtacagtatatactctttgtaactttgttggtgatactttcacatatagggagctgttttgagattggtttgtggaaaagaaaaagctcataagatttgtgtttgatattagctatgcattatctagtttgagttctgaaactggaataaagcatagaaacgtttcaagtgtttacaaatactactgtatatgacttttggagcattgctcaagaaaaatcacatacagatgcatgtaaataagaaataagagtttcattttcttattctgaacaataatcataagtaatgtggctgtgctctgtacagctaacaacccggaagagaatgcttacttgagatgttcaacgtcctgcaaaaatcaaacttccccaggaagcatagtatctaccggaccaagatcacagtaggcaatgccctgaaacacacattcataaagcaaccaaggttagtttctatataaattggctttgtctgaatagacaagaaagatacgtacctctccagtgaggtgtgcaacacatctcttctcagccaacagttccgcttccgactgcaatattttcatgtctcagttaaacttctagtatttagatacaaaacctgaaaaagattaatctctaagaaggctataccttggcgattcgttggcgaaggtagtcatcaatttctacatccttgacaagttcataatctccatctccctgtaagcaacacacaattttgagacttacctctagagaaaggttttaagtataaggatagaacataccttcgaccggcatggcatactgaagacaaggccctcttcaataccataaggatttccatccgtgtacacctaaatttacattaacacaaccctgttaaaacttgaaccaatctatcttattgttatccaaatgagtgtaaaagaagatgtaccccagtcgaaaaccaatcaccctcaggagtaggagttacaagagactttatagcatcaacaatggaaacagcagtagaagcagcagaagatcgaccccatttctgaattaataacccacctctctgtaaaacaaaacgcaaacttactcagcaaaacattatatctcattgcagaaatcatttcattatcagaggaatcgccatcttaccttctgcacactctcagtgaatccctcttctaaccatttgtgatctgtaataacctccttcacaggcaggccattaattctggcatttaagaagtctggcacctaattttcctctaaaagattagagaaacatcccaagataaatgtagagaatagatgacactagagtaagataaggcaaacctgagtcgtggagtgatttccccatatggtcatattagacactttgtcatagaaaacaccggctttaagagcaagctacaaaatggaaattgtcaatcatatgtatgcaaatatattgcatacaatcacatataggtgtgaaatctagtacctggcatttggcacgattttcgtctaacctcgtgagggcatggaagttctttgcaggaatgttgggagcatttttaagacaaatcaaggcactgaaagaacacaaaatgaggtaaagtatacttccaatgtttgtcactgattacgatatgaagagggttgaattaaggaatgtagcttacttggtgttgcaagggtttcccactacaagaaccttgacgttaggagaggcagctttgttcagagctttgccctgctcagcaaagatttggccattgatgtccaacaagtcagcacgttccattccagggcctcgaggttttgctccaatcagaatagcccactccacatcttggaacacttcatttggatctgttcctatatcaacttctctcaacaatgggaacaatgaatcctccagttccattgcaacaccttcaagagcttgaattgatctctctgatcctagcagtttcaatgcaatgggttgatctggaccaaatacttcccctgaagcaagctacacacccggaaaaccaaagatacataaaataagaccaattattggtaaccttatcctataaaacagtaacttaaaggattaacttactttgaagagaagatggttagaaatcattcctgcagcacctgaaactgcaatattaattaacttcttccatgatcttgtctcttcttcctggcaaacacacacataatactattatatccatgtaaagcagaggattatctcaattctcaagtctcaaagataagattcttttatagaaaaatagtaagagggaatagtaagatacagctttaagatcataggtgaggcagaacactccataacactctttcttcgtcttcaccaatccattttcttgcacagcaacaggagcttggctacttttatcatcaattcacaaaagcatctaagatcagataaagttgatttatttaagagagaagaaacgattaggagcttaaagagacttacttttgagaaacggagcaagagattttggagttgggagttgttgtgtggagaggtggaagaagaagatggcgaaagtggtttgaaaggtgcaattttgaagagagacgaagccgagacgaagagttgagaaaaggcgacgtcgttttgggggttgagagctctgccatggccattatcgcacagacacaaactgtgaaagtgagatttcagaactggaactatggagagagagcgcgccaagcgacagagtagtaagaaagaggattggggaatctatggataaggctcagctcttgacacttgtcactcttttagcatcctcaccgtttatcttcttttgacttttaggcccagttaaggcccaataacagaatatacctgaaaccgttcgaatttgatcactgatcggagattttcgtcttcgccggcgacattgcatccgctgaccagagaattaaaaaagttgcgactttgatcgcgaaagtttcaataatggaggtcattgatcaatgggttgctgaatttttcctccttcgacaacacaatcctagggcttcccctattaatctgatttcggcgctaaaattaggagattcctccgactgcataaagctcaagatatcttccgtcttgcgtgacatctccaattcattgatccgaggtacgattgatgagggaatgctcgatcttctcgagattcttgagaagcttctcttgcagcaacattcgctactcatggattctcacaagtctgcttattgctggacggctactgagtgtacgcttagatttatgtggccaatgtttgcttcggatggtttgttcaccgatgcgcttgagaggatatggacgaagaggattgggattttgaaggagagtggtagcgatttggtgacttgtgacttgttgaaatgggagagtgatttgaagaaggcccttggagatcctgagctctatcagcgaattcgtgagactaacatcaggtacactgccatttcctttctcactcagcttctcaaagaacagtgggcattacttgggagttcctctcttgaatcagtagctcaaagaaggtttcttaagcgcaaggctgtgaacgtagagggtgatgttgttgacaacagaggggatcaaagtgatgttgatgaaagcacgagacgttttgggagtgatactattgatatcgccaacgaggcgcgtggtgaaagggaggacgggaatgggattggtagagacaacgctaatgatggtgaaggaatggaatgtctggagaatgatgggattgataatgtgaatgcagcagacgaggagcacacagtgagtgcacaagatcaggaacatgagccaagtcttgataagggagacgaaatggctgctcgagagctgaaggaatatttagtagagattcaaggacacatcgacccttccactaggcaaggggaagaacctaacagtgcaattgatcactcagtagatgtcactcctccgcctactcgggtgaataggactggaacaggctgtcaagaccataacgaagcatcggtgagtgttagtcaattttccctcaagatgctttctaaaaatcttgttctttggttcatgaatttgtggtttaattgtgaaaacaggataatgtaaatgagaaaggttcggatagtcaggaaacatggtctagcagagttcggcctcgtcgaccaacccctgtaactctgagtgtatctccattaaagaaaggcggattggcgaaaccacatgtcaggagaccaaagaaattctggaagccagaagaagtggaagctctgagggaaggagtaaaagagtatgcaaacactctttgcctagtcccgtactctattatcaatattcaatagtgatacatcttggacctcattaagattataccactggctcattttgttgttgttgttgtgcaggtatggtaaatcatggaaagatataaagaatggaaaccctacagtatttgcggagaggacagaggtgaacatttccttattaacattcatactcaccatttacttgaacaagatatatgccaagtgtgagtgatgtaaatgttgtaacttggtaggtggatttgaaagataaatggaggaacttagtcggtgggtagaggtaacatcttttgtgaatcttgtgctatatgttttaaaatgctgtagagttatttacctttgtgtattgtgatatatcaactgtggagaacatggtggagaaagggccattcccatgttgtgtggtgaatgataatgatgaatgagcagaatataattatatgcttgtgggaaaaattctggctgcaacctctgtagtcagtcagtgtcaaacttatacggcttttcttgttttagatatattccatccttatcttcatttcctaattcctaccatgcttccctctctccttttccacgtgtcaactaacatctaaaccagaacaaaacagtagtcaaaaaatgcataaccattttgatctatgatattgcctgtcaaacattcggaccctccttagatattgcctgttaacattcagaccctccttagataaaaagcgaagtaatatgatgggagctctcatgcacatactttattggtgaatgcatatttgttacgtgttattagtttattacagaaccgtgaactccttgagggctgcaggaactggccgccaacaaaaacaaaacaattttcaacggtgatgtcactatcactctattctctacaacttcttgtcatgttccccacttctgttctgacttttccccttttctttgtcgttttatttttgttaacctcaatctatttattttggattgcttgtgttcaccaaactaataattggttcaattgaaaattgtgcagtttcctcaagaaacaaaactctttcctgaatatcgcatttcccagtatccacactttcttaactcttatcctctttgcaattgtgtttgtggttcacaaaataaacaagggcatcttttgagcatatttagccatgtgttttcaatgtggtacacgtttgatgatttttttttcatttttgtggtttgagtatcttgtattggcaagtaagatttgtcaaactttcgatttttagatttacaattgggtcaataaaaataaatatatgattttctataatatatgtgatgcaagcaaggttaaggcaaattgtctttattctttttatcccaaatgggtgattgacgccaacgactgttcaacatattttctgctgacgcttctttaatgaagtagcacgaagaagtaaacaggacgacttttggccaccggaaaatttctctgttataaaaacgaaagtctgtgtcctcttaaacatttttgggatcatcaatcggtttttggtcaaccatgaatatgaatcaagttgcagagtatgtggaaactgatccaactggtcgctatggacgtgtaagtaaggagacagattctatgttcatggatcaaaaccttgttgtaacacttggttttttatgttggaacagtttgcagaaattcttggaaggggagcgatgaagacagtgtacaaagcaatcgacgagaagctgggaatagaagtagcatggagccaggtgaagcttaaggaggttctgcgttcctctgttgatctacagaggctttactccgaggttcatctcctcagcactctcaaccacaaatccatcattcgtttctacacttcctggatcgatgttcataaccacactctcaacttcatcaccgagttgttcacttcagggaccctccgacagtaattcgcttaaacctcttcttctgacaagattattcagcttttgtcttttatgaccctgtcccgttcatatgcagatacaaaaataagtacttgcggatagatatccgagcaatcaagtcctgggctcggcaaatcttggaagggctagtttatctccacgagcacgaccctcctgttatccatagagaccttaagtgtgataatatctttgtgaatgggcatcttggacaagtcaaaattggtgatcttggtcttgcaagaatgctgcgggactgccactcggcccatagcatcattggtatgtctcaaaaatcgtttgttttcacttcttgtccaaatcatatgcttagacctctttgtgtttcttttgcataggcactcctgagttcatggcaccagaattatatgaggagaactataatgaactcattgacgtatattcctttggtatgtgctttttggagatgatcacctctgagttcccgtatagtgagtgcaaccatccggcacagatttacaagaaagttgttggggtatgtcttacaatctgtgagcatataaatgaagctgtcagatgaaccaggcatgagtcttctaatgttctcttttcagggaaagctaccaggagcattttacagagttggagacatcgaggcacagaggttcatcgggaaatgcctcgtgtctgcctcaaagagagtatcagcaaaagaactattgcaagatccatttcttgcctccgatgagtcctggatggtatacacgagcggtgctgggaatccaaagcccttcttgaacgagaatgaaatggacacactgaagttggaagatgatgagttaaggaccgagatgtccatcgctgggaagctgggcgctgaagataacaaaatcgatctggaagtacaaatcgcatatgataatggtaaatgggactaaattgattaagctggtcactttgttattcggtcgcataattgtttttttctttccaggtctggccaataatgtattctttccctttgacatcatgaatgatacttccattgatgttgcaaaggagatggtaaaagaactcgaaattatagattgggagccagtcgagattgctaaaatgattgatggagcgatttcttctttggtgtctgattggaagtatgaggaagatgatgaaacccctcatgatcatcatcgtcatcgtaccgattcttttcactcttcttcctcgcacgcgtcatcttcccaagcttcactctcgaactatatggctcgaggccttcaagattgggtacaaggtatggaaagtaacaccagtctcaacgtgcatagtgtgacaattgtttttataaaagtttttgagatagaaattaaaattgcagatgatttacacgatgagacgtattctcagagttcttcccattcagggtcttactccaacctcaactacatagctgttgatgagtacagctcccaatctcctgttatgagcagaactcacaacatgacgaggttttgccccgaagaaagctctcatctacagtcaggacaagccaacgcgtatgcagcttccagttcaactaacagaagcttggcttcagacaaccgcacacttacaaggaaccgatcacttgtagacgtgcagagacagttactgcaccggtcgccaggggaagaggctagaaaaagaagattgttcaaaactgttggagacgtagaaacagttgggtttcagtcaccttatgcggtttcacggaagccaccaagctcaaggcgctagcttctccagtattttaattactgtaatatataagtatactgtaaaaaacaagtttgctggttcaaaaatgtaaaaagtacatgtgtttaataaagttgttcaaagggtgtgtttgtgttacagagaaagagtcctcatggtgaaatgactcaaatgtaaccatctataccagaacaaacagtagtcaaatataaccattttatctatgcatgatatagcctgttaaaactcggatcctccttagatacaaagctaagtaagatgatgagagctctcatgcacatatatatatgaaatggttgatgccatatttgttgtcttattattagatatcttacaaaaacatatgtgttatgttttaatgacaatttagctgacatagaaggatagtttaaagtttctaggtacggtcttgtcaatgcaagtgatagatgagcttcaagtagatgcattgtaatccaagccacggagaaacgccatgtagtctgatttgcctaattcaaagtcaagtaaagctgctattgggtcgacatgtccagctccatagtagagtatttattagttgggtttggctttatccacaaaagctcattttaaaccagaacgatctagcattttggcgtttcaataaaaaaatattgcgtcgctttctattttcatcggtttattaagggtacccttttattaacatggaaccatttttctttttcagggaatatcttcttctattgtctattttttataatgaacgtgtaatttgaaaatccttaaaaatgtttttataactctttcaaaactcttaaaaaatccttgtaattttttttaaagtcttttaaagctttgtaaagttcttaaaaatatttgtaaatcattttaaatccgcttaaaatctttataaagtctttaaatacacatgtaaatacctttgtaaatctttggaaaaaaaactctaaagtctttaaatacacttgtaaaatatttgtaaataatgttttaaaagattttataagacttttaaaacgatttacaaaggtttttaaaaaccttgtaaattcttttaaaaactcttgtaaatcttttaaaaccattgtaaaaggttttacaaggattttaaaatatttacaaaggtttttaaagtatttacatatgtatttaaagaatttataaggattttaagagtttttaaaatgatttacaagggcttttgacaactttacaaatttttacaaatttcttttaagagtttttcaagggtttttcaagagttctttaaaatttacaaagatttttaaatgcatttttgggcgggaaaaaaagttggtacggagaaaaattttggcaggaaaatttattgggcgggaaatgttggtcattttgttcgggaaaatttcagattttgtcaactttaaatatcaaatagagtataaaatctcaataaaatcaaaaaaaaatctgaaattttcttataaaattgtgtgtgattatggaagatgagttctcgctttctactatcatgaatacaattgctaaaatgaaaaataatatgtatttcatgcttaaagcatgtgaaagatatgaagattttatttctaaaaacaataataataataataaagttatgaagattatattcatcataggtctaattaggccgttagtggagatgattttgtacattttggaatttgagacatatgaagtaaaccgtataatactttactttattgaccaaccacaactaatattggtcgtttttatcgttattgctatattagtctagtcgaccactttatgtgtgttttcacttgaaagaaaacttgtattgtattataactcccgctatttatttccataatttatacttcaaccgcattgtgaaaaaggttataaaaccaatttttagaattttgcatcacaagtcagaagcaatgagaattatatttgtttttgccaatcgttacaacggtgatggtgaaagttggagcagaggagtcttcgttttgcatttcaggtgacatgagtgtaagacttaacacttttcgaactgagacagtctttgaacccttgttaatcagagaggctattcccactagccttagatctctctcccaacctgaaccattaaccaatctccagcaagttgtatatttagcaaaccaacggaaaccctctgagcgtgttggaaggtttgactttgagaaagaggacggacggtggtgcaaatcgccggagattttttcagagattgaattgtgtgattattttaagcaatgttttatgttcagaggtggatggaacatgggtgagcccaaaacagaacacactcctctgtaatattaacaactgaaactatacaaaaatggagaagattggaacatgtaaccatgcatgatgtactcagagagagatagagagtccttgagtcaaatgtaaccatgtattctcgaaagccttgatgataacgtcatgatactcgctcgaattcaatgaaagataacatgctagaagatcttccagatctttctgttccctcatcttgttctccataatcatctcaaccatggattctctgaaatctttctcaggatccaccgaagacagaactatcgcaaagctctttacaaccccctttttcttcgatacctgggacgttctttcctttttcttctttctcacgatcttcgtgggaatctttatccctgacgaatgagctttcggtttcttcagtttctgctgtgtcatcatctcaaagggtggttcctttgcagtctcaggactcaagtttggtgaaactgaaggatcttcaggcacatcatcaagcttcctcacagagagctcgtccttaatgtcaattgatgaatgcggttcaggatcatgtacaaagttttggtcagaaggagatgatacacgatctaagaagcttccaacggcggaatcggagattgcatttgcagaggatgatgacttagagcgatgatttagagaggaagaggtagagagcttgagccttgaggaaggcttgtaaacggttttacgtttgatttttctcttgaaagaagaagatttgggaggtgaattagaagcttgaggatgatgagcagtcgaagaaagacgtcgaagagggtcccggagctttcttgaggaagaagcatcagcggaggagagatgtttgggagaagaaagatggtgttttctgctacttctgctcatccctttgagcttatagagccatgaatgaggcatcatgtctgaaaatctgaacttgtgagtccccattttctgtttcatctctcaaatattttatgagctctgtcaaaaagaaagaaagcaaaatgaagttaaagataaactaatgggcttaaatctaatctagagggtgtccatccactatcttcttttcttatgctttgtccctttcacaagagataaagaggttaatcaaagaacaagggtttaattgatttggctccttgaagcattcaaaatcgatgagtggcttccatgtcaagactaattccaaaaccaacaaagcatttcttttgtagtggcctaatgggtaatggcaaccattataggtcccccaaatctcacatctctcctttttttcataatcaagaattttataaagaaacaaacaaacagagatttatgaaattgatatacttcacttagcaattaattgtggttggatcgggtagtcatggatcccacaattatgacgtggactccacactctctttgatgaaaagtttcaatgaaaagtttgataaatctgaagaatttttgttaattttatatgaatcttgaaaacaggaaccatatccattttctaattgatcttatcgagtagtttggatcctgagtttgaaggttttcttgagaaatatgggtattagacattacaaaagattttagacaaaacaaaaaaagacattacaaaagatcatatgtaagcagcatatttactatagagatttatcctctcttttttttctatcgcctaacaattatcatttgtttgcagcaataaaataaaataaaattatctgaactcattgccaaagctaatgactcaatagaaaaaaaagacaaagatgcatgacatgattttgtttcattgtaaagactcacaagctataatttaagttgtcatttcatttgtacgatatttctgtttctttcaaacgaccgattgatttttttgggaacgtcatgtttatcttacaaggtgtccaaaaaggtaaatatattactattttctgtttttcgaatttgcatttctaattttaaaattgtaacttttatctcaagtttatctataatgataagttatctaaaatattgaatttaactgaaaaatatcctgttggaatttgatcgaagttttttctttttgctgtgtatataattaaactgttgacctacactaatacatcttctcacatacagctaaaaatatcaaagaaattaattttgaaaaaagtttttcttttcttttttcaatttaaatatcatataaaatacattcaaaagaaatctgaaagaattagaaaaatttgtacaaaaactcttccgacttatggaatgagtgttgttcattctcgctaactactatcatgatacgattggacaaaataaaaataaagttcatactaagacatagctcattatcttactcatttgaacgttaattcactcctttttaagatgattaaaaatagacttcatttctgatatgcgatgctaagcagaaattgagggtaaagaaagctaaaatgataagtttttttaaaacattttgtacaatttatgacctcatgatttttattgacaattaatccatttcttggtctatttatgcagcaaattgatggtgatagtaatggaacacctgagttttgaaaggtaaataatttgttcaaggcagttctgattattgttactctttgtttacactaattagtttcgtcttcaattctcaaaactctcacgactcttaacaaatagattataaatgagtttcttaacatccatcatctttttcctttatattgaaactaggatagctgcaattgaaacagaaattgaaaaaagcaagcaaagacaccaagcaggtatacagtgtgacgaaaagctacaattttcttggaaggataaacctcatttgtttttgactataagcaagtggtctgtaagaatctaatatcatttttatgagttgaaatttgatctatttgaattagttttcaaatttgatctatttaaattacttttcatttttattttttgaactaaaaatttcctaaaccggaataagtgtttgtggttcgtctgctattacaaaagattgaagccaatccaatacatatgaaaggtgaaaagacaaacgtgccctcctcttcatccaccctaattctctcgccgcctctcatttttttcttttcacgtttttttgttgttgtgagcttcttgttgggtttaagactgttttcgtcagcaactaaaccctggtatccatttcttccaattatccaagcttcccctcaaaggtttcactttttcgccattgcttcaaccaaatttattcgtgttaaacggaatcgatgctgttgtgtggtgatttaagttggtagagttctacagttgtttcttctgtttcagcacgattatcacagaatgtctttagatacttctttaggtcttaagctcaagaaaaggctgaagctttcatcgtttagctccaattcttcttataaaggaaagagtagatccattactcaacgcagtgatgatgacactaactctcggaagactacggtttcgtctatgaagaagaagagggtctaccccaataaggctaagcataataaccatgtgaatgaaatccctcgcacgatgtgggttgcttcaaagagaaaccaagggtctacttctagttttaagaccgctaatgatgctgcaactagtgtgtttaaaacaaagtcacggagtggggttgatgttactcgaaagagctacaggaagagagatgaattggatagtaatgtagatgtgagtcccagggaaagttctgatgtgccgtcttttaaggctagaaaacaggtgttttcagagaagagagttgtgggagatggttcagatgttcaggaggataaaccaaggaagagaaagaggatacgacttgatccttatgatacctcaaataaaagaattgttgatgatgtccttcttgatggttagttctttgtgttgtgaaactgttttacttgctacatctcattgctgctttactaatttgctgtttcttttccttttttcagatggccttagagtaaagaacataaaagatgcagttaaaagtgtagaaatgtcgaaaaatgcacagtttcgtgcaattcagcctagtcattcgatcctctcctatgtggaagaaaatgtaatttatatgactatctctcttatggtgtcttacgtgatattttcattagatggctgataacatacattttacgacagctgttggggcgtagacgtttaattgagctaaagagggccggctataacacagagcttcctgctccattagataatattcctcagtcaaccagcacagagagagaacgtatagaagaaagtgtatgttcttattcttcattccttttctctaatacctcaagataataagccttctctgctagactattgagctaatgttgcaattgcccatttgcaggtatttaggaataaattggaattctttgctgctgcaaatgtttcatcttcatttccacctcctgatgtacctgagattgcatttgcaggtactgcgttcaatatgttgttcccaccaggattatagaaatatcaacaaaaaaaaactttttctgagttttagaatatgcatgttaaactactttaataacactaaactatattaaaaagttgggatatttggtgtcttaactctgatcaggaaggtcaaatgttggcaaatcgtctctgctaaatgctcttaccagacagtggggtgttgtaagaacatctgacaaaccaggactgacccaggtattcccctgtctgagaactacttgcttgtatggcgtacatgtttttgtaataacaaagggtttatgaagtgcagaccatcaatttctttggtcttggtccgaaggttcgccttgttgatttgccaggctacggctttgcctttgcaaaagatgaagttaaggaagcatgggaagatcttgtgagcatctacccctggctagagaatgattatgtctaaattgcttgcccagtttcgtgtattactaaacaggttaatgttccccatctgtttaactttgatcaatgcaggtaaaggaatatgtctcgacaagaaccagtcttaaacgggtatgcctccttgttgacaccaaatggggtatgaagccaagagaccaggaactgattaatctgatggagaggtaaaataattgatactgctcttaatttttttttaggtcatgtaatgaagtttccttaaagccgtaaactgaattgcagatcgaatacaaagtatcagatagtcttaaccaagacggatgtggttttcccaattgatgtggcacgtcgagcaatgcaaatcgaagaggtcttactcattatactctaaatgaatatagtgaaggcaatgtataaaaataatatgttggtcatgttcttactaatgtcaacaattatttttctttaaaaaatgcagaagttgaaggcaaacagatcaattgtccagcctctggtatgtatgaatatgattcacctagtttgttgtttacttccctctgtggctgcagtaaaagatgaaacctaagaagcaagtggttaacgttaaatgattgcagatgatggtgagctcaagatcaggagcaggtataggaagtttaagaactgcccttgctaaaattgctaggtttgcaaagttttaggttctcaaagcaatcctcaaaaccaaggtcaggattgtctcttacccctttccatagtatgtaataatgatcaatcaagattcagattcttataaagaattatttggctcgtcttttctttatggcaaaataaaggataaggaagaagtcaaaatgttgagataaagaagaatggtgtgacgatgatgatccgactaagttagtgaaaactgtcaacaatcacttatgtttttgtttgtttattatctttttatttgtcaaagccatcacttgagcaaatgagcataaaatgtttttctcacgttctgacagattaggtttgcccaaaccactaacttttttattttttattttagtcaacaaaaaattatagtaggccaaattattctgtcagaatataatttgttaaccagaaagaaagaaaaaaaaaagtgaacttcaaatataaaataggacatataaggttattaggtatatgaaattgaaaattcgaggtgactttagggaatggcctacctaatttgacacttcttcaacaactccaccctttgaatttttctcttctttacctttttttttttttttttttttttgttatttacccttttttttccctcctcatctctctctcttcttcttcatcagctcctctatctctctctttcctgattgtcttcatcaaaaactggaaaaagcaaatcaagaaaagagaagaagaagcagatgtgtccgttaaggcttatcctcatattcctttcagcgactctcgctggcttcttcgtcctccagaagctcaactctacctctgacgatcctctcgatgattccttcaccgacgctgaacacgccgacgacgattcagtctctggattctccaaggtttcttctttttcctccgatcttcattctctctctgtaatttggggattaatgggtttttctgattttatgggctcaggtgggaatggcaatgaagtctggattttggacatgcgttgacatggcaagtggtcgctatctctggaacaatctctgttcaaatgccaaacgctcttcttgagttttgttactctctatctgtctctctattgtctgtaactgtttaattgaactgcaatcgacggcaccaaatttacatattgtctctgtactatatactatagatcttgtcttcactactaaatctcaataaagtcgaagcctttatcccagtttcaaagagagtggaggatatggcttagattcttgttcttcctgtaatgctgtagagtaagcaattgaagttctcaattcaaaagtcttgccattgagaatttctttaaacgacttctttatattatgatggattccttttttccacaaattaaaaatgtaagaaactcatatacgattaacatcagtgattcagtgttaagcaaaattccaaaaacttgacaagaacaaatttcaaaacttcaatggttcttcctgttcttgttgttcttgttgttgttgttgttggtattctgtctcttgctgtgaagtaagctcatctttctcaccctgccaaacccatacaatatctgacagagcaggtctaagatcctctgctactaatttctgatactcgagagtatctccatttgatttcttcacttccactaaatgaaagtttggcgtcacttgaaatatttctgcatccatcgacagaatcccttttcttccttcttttaatcgttccaatttgaacaaacctgcttctcgctttcttatgctcagtttcaatcgctgtgctacttcctccagcttagatatgatcactgaagcaggtttctgtgatgtgaatctagattctctcttgttatcatctccaaacagtcctgccagatcaaacccagcagacaaggcaattaaatcaaaagcgttcaaatttgtaggttcgtctgtatggttttcctccgtgaccctgtctccgttttcacttggacctgctccattctcacttggacctgctccgttctcatttgtacctgcagtaccagcttccacagagtttatctctttgactcgtttctccatctttttctgtttcatatgtaaaccttttctgaaccaagaactctccctgattcttgcgatggtgattctagtttcagggttagggtctagcatcttacacaacagcctccgtacttctggagcaaaccagcttggtgccttaaaatctgcttttcctatcttcctgtacatctccatcagattggagtcatggaaaggtagatagcctgccaataggacaaacaaaaccacaccacaagaccaaatatctgcttttgtgccatcatagccttttcgattgatcacttctggagcaacatatgcaggtgtaccacaagtagtgtggaggaggccatcttgtctcttgcagtcagcaagggcgcttaacccgaaatcagataccttgagattctcattatcatctagcaataggttctccggctttatgtcacgatgatacacctctcggctgtggcaaaaatcaactgcgttgataagctgataaaagtatttccaagcaacatcatctctcaatttccctttggcaaccttgttgaaaagctctccacctttacaatactccataacaaagtagatcctcgtttttgttgccatgacctcatatagctccacaacgttagggtgtctagcaatcctcataacagagatctctctcttgatctgttcgataagcccaactttcataaccttttccttatcgatcatcttgatagcaacactctggttagtaagaatactccttccataatacaccttggcaaaagtaccttgacccaataacctcccaacatcatatttatcagtcaaaacacttggcttattttccatctaatctacaaacttataacaggctccaaaaaaaaaaaaactacttgatccagagatagctcagagttggaggtagctcatgagtcataacctcatgagctcgtgcagctaatcccctagtgataggaggacacatcctccaccatttctgagtttctatgccgaatatgaataaacctcttagaaacttggtagaattgagcctgtcaagtaaaaaaaaaaacaaagcaatgagatctacttccaacaacaatcagtgtatcgatcaaatctaaactcaattatatgtatcgatcacgagtcaaaacgcaatcatcaatcaaaacacacacacaaattctcaaaccactaaagccctaaaccagaaccgatcattcaggttatataattctcccccattaccgcattacctctatattaaagagaaaaagcatagatcggcaatcagagaaccctaaatttcaacatgtaatcaacaattcgcaaggagaaaacaaaacatatatgatcaagacaatcaccggtgaggaaagaggattctgggaatgaatccgagatctagtagaaagacgtgtagatctctctatccgcccctaaaggccccttctcttccttatttctttctgggtttaccaacaaaaatggaggagaagacggaagaagaagaagaagaagagatgaaaacgaagttaaacgtcattggcggtccacgcacatcaaaaataaaaataattttttaattgaggcagaagagcagaggccacttgttcctctgtgtccttgtctaccttatgactttttacacttgtcctctcattcgcctattcacttttcatccgacggctcacattttgccatcatatatttttatgatagtttgctcaccatttttttttttaatgatattttatctactaatatttgaaaaatcgtagcatagagtttataacaaatcatctactcaactaaatttaaaagttttatttctttcaatcagccaaagtaagaagagaaaaaaaaaaaaaaaaaaataagaagagaatatagacagtaatttataatggaaaactgcatagtcacaaacttttacgtgtttattgttttttatataatgaagatgtattttaacagttgacgaagaaggggaatgcacatgaaaaaacagttgacgaagaggtgattattgagctcaatgggcttgggataatataaaagagaatcattcagttgggcctccgacagttttggcggatctgaccattggatccggtgagggggctgatgtctcccatcttaatcattgcccttgcaaagtcgcggtagaaggcattgagattgtggctgtaagctatgacgagcgagtcggtaggaccattattaaagaggacttggtctgacgtaagcaaaccttttttgctcagaagttgcttgtagaagccgtggtcgaacctatcgggagagcggacgtcaagattggctttcttgttgtctccggagccactggtggcaggacagttcctccgtttagagatggcgaaagaggtgtcgatattgcttgcgttgtagattcggtttctgaatgtaacacattgggctcgtccaatggtgtgagcaccagagagggcgaccatgtcacgtgtggacaaaccttgtgctttgaaacggtttatgaggttgctaagggtagtgatcggaggagggatgactccggagttcgcggccgcgaagttcgccgtcgtagagtctcttcttccaagtttcacgctccaccccggtccacctagctgtttagtcatattaagaagtgttaaacatttagataaatgttggtcggctgaagggtttgtaacaaagggaaaaacaaaaaacaaaaattggtccgtgttcatatgctgtaaaatcgaccaaaatgtaaaagtatcttgttaggaattcgtaaagtaatggtagatttatgctattttggctagatgtatgtgagaatgatttagaaaatcaatgatttacaagaaaatcagaaggaaaaagatgcaagttgcactacaattttacccttctttttaagttttgaaaagggacaattgattaattactagaagattcgaactctggttctagctaggtaaaataaatgaatccgaatcactaagccacttaaccattcaacaattattacatgcatctatgtaagacatgacaaagagtaaaagggtagaggtgctaacgaggagaacggagtcccgagcagtgatggctagaatgtctgcgcatgagacgatgcccgggcacattttctcaaccttaaacttgattttgtcgatcacttcgaaccccctcacagagttattgctgggtcctgaggttttctctcccaaaaaagacggtgtgtcatccaacagtaaggatccgtcacacccctatcaaatcatatgcttagcatttactaagttttaggagtaattcatgggaacatacaaagcatgcttcgtttttgcattgaaaaaaagtgccttacattgacaaaacaatcatggaagaacaaacgaaggagagaagcacccatgcgaggctctctggccacggcccgtttcacgactcgtctcacgacaaggaacaatgatggacagctttccttgtaaaagtcacggttcagctgagcctcggactgtgacgccaacatcattatcatcatcaacaacaccacctttaacatacttctctgcttatcgtactccactaattctctttgcttcttctttttaagacaagatatagctatgagttatgagtcgttgaaggactcagagacttgatgagggctttatagagaggataacttacacgtaggttatttttgttcacgtagaaaagtttttctcgaatatccactatattactgggtccttactccttaattacgccacctttaccatattcatgcatgtttacatttcccttttttcagcacatttcccttttttgttttctaccaagcatatcttattatacaaattaaaactctaatgttcattattcgtcgggagtatatacgttttaaggtgagcatacattattaaacttgatatatccataaccatatcaagatttgcgatatactatataataaacatatatagtaatgtacattattattttagtttatgttatagatagatgacagtaattataattcaaagttgtgataataaaataactaatcaatccacacattggttttgatttgaaagcaaatgaatctttacatgatattaaagtagtagaatatgtgccatctaatttgaatccaaagtggttcgatctaaagttttacatgctaaatttgaagggtttcctatcaaaacctattgctggtaagtgggtttgatccatatccattgataaattaccttggtctcattctgttttcagtgtaggatttctaatatgtgttctcttaaggtgatggatggatcaaattaatttcggatcagattaactagaccggtttttgggtaaaaccaaattcatcatgagcatgtgttaaggatatgatatattgataagttgatgagactaagaatacgaaaggacttgtggaataattgtattgaactcttgtaaatatgaagttacaaaatgcattcattagctagaaatataaccaatatattcaaaactacctacatctacaatgtctgctaggactttctacaacgttgattgatatatctcggttagtgattctgctcgatcaatctcggttttccatctggcaacagttttgtttgatacaataattgtggacatagaggatctgattgaaagaatgtgagggcagataggtcatatcactgggggagcggggaataagtttggcagaagcagctgaccttccaagttccatgcatgcaaccacgacattcccagcccttgatcacctttcattatttatatcatataattaatagttacataaaaaagtatcaaggattaatttgttcaaaactaaaattctatttgacaactacttcacttcactccagaacatgtattgttattgtacttgccaaccctagaaaacaaaaacatgtctaacaccggccgccactaaattaaccgttagagaatggaaataatatataacctacgcgatttttttcgttcagactctaattaatataacttataagtttgatccgtttgtggttcccacacccaccgatagagaaagaattactgattatggcgcaacaactatatgacatgttgtttgaaaagtttatcagatgagaaactaggccactaaaaacgaataatatcatcgttgatcatatatactcgtgacaaaatcaattatctacgtcctacaactcaaattcaagataaacacctcgaattttttattaagtcacagaggaaaaacagtgcgtttgtcttgcaaaaagtaaaaagttgaattttcaaaggttggggaaataaaagtagatttcttttaacatgaaaggaaaaaaaaaaaaaactgatggtgagaggttaacaaacgaactattactaggtggagttgtctatcacttacaatttgcattctagctctctcccaattacttcaatcaaatgtataagaacaaacaaaaaagataaaattatctcacgtggattgttgaaaagttgaaccacgcatatatatatatatatatatatatatatatatatatatatatagtatttaatttacgtgaagggtttttgtttgagattaatcgaggtccacttttgtttgattattaacttttgctggagtgtttgttttaattctgttagttgatcgatcgagtttgttaattattttttcttttcaatttcaatgaagtgaggtccacttttttaggattgagtgactttttttctgtgtttgataatttagagtgacttgagcccatagtggtaacatgggatattatggctttggaaaacaacatgtatattggtagagaaacattctttaaatctcggcaaactctaaacctgtttagtctctcttaatttgctacttagtatattgtatgtacttttctttgttggttttgatgtgtttcgaattcgattctaattaattaacgtgtcggcgtgtcgcaaactcgcaataacatctgaatgatgatgtatattaaactcatatacagaccaaaagtgttcaccggccgtgacgatactttccgtcgggaattaatcccattagaatcgaaagttctcctacacgtacgtaccactagactaattaatggaacatattggtaaaagattaataattaagtagaagagagcgaggagaattgtgggacctgggtaaaacacgacatgttatcaaatcacgacttatcaacacaaaccctattagaccacttctttctctccagtcattttaatgtcatgtatatcgtaatatcaatttcaaacagtttatttctttatatatatatatatatatatatatatatatatgggtgttactacatatatatatcaccaacataacaataatgtaattaggcctacttatagcatagcttatgtataacattactcttttttcttttcttgacacagtataacagtatacaagggtggtaatatgtgggaaaagaatcaaaagggtgccaataatccaaaagcgaccgaacaaattaaagagttgtcaaagtaatatgatgtgattgtgaatgcgtccagaccaatttcaactcaaagcgtacacatatctactgatatacatgcagtgagaccagaaacattatgtttataagttataacagcggacttcaattagaccatcaaaagcacaattatttgagaatttcaaatgtttaatttaaacactatacatttttttcctttgtcaaataaaaacactatacatttattattcaagtgtgatgtgtgtatatactatatagtaagaatgcatatgtctctttaaaacaaaatttacacattaatttataattcacggctttcatgagtcctatcatgaacttcaacagttaaacatagatcgacaaaaaataagagttacgatgatcaatttatgtggagatacaaaaggtaaattattgttgattatgaatgtggttcgtcattgtatcgtactctttctagaaaattaggtgattcatttgttaacaatatataaaatagtccgtcgtgaataatgaatggtcatttacattttacggtagactataatatgtaattttgtatatatgatagaatcttgtaagaaatggtgatatataatatgactacggaataacacagttacacaagtcgtatggtggtcaatgatcatactagctcatctagtcaaattatcgaatttacaaaaatcgtgggctgataataaacaaactaatatatagaggaactttttgtgaatttttataaaaggggcccttcctcttattgggccataaacaaatgggccttaaataagcgaaatgggtgacttgagaggttgagccatatctcatagatatgggtaacatggaatattatggtttaggagaacaatagatattagattgggagagaacattcgtcaaaagaactcaaatctcggcgaaatttaaattgaatagtgaatacgattaaactcgtttacctctattgatctgttacttaattatattatatattatatcgattaaacaatagatatttccggtttaattaattgacatatcgcaataacatcagaatgatgcacattaaaataagaaaaaaacagttcactaagagattattatgggcttaatagtagagactattttagttgggcctgcgacagctgcgacggatctgtccattggacccggtgagtgggctgatgtcgcccatttttatcatcgccgctacaaaatctctgtagaatgcttggacactccggctgtaggatacgacgatcgagtcggtggaacctccgttgaacaagacctgatctgatgtgagaagtcccctgtggttgacaagctgcatgaagtagctgccgtcgaacttttcaggtgtgcggagatcgagaatggcggcgttgttatcgccggagccagttgccgcagggcagctcctccgtctggataaggcaaatgaaaggtcgatgtttgttgagttatatatccggctcctgaaggtgacgcacctggcttgcccaatggtgtgagccccggagagcgccaccatgtcgcgtggggataaaccgtttgctcggaaaaggttaataaggttatcaagagtagaggttggaggtggcaggacgccggagttagcagtggagaagctcgccgtgatagaatcacgtctccctagttttacgctccagccgcggccacccatctgcttagttcaaaaggtgtaagtaagattctttacaaaacaattcttcaaaattttagtcacaaatcgtcgtccaaaaaaaaaagatgtaagtaagatcatatatggattgaagatataggtttgcatacactatatacgaatctgtcaaacaataatgtgatacgaatgtaaaatattttctacctaattgaaaatttctaaaatttgaaaacccgcaacgatccagtggcaagaccaaatagtggtacacgtacacgagagcttgaccgttcaaactatttgaagaccatgtgtaaaaaatcgttaaacagaagttgatgtattaaaactttctgaaaataaaattaagggccaaatttgcataaattactcttgaaatagttttacaaatgaaaatcagagatattcaaaagttccacttgcgcaagttaaaataaatggccatatatatatttatatgtaaaagagtacgggcagagagaggtactaactagaaggaccgagtcccgagccgtgattgccaggatgtcagcgcatgacaccacgcctgggcagagtctctcaacccttgatttgattgcgtcgatgacttcatatcctcgaacggaattattgttaggtccagccgtcttttctccgaggaatgaacgtgtatcatccaataatattgacgcatcacagccctgccatttttgtttcagtttacaacaatgttagcattctaattaacgaaaatacatgtagacatggcaagcgtacgcttcctttcttttattaacaaaaaaacaatatataaaaaaaaaaaacgaaaagaagacctacgttgacgaagcaatcatggaagaatagtcggaggagggaagcagctatccgacgctctttggccacctctcgctgcaccacccgcctcaccgtagggagcagtgatggacagctgtccgaatagaagtcagtgcgtagttgggcctgtgcctgggatcccaacataacgataaacaacagcacaacgaacgcagctctctgacgactctgctcatagcactccatctttgtgtttttattttatttttgttttacttctgtttttctataggagttacgagggatcaagaagcaatcccgaggctgattgcttttatagaggtttacttccacgtaggtgtttttttatttactgtgccaaaatcctcacgtcacctctacggctctaccagactaccacattattgttcgcgttttccttttctttaagaacatttttgttgtttatcatctatataaaagttaaactctctactctctagtctctagtcctcgtaaagctaagctagttctatcaatagatataacacacgtttttatctgcccatactttattatatgcatgtcaatagccgtatcaacattgctatatacatatatataatatatacgttattaatttaaggtatatgaagcgtacatcgtaaataaaaatggtatctaccgtaatataaagagaagcgacgtccaattttggggcttgtgttatagatcaaattttgatactatatgataagtcgatgactgatgggaacataaaacatctaaattaatatcaatataataccatgatatgtaatagcctaataggtttggctgacgtgtattggttatatgaatccatgataagttgatgatactaatatttaataacataacacattatatgaaataaatgtgttacacttgattttttttttaaaaaatgtgttgcacttttaaatatattcatgcactatctttatataaacgtaaagaattctaaattaagacagacacatctttgaccaaaatattaaagacataataacacattctaaaatatattccagatccttatacagtcttcatgtcagtgagggattccgatcgatctcggtttttgacattggtatcttccaacttcgtttaattatttcccttcaaataatttgtgaacacgaaaggaaatgatcgagagagtgtgggcagagctagtgatgatcgtataattggggaggatgagataggtagaaacagcttacctatcaatgcatgcaaccaccaacgacattctcataaatatcagtctttctcacctttcaatttccactttcatgaagttttatatattttcaaaagaaagcgtacccctaagattagtttgtttatttttcaaataaatcatgttcacaactagtttactcctgcaaattttttgttattgctattatacttaccaaacacatatattatatatacagaaaagaggcttaaacaccaccttaaatgattttatccgttagaatcgctagtaatatttaacctaattaacgattttgtgctctgactttaattaattattgtaagctagtataagttttatccgctacgcacacccacacaaagaagaaaaaaaatactggtcatggaatatggggcaagggcaactatatgacatgctgttcaaattttaattggatgagaactagaagtctagaacgccaaaaccctaaagagtatcgttgatagctgatctacgtattcaaaactaaataaacacgccttagatttccgactaagtcacatgggataattagtgtgtggcttgcataagaagttgaatttcaaaattgggagacaaagttttttttctttcttcttttcgtttattttaaagcgatagtgagaggtagttaacagaacatactattattcgatcgaattgtctatcacccacagtaaccctaatctacaatcatcctcttcaaaaatataagaaaacgtacatatttaattattcacgtggattgttgaaaactgaaccacaaatattgtatttgtttttgttaaatcttgtaattttgctatgtccgctttttaggaataactttttcttttcgtgaacctctctatatagagtttttgttgttgttgttgatgaaagataataattatagttgataccaaaaaagaaagaaagatgataactatacgacagttcttcaagaaaataattctatattgtttgtgaacctttaatatgggttttttttagagttggtatgtagaattgacattttcttttctagcgttggtataatgagtaattttgttttttcggatcataaaagatatttatgaaatttgtaaaccttttataggatagtgtagtaggctcaacagattagattatagagttcttttggtatatagagactctgtaaaccttttatatttgggaatttctcactttgtgaaactttcatcatgaatagtacaaatgatgatatatactactaaattcaaaatgtacataatcgaattgatgttatattttgacatgatttcatatttaaataagaaacagaattagtgactacggaataattcacaccctcatccactcaaattattgatatttgaaaatctgggtctgataaggaacaaactaaaatatagaggaacttttgtgaatatttataaacgcgaccttcctcttagttgggccataaataattgggcctaaattaagcaaatccaatactaatggcccattattggtgggtaatatccgacaaattctctttacctctttctacgacggcgacgactgaatcgccaccgccttcccgctccgactcttgacttccacctgtttactcctttgctagaccgatcagacccatctgaagcttttctgtctagagtagagaaggagatgggcaaacccaaaggagatgctgcaagaagcaaagcacgtccatctagcagcaggtcatatttgttcctttaatctcttcttaacgtttaatttcttccgactttatcttttgttttttgagtctatgcttcgttggttcggtactgaattgagcttcttctgaacagcttggcagcttctctgttgccgtctggctctgcagccgccgtaggttttgggggctatgtcggtagctctagattccaaacttctctgtcaaacgaagactctgcttccttcttggtatgtttctcccgtctgcttacttgtgtgtttgccaatctctcatcttttttaatggattgtaggatttggatagtgaggttgcccaacacttgcaaaggctttcaaggaaggatcctacaacaaaggtaatggcttctctgattatccaatcgactacaagagctgttcttgattgtgatttgtttgtttcaacccttttacagattaaagctcttgcttccctatcagaactggttaagcagaagcaagggaaggaacttttgccaataatcccacaatgggtaatgtttagacagaagaaaaactgtagcttcagaagctgtattagattagatgttgaagataggctaatcagcattgggaatatgactctcaccgatagaattacctctaattagatgtttagacagaagaaaaactgtagcttcagaagttgtattagattagatgttgaagataggctaatcagcattgggaatatgactctcactgatagaattacctctaattagtctttgtcttgcagaatgttgatcactatatttcctacgttttcagtgcatttggttgctcattttccacatatggttgactatatttttcatattttcttacttgtccagacatttgagtacaagaagctgatactggactacagtcgagatgttcggcgagctactcatgacgtcatgactaatgttgtcactggtgccgggtttgactctcaattttctaatgcatgccctttttcttgccgtgatgcagtgcctcatttacttcttcttcttttagtatcattcacctggatatatgtagttttcttgtgtcatgagtgatatgatttagctttgaggttatcctaacatcaatatcaaaattatcatcaatattttgttggaatgattcgtttgctaagtgctgtagaagcttgtctatattgagcgtgtcatgtaggaactatgtcttgatgatattgtcttagcatgtatgccatacttctattctatgttttctcccactattatctgattctgtattaattctttgtttctttgtgttactcaggagagatatagctcctcatctaaagtctataatggggccctggtggttttcgcaatttgatttggcatctgaagtttctcaagcagcaaagtcgtctttccaggttggctcctcgtttggtaattcagttttcttggtggaggttattttactttatgtttgaatgccccgctttctattataaactctattgtcgttttattagaccagtaaccttttagttctgctcagggggcactttgttatagcatcaatattcagaatttcaattagctgtctattgtttaaacaggcagcattccctgcccaggaaaagagattgcacgccttgaatttatgttcagctgagatttttgcttatctggaggaaaatctcaaacttacacctcaaaatttatctgataaatcacttgcttcagatgaattagaagaaatgtaccagcaggtacttcatctcggtgattcttcttgctatggtgaagtttttccttctttgggttttcgtttaccatgtcttatttccattgttttcagatgatatcgtcatctctggtggggttggctacacttctagatattttgctccgcgaacccgataatactggctctgcaaacattaattctgaatcaaaacttgcctcaaaggctagggcagtagcaacctcctcagctgagaagatgttctcttcccataaatgctttctgaactttctaaaatctgaaagccctagtattcggtcagcgacttattctttgttaagcagcttcattaaaaatgttcctgaagtctttggcgaaggcgacgtccgaagtcttgcaccagctctgcttggtgtttttcgagaaaataatccaacctgccactcatcaatgtgggaggctgtcttgctgttctctaaaaaatttcctcagagttgggtctacttaaatgttcataaatctgttctaaatcatttatggcagtttctgaggaacgggtgctatggatccccacaggtttcttatcctgcactgatattgttcctcgaagttatgccagcacaatctgtagaaagtgataagttctttgtgaattttttcaaaaacttattggctggaaggagtatgtgtgaatcatcaagtacggatcagttatcacttcttcgggcaaccactgaatgtttcctctggggattacgtaatgcttcaaggtattgcgatgttcccaattctattcatgatctccaggttgatctaattgataaagtcctagtgaagattctatgggcggacttcactgaactatctaagggcagcattccacctaatcagaggaagtcagctgaaaatcttggcatgggtaattcagttagttatctgcaagagctaggaagatgcatcttagaaattctatcagggattaatttacttgaacagaacctgctgtcttttttctgtaaagctgttcaagagagcttcttgaatatgcttcagcagggagatttagagatagttgcgggaagcatgagaaaaatgattgattttctcttgttattggagagatattcagttttggaaggtgagagctggcccttgcatcaatttatggggccactgctgtccaaggctttcccgtggataagatcatctgtaagttatcgtccacgttttgttaccccgttttttcatagtagatcatatgatgtttttacttgactaacctgtgtggctgtatttatcttttcaggaattgttagatggtgtgaagcttttgtcagtttcagtatcggtgtttggaccaagaaaggtagttccagtgctaattgatgatatagagacttctacccttctctctgttgaaaaagagaagaatatgagcccggagaagcttattaaagtttttcaagaaatttttattccttggtgtatggatggatatgactcttcgactgcagctagacaagatctcctattttcattgcttgatgatgaatgtttcactcagcagtggagtgatgtcatttcttatgtatttaatcaacaacatcagggcttcaataacctggctgctatgaaaatgcttttagagaaggcaagggatgaaattacaaaaagaagttctggacaggagttgaatcaaagaataggttctcggccagaacattggcaccatacactcatagaatcaactgctataagtcttgtccattcctcctcagcgactacaacttctgctgttcagttcctgtggtaagttagtcaatatatctataaatagtatcaatattttgcatttatatatctcagtcaagtcttttatgttgcttgattgcttgttcccagttcttattctatattttttttgtatgcagttcagttctgggtggttcaacccaagacagcagtatttcttttgtgtcaagaagctcgttggtcttgatatatagagggatcctcgaaaaactgctatcttttatcaaacagtcaccattatgttcagtcaatgatacatgttcgtctcttattgtcgaggctatagcgtttgattcgagcagttctgtagatgtgatcgtggttgctaagtttgcagctgaagttattgatggtagtttcttcagtttgaagtctctgagtcaggacgcaaccctacttacaactgtattgtcttctatttttatcattgacttagagaatagaatgacatcactagtggacaatacgctatctgagtccaaagagaagagaaaggatcggaattttgtgtgtgattatgttcatgccgtttgctctaagatggataatcaattctggaaatctataaactatgatgtccggaagagttcagcaagcactttggctcagttcctgaggtcagttgtcctacttgaggatgatctgcaaccttttgaacttacattattgtgtgcttcaaggatgaccgaagtgttagaatatctctcattggatc

SEQ ID NO: 924 - DNA, 51440 bp, Arabidopsis thaliana
aaagcgatgaagagaatatctgtggcctgctcctgcttgagagtgatgcgtggcctatttgggtcagccccagctcgtcagctagcatagatacccatggtatgcctgttcagttgtgcgaattgaggaaatcgaaaagtcaaagatatgtttctttcattgacagcctgatcatgaaattgggaattcaccgatttattgttggccacaaagatcatgggtttgcctctcaagcttggctttccgtagaaatactctgcacgtgggagtggccagggggtaaagttcagacttctttcctgccaaatcttgtatcattttgtaaggatgaaccatcgagtggaggtttactaaattccatttttgacattctactcaacggtgctcttgtgcatgtaaaggatgaggaagagggcttagggaacatgtgggttgactttaataataacatagtggacgtcgttgaaccatttttgagggctctagtgtcattccttcacattttgttcaaggaggacctttggggagaagaagaagccatggctgctttcaaaatgatcacagataaactcttcataggggaagagacaagcaaaaactgtttgagaattattccttacattatgagcataataatctcaccattacgtacaaaagtaaaatctggtggttctggtaaagatactctgctaccactggaagttttgcttagaaattggctggagaggtctttgtcgtttcctcctctggtgctctggcaaagtggggaaggtaaagaccgattaattttttattttttttgaaagtggtgcttgtagtctcatcttgaacctatgaacaatgcttagatttaaatgaggattaggctcgggtgtggatgtagaacaagtatatttacttatgaaataacattgacttagtgatagtcctgagtcctcatctgagaagtggtcatagttggcatcagatggacagtctagggagcaatttaagactaaggttttgttgtttatcttttactttgcatgcctagctcattattgttttcccccgtctttatcagatatacaggattggtttcagcttgttatctcttgttatcccgtaagtgataaagctgaagaagcaaaggaactacagaggcatctgagcactgaagagagaacgctcctgcttgacttgttccgcaaacaaaagcaagatcctggtgcatcaactgtagttacccaacttccagctgtgcaaattctgctcgcaagactaattatgattgcagttagttactgtggaaacgattttaacgaggatgattgggattttgtcttttctaatctgaagcgtctgattcaatctgcagtagttgtgatggaggaaacttccgagaacgtcaacgacttcattagtggtgtttcttccatggagaaggagaaggagaatgatacccttgaaggacttgggcatatagtttttatctctgatccttctataaacagtgctcagaatgctctctcagcattttcgttgcttaatgcgttagtaaaccataaatctgttgaaggtgaagacaatctgaaatccttggcagatgaaacatgggatcctgttaaagatcgaatacttgaaggtgttctgcgtcttttcttctgcacgggtcttactgaggctattgctgcttcatattccccagaggcagcatctattgttgcttcatttcgagttgatcatctgcagttctgggagctggtagctcaccttgtagtagactcttctccacgcgcaagagatagagctgtcagagcagtggaattctggggactaagcagaggatctataagctctttgtatgcaataatgttctcttccaatccaatcccgtcattgcaacttgctgcatacactgttttgtctaccgaacctatttccaggctggccatagttgctgatttgaatgcaccactgaatgatgagtctctcaatgatcaggactcaagcaatgctggtttaccatctgaagacaagctactgctaagagatgaagtatcttgtatggttgagaagttagatcatgaacttcttgatacggacttgactgcgccagaaagggtaattcttacttttcaaaagctttatttggtttattttccctctttgggcaagtcattcactgtttaatcacttttaatggcaggtgcaaacgttcctggcgtggtctttgttactctccaatgttaactctttaccttcactaacccaaggacgagagagactggtgcaatatatagaaaaaactgcaaatccgttgatattagatagtctttttcagcacattcctctagaattatacatgggacagagcttgaagaaaaaagatggggatattccgtctgagttatctgtggtagcttcagcagccactcgtgcgattattacgggttcgtccctgtcaacggttgaatcactttggcctattgaaactggaaagatggcttcgcttgctggggcgatatatggtctgatgttacgtgtccttccagcttatgttagagaatggtttagcgaaatgcgtgaccgttctgcatcatctcttattgaagcatttacaagaacgtggtgcagcccatctctaatcaagaacgaactgtctcaggtatgtacaataaaaaaccttttctcatctctgagagttgcagtgaagatccactaatgcatttgcaaatattctgttcattgtttatgtgagccgcagataaagaaggcagactttaatgatgagagcttttcagtcagcataagtaaagcggcaaatgaggtagttgctacatatacgaaggatgaaacggggatggatctcgtgatccggcttccagtttcttacccactcaagcctgttgacgttaattgcgcaaaaagtattggaataagcgaagcgaagcagaggaagtggttgatgtctatgcaaatgtttgttcgtcatcaggtactgtactttatgagtcatatcgatctttgttaacctgaatgatatctccagttccatcatgtagaccatatatgattaatcttgtcctctccatctaagcccaaattgagtgcctgtcttgattgaatgtttttcttcttcttctttttctaatgtgttgttactgaaagcagaatggggctctggcggaggcgataaggatatggaagcgaaattcggacaaggaatttgaaggagtagaagactgcccgatatgttacagtgtgatacacatagggaatcacagccttccaaggcgagcttgcgtgacttgcaagtacaagtttcacaaagcatgtttagacaagtggttctacacgtctaataagaaactctgccccttgtgccaatctccttgctaatacaatagctgaggatatacatttttgtgacattagtctgtgagttttgctttaactctttaacgttcttaggttttactttccaagaaaataaaagggtttaggtggaaccgcattgccattgatatacatatacccgtatcatatgtgaaaattggaaaagtaataaatagagaaatttacttcgggtacacacacacatgtagtagacccggtcgagaatacaagctaattaataagcgaaagatttgggtgactaattttttttttcctttaattattttattttatggtcaatgcatatatcttaacagacaccaaaacacatagaaatacattaccaaaaaaaaggaatatatttaagctggggattcgcggaggtaaatgagaaaatacaaaaggaaacatatatttaaatttaagaaaacaactaaatgttgtaataataaaggaaacaaataattgaaattaaaaaataaagtgcaacgtccttcgaaatcgtcctcactaagaaatgatgggatttttgatatatcttggaaagaaataatcccagtttgtttccaaaatggcgtaagaagaataagtcaaagctattaattgcaatttaaacaaaaaaaacgttcgttattataacgcaaagactagaaataaaaagaatatttcgaaatatataaactctcctccatcgcattcacatatatcaaagaacaaacaacgaatatcaatattacttttgagttttgtatctgtttgtaagagaaaatggcaggaaaaatgtgtatgatggtgatggtgatggtggcattgataatgattggatgtcctctaaaagcatgtaatggaatggcttctcatgaaacaataaaagagcatctgtggaaattgtgttacaaaaattgcatgatcaaatgcggtaaagataattaccagtgtcaggaccactgttttgccgtttgtgatcccgaccaacgccctccttcaccaccgtctctcaagtaagtactccatatatattcctcttaaattatttccttacttaatatttgattaaacatattatactgatatatatacgtggacttaatttttgttgatacaaagcaataaaggcaaaacaaggcaagatcgctatatgctccacaaattgtaacaccaaatgtggcaatgacgcagattgtatggaaccttgttcgaagacttgctccactcctactactcttttttaattctcatccaaactactcacttctatagttatatcatgatatgatctatgattttcataccaatatcgatgtattgagaatgttataattgattgaagacttagttatgaataaagttagacatggttcttgtgcctgtcaaaaatcaactaaaacgtttttagatcttgatggtttgatgaaaataatgatttggaaatatgatcacacaaagatgatatgaaatcataattttaaattttacaaatatgataactataaatattagatatcaaaacttagctttacaattttgagtgttattttttctttaagaaagacaggaagtgggtttaactttttggaaattatattgattttgtgattactattgtaaatttattatataaaaaaactagacaccaatgcttgagcgaaactttgatgaaactctgatttgtataatcttttaaattattaatgtttgagtggatattgggtttacaaatttgttaaaaactttggtgaaagtagagaattaaaatcaattaagggtaacaaataaagttgtttatataaaatataaaatacatgattatatgtacaattcataatattagtatatatgatactagaagaaaaaaatttaaatacgtatgacaccgagtataaatatctaatgcaaaatacagaaaataaatagatactgacggataattccggaacacatgaaggttttaacatttaacccataaatcccagaacccgttcagtatttgaatttagtttttttatggccacgctcgtttcgagtttgggcctggctggatatttttttacccacaacaaatctctacccatatatataaatgggcctctcacttaataagcccataataccctaacatcatggagttggaagagggtatataaatggccaattagggttttgtacgtgctctcactttttctctcaagtggttcggagctgtttctaagaaaacaacaggtagttcggatcggagctacgcttgcaaaactcaaaacatggttcgtcatcctctaatctctatctctttcttctgagcttagtgattgtttacatctagatagttccttaactcgactctcgtttctggtgggtttgtgttagagtgacttagagaatgggttttgttagcaatttgattgattcgataacttgtgaatattatatgcatcatggtgattctccttagatctgagctcattagatctcaaatgtgtcgctgatttaggtcatgatgatgatatacatagcagtagagatttccttaataataacatctcttaacatttattttgttaaattttacaggcgaggggtttgaagaagcatctgaagaggcttaatgcgcctaagcattggatgcttgacaaacttggtggtgcatttgtatgtcttttactctctctcttcttgtctcagttttgattcaattttatatatatctcttgggtttgtttgaataagtatgttcatttctggttccacacaggccccaaagccgtcttctggaccacataagtcaagggagtgccttcccctcgtccttatcatcaggaacaggttgaagtatgctcttacctaccgtgaagtgatttcaatcttgatgcaaaggcatatccaagttgatgggaaagtcaggacggacaagacctaccctgctggtttcatggatgttgtgtctatccccaagaccaatgagaacttccgtcttctctatgataccaagggacgtttccgtctccactccatcaaggatgaggaagcaaaggtttgttctcctcttgtcattgtttagttgtcttttagagtgatacttgacatgatggggatatgttgtgttctaacattatgtcttctatttgtacagttcaaactttgcaaggttcgatctatccagtttggacagaaaggcattccttacctgaacacttacgatggtcgcaccatccgttaccctgacccgctcatcaagcctaatgacaccatcaagctcgaccttgaggccaacaagattgtcgagttcatcaagtttgatgttggcaatgttgtgatggttacaggaggtagaaacagagggcgtgttggtgtgattaaaaaccgtgagaagcataagggaagctttgagacaatccacatccaagattcaacaggacatgagtttgcaacaaggttgggtaatgtgtacaccattggcaaaggaacaaagccatgggtgtctcttcccaagggcaaaggtatcaagctgactatcatcgaggaggccaggaagaggcttgctagtcaacaggctgcttaattttgtgattttcagttctttgttatgcttctttagacgtttcatatttcctagactcacttcgtttcttttggtactctgctcagttttgaaacttctcttatattatttatttcaagagttaaaaacatcaaatatccattgtgtcctctcttgttttttactatcttcaagagttggtactagttggttatggttacttggtgatagttacacaattattgagaatcagtaaaataatgaaaaatcttgtgttgactcctttgttaaaagggaagacttagatgtaagaacatattgataaaatatgcactcaagacttagaagtagatccaagtccctaacatgtcatctttttcaactgttttctctttttacaatgacaaaaaaagtgatccagttacaatacaacattacacaacaacacaacagagctgagctaactgtctaaaaggatacacaatacatgttacaaatcctccctgcaagacttcgctattggtcatttagcaggtggttcgttacgaagatgttacaagaggctatttttgtgttcgttaccttcattttcttcccgtggtagtccctttgaacagctcgttaatacgcgcctctatgtcctcaactccatacttgatgtacttgtctgcgtttttccctatgtctccaaggttttggaacctgccgatgaagctcccgtatgccggtaccaaaagcctggccagtgagatctttagctcttctttcagctgctcgtcaaacactacccacgtcgaatgcactttacatatctcatcaaactgaatattgaactgcttcagcttctccttcatggtcttccccaaaccgttcatgcctgctgcagtattatccaccttcagcaaccccagcatcttattccatgagcttctctgataattcatatggtattgtttcactttgacattgtgtttccgaatccaatcatctcctaacagcaatcctaggtctccatctttgactttctgaacaatgtatctcccattattcatcagaaacacatagcacaaagctggatctttgtacactttagattttacttccaagttactctctagaagctccatgatccaagacatctgtacagtcaacagagttgaatctttagaagggacaccattgctttcctcaaacacttgctctaaggtttgccgggatctacaagccgcacggaggtaattcatcacataacgagtgatcgggtggagaccaccgcccggaaccgcagctttagccgggtctcgccggatcaaattctcaagctccataaatatacctcttatcgcctctcccaaccgtttccaaatagttactgcttcatttctaagaactgagcaaaactgatccgagaacacagactcaaattcaggcatcaaatccctcattgtctcaaacacatcaagcactttaaacaatctctcaggcgatctgcttccaatagcaatcgcgtctgcgaaattcagaagctgaatggtagagccacgacaaacctccataaacgaaagatcagcagcagaggagaaaccgaagaagacacggtcacagagtctacgttcgctaggaaacaggattcttagagcaacgttagcagctttgatccacctatctatctcatcttctaactcctgccacggcatcttatgaacttcttcaatactcagcttctgtaaccctaaccttgacatactttcttccagaaactctctcctacaagaactataaacatgagaacacgccttaccaaatccagcgccaagcattcgcttagccatctcgtgtagatcgttaattgtcgccgaagggagagcatcaatgataagatcgtagtcagtgagtggctgtgccactgggatctgaatatcatcaccgttgttgaagtctctgtcatcatcttcttcttcctcagaatcgaaacgatgattcatcgcaccagcgtctccctgaggattaagtccgaaagactcagctccacgctccataagcgacctgaactcttcttcgatgcggaacatagcttgctgcatcatatcgtcggcgcgtgttagacagatgccgataggtttctctgaagccatgggactccactctctaatgattgcaacgagctcatcgattgtgtcgaggaaagcagctgaatctgcaggatcagcccaaattggttggtccgcagcaacaaagcgagagatctgaccgtctattgaatttagagctcgctcgagtgtggcgactccggatccatcttctccagcttgaccttcggcgagcttctcgcgagaaaatctgccgtcgaagttggagaagatctgtaagatatcatcggccatggattcattgtggccaagtgttttggctatgtgacgcgcaacagcaagtaacttctcttcaccattctccgccatgattgaaacagatgtggaaccagtgtatagaagattttatgtaatctcgagtcactaaataaaaaggtcacacagcgagatcgacggggaaagaagcaaggaagggaatcgaagacgaagaaagttccaagcaaggaagaagactggatggatagaaaaaacttgtcgaaatgacgaaactaccccttaagacagacgcgatctttgacctggccgcgttgtttgaaaatggcatgggcgtgtaatattgcgataatttctgctgtctttttgtgaaatctttccctttcgcgaatattgacgtctccgtgacttttctgtcattgcctcattggtctcgctttaggagataaaccggccggtttacgagtaagattggtggctcgatggttcattttctctctcggtcaactcactaaaacgaactggttgttacttaccaggaaacaatgggtatgagggcaatgcagacgcagtcagaactcagaactgcttctagaaaacttatatacaacaactaaagaaaacaaagaacgtttaccaaactatcagatatatctttggcggcatataccagaaaacaatgggtatgagtcaatgcagctgtagtcagagatgcttctagaaaactaatttacagcaactaaagaaaacaaacaagaacgtttaccaatctctatcaagatagatacaacatatgaaaaaggaaactacactttttgacaaaccattattacgcaatgtgattctgtgccatacatggatttggtatggttatgccaaaatgaacatcgttcactctctttttttctgtgtttgttagctgctctgcttctctctatcgtattggctggtctcttctgcaacctttgcccagacgtttcccattttctctgcgtatccaacctgcgtccaattcaagaacacaactctttctttaaaactctggactctttgattactagcaaatttatatattcctatcctctcttctaccgcattatctttaaaagaactcattttcatttgcctacaagagacccatgaatgccatctttttattctacttctccactcttgaaatctcactaagaatgaaatcacacactttgtgcttaaactaaacaatctccttatcacattcttcactctattgggcaattaagaaaggcatcatccttctaatgttaatgtgctgcataataataacgtacctggttaacaacaaaacccttcatcatgttcatgaagtctgcacgcctttctctgtccaacctctcaacctcagatcggttgttttcctgcaatgatacaaatttacacagagcataaccaaaatattcatatcatgttggtaaaacagcacaagttgtgatatgcatagggttattactaaataccttgattcgctcataccctttgatggcaacattttttgcatcctcagtgaccttgattgtttcttttaactcttctatttttcggatccttgatttgtcaccaccaaataccttcgatgatgcagcctctagcttctcaactctagtttgcagagaaggaagctctgatagaagcgtctgaactgtcagtaaagcactagatctatctgcaaatgcgccttggacagccatcatcatgccaaggtactcatggagtgtgtcctgaaatgaacaattaaaataaaagaacagctcttagtgaagctcaaattccagcagcatctccaacataagctgacaatctgccaagtgtccactagttaataatgaagatacttgctacgcatggcgagatttccgaaatcctaatgtcaatcgcttaaatcgaaatgatcatttttttcagatgaagaaaagaaaataacatttcatttgattccaagtaagggaggtagctgtataattctgtagttatttaccaagtgtttgacagtttgggaattcaactccctataaaatctgcttgcttttacagcagcagtggctaaattcttcatatcattagcacgagttctttgggggttgcagacagcttcctcgttctcgaacttagtcagcttaatgaatgctaatcccagttcacccatggtttcacccatgtcttgctgtgctttcacaagggattccgcctacaaaaagaaaccacaaaagggggttgttccaagcaggatactacatactgccagaatgatgcacaattcacctaacaagtatgaaattttacctgctgtgaggcattgataatttgctgctcaagatcatgcatcttctccttcttttccaagaactctttatcttcttcaacaacgggaggttttgatccaccccagtcattagaaactgactgcctcagctccttgaataatctcagcagatccctacctcctcttgcaggctgacccacctcagtcaccggcactgcagaggctccgccttcaccgaacaactgttttgggagcttcaccgccccatccaacatccgagaggccacatcagtactcattggtagtggcaacttcccttgcacctgaagaaacactttcaactcgtcactgttcctaataacagggtgtgcacttagcctgcgcaagtatttctccaatgcaactcttctctgctccacgaactcttgtttctgcattacttggctctctacgacgctcttatctggccgtggtggtatgcagaaccctctatacgtctcagccaatcgatcagccaatgtgacaacatctctgaatcttcttcgcacgctaaactccgatgggccgccaaagtcagggagattcgttctggtcgtaatttggtaggtgatgtaagtgtttcctccaacaatggaatttgaaatctcctgctctttctgagggttagatacagtgatcttgatgtaatcagagcttgaagaagaaggagatctcgatagtgaatctgagaattgactatgaaggctattatcctcggtaccgttaatctcgctatctgagttctcatcaaagggactgaagataacatctgcatacgacggaggctcgatgtaggagttatcgctgctgatcggcttagagctgaagctgctgcggaaatcttcgtaggaggatggcgcaaggagtggatcagaatcagctggaatcataacggtcggtggcggcgagagcgggtcacggacgttggagagtgttgacatggcgctacggtaaccagagttcgatgtatcaccgttgacatcgcttatcttcagaggatggtcaccaccatctactcctaggtcgagattctccatatcatccctttgcgcattgagattagtttcttcgaatccatcggcattctctgagcccatcatttcgacttctctggagtaacgacgaactaagctaattgaaattaacagaaaattagggtttgatgatttgggaacaaacggagatcccctgaaatgtgacgctgagcgacggtgtggctatcgaattaaaagaaaccggagtgactaaaatgcgcaggtggggactatgggagcaggagactaacgtgcacaccgtggcgggttaggggtggcacgtgataatggcttaaagtctcgtcaattgacaaatctgccaatgcgtacatgtgatgtgaagaatctgacaactttcaggtaaagtatagtcgccgatgggcttgtttaggcccattaggaaagcccaatattaattattgacggagatagccatatagctgcatccaaacattcttattaggtttcgttaagcagctgcagagcttccctgatcgtgtcgaaatcctgtgtttaactggaaccgagtcttttgatgtaaaaggtcaacaactcataaagacacttcaaaaaggttttccgacaaaattcttatcttctcagatgtcttccaaattcgggttagcgggtggaataccggagcgacgtgttcgacccatctgggatgcaatcgattctcgtcagttcaagaatgctctaaagcttgtcacttcgcttctcgctaagtaccctaaatctccttatgctttagtaagtgaaacccatcattgttttttttggttttattctttctctaatctgtacacgggaacgtaatctgattaaaatgctgttaacaggcgctaaaagctctgattcatgagagaatggggaaaacagatgaggcactctctgtttgtttggatgctaaagagcttttgtacaaagatgatttagcgttgatggatgatcttactcttagtacattgcaaattgtattgcagagacttgatcactgtaagtgcacacgtataaaagaagaatttgaaagctgttgtattacttcttggtatatctaaattgcttgttttaatttgattagtggacttggctactagttgttatgctcatgcctgtggcaaataccctaataatttggagcttatgatggggctcttcaattgctatgttcgcgaatattcatttgtgaagcagcaacaggttggtctttctgctgtatgaacaaatttctgggttctggtgtcactctttctttctctgttcttatgtcttgttttgtgacagacagccatcaaaatgtacaaacttgccggagaagaaaggttcttactttgggctgtttgtagcatccaattacaagtactgccatcgtttcctcctctcttttttgagcagtttggtattcctgttgcttatagttgtgatgattttggacaggtgctatgcgataagagtggggagaagctgttgcttctggctgagggtttacttaagaagcacattgcctctcatagtatgcatgagccagaaggtaaattcactaatgtcttctcttgtacaagttgtggaactatttcagatttcttcaccctttcttctactaatgacagtatggtgttttcagctctcatggtgtatatctctttgctggaacaacaatccaaatacaatgatgctttagaagtcctttctggagatttgggatctcttttgatgattgaagtcgataaactacggatacaggtaggttataagactttttggctggagagaacagtaaactttatgctttttgtgttatattctccgtagaccacagaaattgtgcattttccctagtttttggttgaacctatcgttatacatatatacatatatatattagtatgcggagtctgttgaggtatgcttacacaaactctctcactttaagctgacaggggagactccttgctagggcaaatgactattctgctgctgttgatgtctataaaaaaatcttagaattgaggtatgttttcaaggctgcttctcagatatcagtgtctttagagttggatatgtttccagtatgatttctgataggtcattcgattgtttctatatctgaggcctgtgcatatcatatcagtatgctaacataaaatttctcttcaattggcagtccagatgattgggagtgtttcctacactatctcggctgtctgcttgaagatgacagcatctggaaatactttgacaatattgatcaaattcatccgacaaagcacatagaatgcaaattttctcaccttacggaagaaatggtgatcatattacccacttgccttgcttaatgtttcagtttgtgttttcctttgcttttttcttaatttgtggcttatatataatctattttctttcccaccatgcagtttgattctcgtatatcaagtgcctcagatttggtgcagaaattacagagggacgctgagaatagtaatttaaggggtccgtacttggcagaactggaaattgagaagagaaaattcttatttgggaagaagaacgaagacaagttactagaatcgttactgcagtattttcttaagtatgtcgctgtatgaaaccctttggagttgatctagttatttataagtaaagcctactggttcttatatccctctgagcttgttttgatttgcatgcagatttggtcatttagcttgctatgcttccgacgttgaggcatacctacaagtattatccccaaataaaaaggcaggatttgtggaaatgctagtgaaaaattctgattcttctgcgtcagcaaccaaagtgctcggtcaaacaacaacaattctcaaagtccaagaactgacgggaaacatttttgggcttcctacagacggtgtgttctcttagcttacatagtttttctgcaacttccttgttttctgcttatagttttttttatacaagccatgttactgtatggtgataagcctttttgaatgagttcttctgaatctaattccgattcaatttttttcttccaatgtctagaaattgaagcctctgctgtcaaactggcaaagttatactgccaaaatctttctctttctaaggacttggaccctcaagagagcatgtttggggaagaacttttatctttgattagcaacatgttggtccaggtgacttggctttgtttcaacagacttgcttcccttgtactggtttacccattgttgtatattaattaaccttactgttggttccagttattctggagaactcgagattttggctatcttgctgaagctataatggttcttgagctgggcttgaccatcagagggtcagtacatcatatttttgccagctgctttgttttaaatgccaaaggattcaacatggctttgataggtctcaacttgattattacttttgtttccacagacatgtatggcagtacaagatcttgctgttgcacatatattcatatgttggtgctcttccacttgcatttgaacggtattcatagctctcgcctttacttgtttttgcctggaaacagaaaaccctcattcagctggtttactgaaccacctgtttatctattgttaggtataaagctcttgatgtgaagaacatcttgacggaaacagtttcacaccatattctacgtcaaatgttggaatctccaatgtgggtggacttaagtaatctcctaaaagactatctcaagtttatggatgatcatttgagagagtctgcagacctcacatttcttgcttaccgccatagaaattactcaaaagtaaacaatttgatatctcccggagttgtcattaccatatccctgtgggcaaccaatcggttactgtcatgacttatcttgatttcctaatctcaggtgatcgaatttgtcctattcaaacaacgattgcagcactcaaaccagtaccaagctgcaagggttgaagcgtctgtcttgcaattgaagcagaacgcagacagctttgaggaagaagaggtaattcatccaagttcttatcatgtataataacatatctccatctacttgatcctctcatatatctaaggttgcctgggattttgttgtctagcgcattcttgaaaatctgaaatctggagttcaacttgtggagctctcaaatgaaattggatccaggacacttaagttcaatgaagatatgcaaacacgtccgtggtggacaccttgtcctgagaaaaactatctactaggtcagtatttccttcacaatttgttgttgtttatgattgtggtgttattcttaatatcaaaaaacgtctgtaggtccgtttgaagaaatttcttactgtcctcccaaagagaatgtggtacgtttgtctatatccatacatcttttcttggggacggatgcaacctaatacatgtaattgttggctgtctatagaaagaagaacgtgaagaaaatatgaaacgagccatccagagaaaatcccttctacctcggatgatatatctctctattcagtgcacgccaacggcattaaaggaaagtgttgaaaccaatgggtctggaggtgacatcgacgtctgtgaagaacttaagtgtttgctggaggactacacaaaaatgttgggatgttctctaagtgacgctgtagaaatgatcacagagatctcacagggtgcaaggacttccgaggttagcttttctactcctttctccttctacctgcactcatattaactggtcttactgttagtaacctagtcgaaacatctctgtagagcctcggttcaaatttggtggactggttaaattttgcggtgttttggaatgcgtggagcctaagttcccaggagcactggcatgtgttgaactccctgtttgagaggcttattctggatagagtcagatcaatgggatcttcagacatgagttcttgctactctgatgtccaggtcttggttcagatcatcaccgaaccgttggcgtggcacagtcttatcattcaggcctgcacccgctcgtctctcccatctgggaaaaagaagaagaaaaatcaacattcagatcaattatcttcgtcccccatatcacaagcaatcaaagattctatacagttactatgcagcacaatacaagatgtttctaactggctactgaatcaactgaacaatccagaagatggtcaagtggagggatttctgacaactctgaagagagatggaaatgcagcaggaccaggtcagattcttggggtactagagagtttcatcgcatccagcgaagaatcggaggttggaaatcgcatctttcaagcactgaaatcatggaacacggcagataccgcacgtaaaacagtcatggcgcaacagagagtcctccgtgagtttctccagatctgtgaatctaagagaaagctactggaaacgctcaagcaacagatgtcccatgtttgatcttgaataacactttagagaaagatccctgcttttcttggctatttcattttgggaatacattcatgacagggacagagattgattgatgtttcaatacattttgaaaagaaaaaaatgaatcgtgatttgctagctaatttagctgcttctatactggaattttattaactcatctatctattgggatacaaataaaaagcaaaacaatccccaataatacagattctacaactcggatataataaaattaagaaacctaatcaatcaagaaattgtactaattaaatcaattatgagagtgagaccaaggagacactaatttcttgtaatcaaacttgccgttcaagaaaccatcaccacccatctggtttctcacttgttgctgcaccaccaacaccgaaccctccgaggcgaaaacgctcccagccacggtgtctccaatgactccaagctggtggtcttcgctccacgtagaaagtccttccagaatctttggattgatcccttctctcctcccggttatccacaaatcatagtcattgacattcattgcttgaatcgcagccaacgtctcagcaccgttcttcacaacaacctccttgtagctaaccctagcgttgctttcgttcttgacccagaaccacgtcaccaccccatcgtccagcttcttctccctctcgtcctctccttcgtggttgtgcgccaagaacctaatcactgtcaagtttatgaacggattctccgtcatcctatcagccagatgcagagcttctctgttatcagctcctcctaaaaacagaaccacgaaacggtacatttcttgcctcatatggctagaatttgttgtgtgttgtgggtccatggatgacctaaccatagcgttcttaagtcgtcccttctcgtaatagatacagacagaacatggtgtgtgtgccaagacgtctgcgttcacagatagcatgccggagtcacgtagctcggtaagagctgcgtcttgaagacgctctttctgataaggtaagagaatgaaagcggttttcttggtcaaagccagctcgcaaatattttgatacatgttatgctttgaagcatgtgcagtgtaggcatgcatcgtcacacactcacttcttttctcttggtacagtttaaatgcgctctgcacttggtctactcgcctgctccccatacgctctgcaggctcttcctcttcctcgtattcttcctcccttttcttgtcgtgtgcaataaacaagggttgggcacgcccttccagttccactagctgaattgcgaatacagagaaaggactagttttagtgggataagcgaagtctagaaacgtgatcaagcctgagaaggtatcatggtcggttactgcaagaactagtcccgtctcggtgttctgaggagtgtgttggattgtgcggcgcttgctgcttctataaggccgagtgggatcgtagaggaagctgattagcggcgctgttacacccgtgaccacgatcgcatacaaaaccatgacagaataaccgggtaagcctaccatttgtttgtcgatccaatgcaagtagagtaagatatcgatctggcctctcaagttcatcatcaggccaagcgtgagactgtccctagtggggactttaaagaagagagcagcgccagtggaagagacaaacttggtgacgaagccaacgatgctcatgtagataagaggagagatctgtttgggccacgtctctttgctaattaagttgacattggttttttgtcccaccaaagcaaaagagaaaggcatcaagaattcattaacaaaggtctcgctcctaatagccaacgtcgaacctaacggtggtccatgagggaccaccaaccccagccaaatgggtccaacagctatagccataccgaacatgtcagtgaggaaacaagagacaaggacacccatgagaatattgacgatgtagttttggttcacgagtcctccctcaggcgttttggcgacaatccattcaaaggatcgtttcacaaccaaaagcaaacaagcggccatgatagccgccgatatgagaaaccatatgacagagtatgctcctcctcctccgtcagcctgcgccatggcttcaaacaaaacaagcacgtagaccccaaccatgtctccaaggagagtcactgacatggcgaactttcctatctcagagttgagaaggttcatgtctctcaaaacagtgtaaatgaccggaaaagaagtgaaacccaaggcgaacgtgacccctccaatggacgaaggtttctgcaatcttatatccattttgtgttttagggcagctcccgtgctccccacgcaagcaatcggcaccaaaacgctaactgcagcaatgtacttatgctttcttggtgctttaaagatttctgcaacgtctgttttggcagccgtgaggaagaagaagtaaaagaatcccatcagtcctatgtttgcgcatatgtaattcgcaatcggtggaaacagatagtaattgaagtttcggtttcttcctaacatggacggtcctatcatcatcccacccttcaaaacacaaaaccatgcattttgtcttaaataatataattagctccatcaatggaaatttattaactatgtaaaagaaaatataagatcgaatacgaacaatgatctcgcagactatacgaggttggcgaagaggtcgaaggaggacgtaaacaattttgatgaagaaaatgatgagtattgcttcgatcaaaaaggttgaaaatgtgtagttcatgccattttcgcctttgaacattccgaacggctgcttatcgtgaacctgtcggcaaacctccggaagtctggctgagaaaacacgactgctgaccactccggcggtggttggattctctggccagaacccaaaacgggtaggcagggcactccagccatcacttgggaaagacctaaccatgcatgcagattattctctcagatatttgacataaaacaaacgacaatgatcatccatagagagacagagagaaggcgatagatccatgattgatgtgtgttttttccaacagatgtggtcgtgcgtcattttgggaacaattgtagttgtagttttcgcttactcttcatattttctttatttttattttctcattatgagttttttatgtgaaaaatgtatatgttttgtggtacttcatcttcatgatctacatttttcactccgtaaacatagccgctttcttcttgaaaacgcatattttcatcagagttaaagaattcatcaaaaatgtaacgtacgatatgttttgttacacaccttatgagaaccatttttttttctctaacagaaagtttatactctttgactaaaattagagttgttgtcaaataagatttaaaaatatatatataatctatatatgtatgtttatactttgattgaaaggaatgtaagatgtttaaatgagaaactaaaacagaaatgtaggaatgttaccaccgatcgatattcttagctttattttcatactactgtttttactttttacagtttcttttaagaatcacatgtgaggtcaaggatgagaattataatctcacttcattccttaaattttgctgtactcctttctgcaataaatgtagtgctctccattatatataggatgagtttttgtttagttgatgaaaaaaaaaagatggatgaatttagaagcaataacataagggaccgccgggacgtgcaaggtacggccgtggtagctggctaacacaaactcccatgcatatctctttatatattttacacaagatctatatttcttgaagattagttttaaaaagaattcttacatattaaactacatttcatacatgtctttttagtcgtttttattttcattttacactcaccatcttccactttaaaacacttctctaaagttttaaaccaatgataattttattttattttttatagtgtgagataatgtattctattaattatacatttataatttgtagttcacaattcatttaccgtaatcaatgtagaatacatagaaataacaataaaatcaatatatatgaaacaaaagcaaaaacaagaaaaccgtttgtgatgaaatggatgtcatgaaattttgttgttgttgtggacataaatattgattttattgatatgataacattacaagattctgaaatagtcactacgtactaataataaatttggaaataaaggagaagtggagatcccacctacgccaaatattgaatgcatcaccgctttttgcgttcttccacatactggattatttcattttatcctttttattttcatacattctcacttatcgatctcattaaatatttccttcgtttccttttaatctcaaggacttgtctaaccggtgactagcttgtggccgtgctgagtttgcatcgtcgaacaaaactcataaaatcctatctgacgcagtcgcacaacagtttataattagacgtaattcgttgacaaattgccctatagatatatacagtatacattaactaaatctatcctctatcacctccctatttcttagtaaacaataaaagaaagaaataaagttattgtgggtatgggaatgcattaaaagtgccgaatatgcataaaaaattggtacaccttccaaaatatgtaatatggggacacttagcttagagttgagactataaatacagcaatatgatccaaggtcaagctcctctatatatatatatacgtacttaacattacaatacatataacatacatgatacattataacacatatgtaaaggaagatgcatacctatggatgtaaatttcagattgagtagtagagaaatagctataaagctcaggagggatagcgccatggctcaccagtgctgtatgttttgtatatgcgtacatgtatatctgttggcgctatccatcctgagttccatagcttcttcttgcttatatgtgattcctacttcattccctccttcgtttagcttcttgtatacaagatatggtaatgggtaagtttattatttgcatgtaaatattttacctttttttatatagaattgttgaagttcaaatcatatagaaaattgtgtcgaaagtgagaaaaatcgcaggtattgtcaatttgaggttaagaacacattaagtattaaatagtgtggtcttacaagttacaacttacaaatatctggatttcacacatctaagcagtttgttagaattacattgttactgccttactttttttttttttttttttttttgtaaatttatgcttaagactactggtggacttttattaagaatatgtatattatccaatatgtgtgtgaaagggatggtaaataagtaatatcgccgtgtgctagagccagccagcgattgagctgtgaatatgcaatgttagaagatggattctctttgtcgaattgagaatgggaatcttgaaactaatgttacaggattccaaatttcctggattctttctctcgtccatattttctacacaacaagtcattaataaactttctcttgggattttcggcattagtcttttttgttcctataatttcaacataaactttcgttacatgtaacacattaaagagttggccaatccggcacttgaccaaaaggtcatgacatatacacatagagaactttacgagacacccttctctttagtccttgggatccagattgaacgattaactatttattaacaacgtcttttatccaaaaaaaggccactcatttgtaaaaccctaatcctaatcatagccccagtgagtgaagttggcaataaaatcatcaagttgatctttgaaaggtcactgcatacttcagatcaactgatcagacacaagtgcctagccatcccccactcctgccaattctcgaggaacacatgttgctataaaagaagtttgcgagaaaaaacgataacaactccgaaaattgtaaagagaagtgtggttgcctaaatgaatgcattacacaatacaacatgaaaacatacgactgttttgtttgtgttgaacagagtcaaaaaaagaaggaagagaagcaaaaaagggacttctggtgttgaaagaagtaatcaagatgaatgcactcacctgaaatcatcatagcaccaatttgcaatgcattttgcagttaaatatcagcttccttcaataaaacaaaaaacaaacatttcacatcgtgaaaaacaaactaaaaataaaccggagatgcatgaataatagatccccaaagaaacagaacaagtagggagaaaaaaggggtaattttgctcaaggtcaaagtgaacaaaaacctacctctttttttgtatctccaatatgaggattcatagaacattttactaaaattccctccttaacacacacaaaactcttagaacacataacagctgattcattcattcctctctttctctcaatatggacgagaccggtttcccccatggtggtttctgtctggccctgaactgtagttgtctcttcttctgtctcccccaccaccaccatagccaccacctcctcctcctctacccccacctctgcgacattcacaagtttgcaaggacaacattattagatcagacacagacatctctaattaaaaccagcttactacgtaagatgaagtgactcaacacacaacaaagacgagtcttatagagcatggaaaaccagataaagatacaacttatatggggaattactaggagcttataagaagcatgaacaaacaacagatctcttcacaaccaagagcagccacagctataggttacaagataactacatagatttatttcctatggcatgaacatagacctaaggcataatttgatgacatacgaactcccaaccctttctgtcatacccagatgagtgtacaaagcaaatccccagtaggatacaagatccaaacagtcttcagagacaaggaacataaacttagcattgcaaaaactcatattccctactaaaattataaagctaaaagcctaaaacaactagagtacaaacacctataagatggagcaggtggtaacagctaaatggtaacaaaaaagaatgctgataaatgatcaggacagctacctctggtcaaaggtaggagcacggggcgcagacttttctgccatcgttacactaatcttgttccccctcatttcgtaatctacaaaacaatccaccaccattcacgaaacagaacttttaaacaattttaagctagacagcaattccatagtacatactgttgaaaaagccgcctgcagagtgtgcagcgctgggatcttcataagccagacaggcgtcacctttatagttacccttctcatcagtgtaaatcttaatattatagggccactgatctttgtaaccacgcttctgcttaattcttccaacctaaaatagatccaaccagacacactttatcagcacaccaataaacatgtacacaaacaagaacttaataacttatagcaagggaaaggcttattccaagatataaaacacaacagaagtaaaagaccagtgttattacttggccaatgccaccaaagagatccttgagttcatcagttgtcacatccggaggtaaattagagatgtatattctagcattatcacaattatcatcacaatcagcatcgcactgcttgactttttcagtagctgcatcttcataactagcttcctgccgtcgaggagcactaccaccatcatagccgccactcctaccaccacgaccaccagtgctcggtgcatcactgccataaccccctcgtggaccaccatatgacggcgggccaccagaatagcttgtaggcgggggaacagcttccattccataacccgtgggtggaggataacttccagaaccatcgtaggatggaatagctgcagcaggaggaggagcctgaccatacgaaccattttccctctgactaccactaccatagctaccaccactcctacttccaccatcatatctactactctcatagctcctaccactatcgtttctaccaccacgaccacccccacgatcactgtcacctccacctcggctatatccaccacctccacgatcattagcaccagaactagtaccagaaggagcaagtgcaccacacttgttacattcaactctccttgcaaagttcacgttcccacaactatacaaacagtttcgagggtaaacaatttcaaaacatgctcccacaaaggaattcaacagctaattcaattcattacatatgcagaaagaatggaatcccaaataatttgcaatcattacctggggttgggacaacgccaatctccatctctgcctccgccgccacttcctcttccaccgcgatcacctccttgatatccaccacctccaccgcctaaatcaaaacgaatcatcgaaatagtgagaaactaaagatttaacaaaagtagctcagcaaggaatggagaaatctaaagaatcataaggttatatcaatcagatctgcaacaatctaaatcacaaacctcgatttcctctaccaccgcctccaccgtaaccaccgcgtccgccgtaactacctccgccagaggcaccgcgtccaccatatccagcatcaccacctccataacctccccctccgccgtatccatcaccaccgtacgacggaataggcgcacctccgccgccgtcttgattgtacatcccagccatgacctagggtttgcgataaacaacagaccaaaactcttaacgaatcgtgtgagagcctttttagacgtagaataaaaaatctcgcgttttatttatatttctctcaaaaatagtggaactttattattgcatttatcttaaatcttaaattcttttacatcttatcttttaccgaccggtttcccaaaataactggacttgctttttttatcaaataagacaacatggttctaaggcccataatcatctaacctttacgaaggcccagcccaataacagttattttttacgtagcccaatacagttttgaaatgtggctattagagagaaattagaggcaaaatccaccaaaattttgctataactacaactttaaaagagtccggacagtaggaacaataagaggagaggccagctctgaaagaaatttggagtttgcgaagatgaatgagaagtgtcaagttgaatcgagaaccggcaattatcctcagaaggatcaacagtagtgatcaaaccaagtccaccaaagttgcagctttctgcactgtgatcattttgctggtacaagctattgaacgcgtatgaaacgttgcctggccatctgatgcctgaacacgacccgccaggaagtatcgatgtacagtccgcaacagcacacgcttctaatgctcttgctgacgcgtttgacaagtccttgttattgttcaccacacaccacttaggaggaaggtactgaacattctgcgcgtttacctgattcttatggttgaaactgaaattgtatttggcttgaccgtcgaaagtgaacactccccagtgcctctcaaagttcccagcagataagtttctctgatcttcgtccaagagactttcaatgtaggtttcaacaggaggacgcgggagagaggccgtctttttctccaagtgaactatcagtcctttaaagaacgcctcagcagtcagtgatgttgcattttctgctccatctgtaggccaaccgatctttgacacaacgatatccacctccgaaaacccaattgtgaacaatgcagagacaagtgtgtcatagcttagatcaaagctgtttctgtaggttttacgtccgtctttgtgagcctttgctgtttctttaaagaggctaaagtcaagggagatgttcttgttctggtgaaagcttaggaaaggagagattgtcacaaaaaaaggagagtggtgctttgtgagaaaggagaggagttcaatcatcgtcttgttgaggtcagccctaaagtgtcctgaagaaggtcgaccagattcagaaagaaaggaatcaaagcttgaggggactacaaccttcacttcatttgccaagttcgccttaactaaagcattttggatattcatagctgccccaatcacaaaaggcttatactgattgccatagctctggagaaatggctcttctccaactgctacatacctgaaaatcaattcttttctttaatgataatttcacaataagaagattggcaatttggcattgaaacaaatccgactcattcacattccataagttaaattccagcttaaaaatcttaaatctatatatatataactggataagcagaagagaaggagaaagaagatactcgattcgaactctgtttccaccgttgaagtaacgagtgacattgtcatgtacccagctctctgctacctttacggatgcattcaagctcttgagcatcgaattttggattccgatagtgacaccaatattagaaccagagagagctcggagaacttttgggtcggcatcgaagagcttcactttgacaatgccgtttgatttcagaagctctacaacctttgaaggcggaagagggtgcgacgcttctgtcccccaatttatgccaactgctctgacggttgttcccgtcaagctcaaccctgccgtgacggcgaggaggaggagaaacagccgacgagccatcaaatccagtgaatctcgtacttccacgataatgtcgggccgagaaattcaatgtttaaaaaaacaaaacactgcgtgccgtttcacgactcagcatctcactgttatttagctatcaaaacgacacggtgtttagaaattgggcttgggcttcacattccctaatcatcatcatctctgaaatagaaattatctgaaacttagagagacagagagagagaaagctcaaattcaatcatcaatgttaacggacgagagagaagtagtctgtgtcaccggcgccagtggctgcatcggctcgtggctggtccatcagctcctcctccgcggctactccgtccacgccaccgtgaaaaacctccgtaatcttcacaaatttctctcttcgattacgcttctggttaccctatcacctcctaattcccttacatttctgtgttgcagaggatgagaaagagacgaaacatctagaaggtctcgaaggtgcagccacacgcctccatctattcgagatggatctcctacaatacgacaccgtttccgccgccatcaatggttgctccggcgtattccacctcgcatcaccttgtatcgtcgatgaagtccaagatccccaggttctaatctccactcccaaaaaggaccaatagtgaatttgatcacttcaaatgtatataaataaatgagtgtattcacagaagcaactacttgacccggcggttaaaggaaccataaatgttctgacggcggcaaaagaagccagtgttaagagagttgttgtgacgtcttcgatatcggcgattactccaagtcccaactggcctgctgataagatcaagaatgaggaatgttgggctgctgaagactactgcaggcaaaatggagtatgttattctctaatttaagatttgttactgcaaaacatcttattggttatctttatagatgatgtgttgttgttggtagttgtggtatccactgtcgaagacgcttgctgagaaggcagcttgggaatttgcagaggagaaaggattggatgtggttgtggtgaatccaggcactgtcatggggcctgtgattcctccgtctcttaacgctagcatgcacatgcttctacgccttcttcagggtattttggttctctatgaatgtttgattgaatatgtcttgagttccatggaacatctttgaatttgaatagatatggatgcttagggtgcacggagacatacgagaacttctttatggggtctgtgcatttcaaggatgtggctttagctcatattcttgtatacgaggatccatattcgaaaggaaggcacttgtgcgttgaggctatctctcactacggtgattttgtagccaaagttgctgagctctatcccaattacaatgtccccaagtaagccacaaatttttctttgaaacagacgttatatatagagagagagatttcaataacttgaattggaaaaatctcttaggttaccgagagagactcaaccgggtttacttcgagataagaatgcatcaaagaagctcatagatttggggttaaagttcatttccatggaggaaatcatcaaggaaggtgtggagagtcttaaaagcaaaggatttatctcttaatacctacctctgtaactctgtttgattgagcaattaacacaatctctaggcagcagaaacatttcatatgatatacgattttgcacttttgtaataaataagctggcctatggtatggtatgaacatccaattaatatttattaatctggcctctctgagatttttctttaaagtttgaacatgagaatatctttaagtgttttaagtgatttagttttgtttatataaatccagtgttgcaattatcacgaaatgtcaatatgtccgagtggttaaggagacagactcgaaatctgttgggctttgcctgcgcaggttcgaatcctgctgttgacgttcctaattaaatcgtttttttcaatgtaccatttttcttttgtttggtaataatatgtccgcgattaataatcagtctattggactattggtttaccaagagaattaatgctaggttggtcactagtccttttcaaaattgaacttgtataattaatcaaagaccacccactattattttttgtttttgctattctaagataaatgaattcttgagcttgtaccattattcctcttttgtaaatttcatggaaaaaaaaaaaagttgtccacatttctaggtgtaccaaatgtaaatagtatcctaaatcaaaacaagaactaaatcttttttttagaggttggatttgtaaagaagaacatgaaaataaagtgaaagtaagaagatgatgatcatcattcctaaagcttttaaaagaaagcacctgaagatttatgacttttcagagaaatcacgactcacgttagacccgagacttcgcacgtccacacatcaccattacacactttcgtactgatctatctatcaatcacggtgaaagataataaatgaaatataaataagatctcattttactaataatcggtgatcgtcttttccatctatataaattgcaatttacatctcaaataattaactaaacgaaatatataatttataaaaaaagtaaagaactcaagaattactataccgtaattcttttaagattttagcatctagctagtagctggatcgtctccactataccgtagttgcagccgtaacgaccaaagcagcaccaccacttccttcggcatcgtctccgtcaccggcgattggagttgccgtgtctgtatgcggacgttttcttttcttcttgtcgtaaggaatccctcgagccttagcctgtgtttgacggacttctttaagatagatcctaacagccttggcagcgaaagggtttgactcaggaagaccaccgccgatttcctcgaaagcagcccttagacggccgatgagagcatcgagacttccccaagcttgcttgagagggcaagtgcactgagacggtgggttaggttgtccgaagaagggacaagccgtggcatggactttggtcttaccaaactggtcgaggtacttaaggaactcaaggacgtgtgcgccactacaacgagacagattcagaggtggcttgtggttccttagatactgaaggaaagtgttccagtctcgcctcttttgagactcgtaccggctcggggatgaggaggaacttgccgctgctttggctgcggtttctccctccatctttgatcctatggttatgtcaggacgttcttaagatattagggttcttgactttgttttgagtctttgtgtgtgtgtgtggatcgtgtgcctgagagagagagaagaaagagagaggcagagaaagagaagaagagtttatgttcagtcacaactcacaagtcagaagcaacaagttggatttgattattcatattgtagtttctcacttcttttttttttttacttcagtttctcacttctttttacgtcccatcataatatttatttatctgactaccaagaaaatggaaaacgagacccaactaatttccgattcacactgtattagactattactctattagctttgatcactttgatttctgtaaatgatttttttttttttttagttttcgatttgggtcgtatcgttaagtaaagaatcacatctatttttaaatttggtttaagaaataatcacggcgttaaaggacatatttttcacgaagtttagtgctatatatatgtttaagggaagttaagttaacgacgttaaggtgactaccattcaaaagctctatagtataatttatatatcccgtgatattcatttgttttaatcatttatatgtacataactttattgatatcttgttgatacatcaaatcatatcaatggatcgtcggtccaatatttattccattataggaaatgcaactttgtccctttcagtttcatggaaactagttaatttcttaatcatgttcactcatcaaagatgataccaaagagtcattgttaaatgtgtataagctgcttaattagtgttttattgacggcgtgtataatttcttgtttattgattaataaattataagggataatgatttatcgttttcgttgtgtcttaatctaaaaagagtatcaatattcacacttataaaattatttaacacttaaacccatgataaatggaccaccaactaccacatagagctcaaagtctacaaaatcttaatacaatgcatatagatcatgcaagctaaattctcaatttatgtctatcagtattcaactagacattctatatatcatacaaggtccataattttggggaaatcatggaatcgccttatgatttggttaataatatatatgcaactatgcaaggacttattgcgatggaattgataaaaatagaaaaatgtaaaggagaaagaaatagtgaggagttggtagtgggtcaagaatcaatgaagaaaggtattggccattagtttctaataatctaatccacccaatttcatcactcatttacttaaaacattcattataatgtttagtgcttaactgcttatatagtctcatacctatacggtcactctttttcactttagtcccacaccatctcgtattttatatgtataaattaggataaagaaagaaaaaaaatatttatgtatcaggatcatgtcaaacatggcaactatttaatcaaaatctctaccacaaaactcttaaacatggcatcatttcttctatacacatccaaatatccaatcatcaaattaagaaacaagaataagaacgtcatctctaccaataacaacaacaatatatattatcaatctaatcaaacatttacatatgaatccatcgtagcatgatttcttttcttctaaatcttatttggacctacaacgtaatcatactttcataatggtgtacaacatataataatttgtcatattaagctatacaaacatagcttaataaaaatacattatctttttactttttttcacaaacaatcttaatgaccactcaatctaatgcttctagaaagatagcatcatcaaatgatgattacactttataatgcaaaagtaacaaatctaatcttcttgttgtctttttaaaatttggttgcgtgtttcgttttaattatgacgtcggaattgagagatctctcattccatgtacgtcctttgtgcccatatatatttgattgaatctttgataattcaaaactaaaacatgtttctcacagtttttgtgactgcctcatcatgataaacacagattcgcaaatcaatcgttgtctattaatgcaaaaatttacgcttagaaatttgttcaagcagaacttcatttgctaattttctattacagaacaaatgtgttgtatcgtatggttaaattaaaatgaaaaaaaaaaaatcaatcgcaggaagtaacagagagcccaacccggagatcgttagatgttccagacacatacattcggtgtgtctcgatttcttctcccttccggtcacttgtggccgccacatcagcagctgccgcgtaatggattccgttgttgacatcgtctccggtggagaaaatgatctccctgagaataggttcgtgtccgtttagaagatttcccatactgagcacttttctccaagactggttagccgatggaggcgagaacagattcgacaccacttgtctttctcttaaactcacttcctgtctacttacttccatctcctgtgtttcaagtgaacaggcgttacatcatacttttatttattcccatcagagaaattcttgttggtttaacgatgactcaccgtcctgcttttgttctcttcatcatttgcgctcattcccattgttggagcataaacgccatagaagtcgctgaatattacttgagcaaggcgtgatgcgtccaggaactttctgtgaatagatgccgcaaccgctaccaacttctccacgttttcaaagaccatgcagagacgtttcaggtctttgacggtctttgctttatccggaagattgtttcctgcatccaaatatctgttatatagaggcaagagggacggaaggagaagatggctcgaagggtttggataattagggagaaacaaaaatattacgttgtagagcccccaaagtaaatttcatgatgaggtagagttgctccaatttagaggtcatttgtctcatgttaccgacgtttgtctggttaagagtgtcagctgatcctctgaaggctgtgcagaccatttgctcaagaagctgatgaggccgtactgtttccaggtaatgaacaatctgagaaatttatcaagacattgaggtcaatcttaaccctccaagaggttatcagcatgaatgagagacagaccttctctccctctcggttcgggtctaggagaggcttttggtcatcggctggcaaagcgggtgcatcattccaactttttctccacaagtttccttgatcagacatccgttgagaaaggcggccacgaggaggccattcatctttcgagccttcggtgctggggcctgctgatggttcagtggttttaggttcaaagctctcccaatctccaggtgaatgccatctgataaagtcctcaaacactgcatctgggtttgccgctttgaatgctgacatgtctgcaatcacctttggaaaatcaggaaaataagaagcaagggatgtatggatgataggtttctaaaactagaagcacctatccttctcttccaacctattcaaacttagaattagatgacagaaaaatctagtgaacagttcttctctgttatattcatcagagacagaattttaaacctcaccagataataagatgtctttctccaattggccaggaacgttctgaaattcaaagggcaaaagatgggttctttattagacaaacaacaaaatgaacaaaacataaaaagcgatcaatcatgttttttcttttcctttttctgtaagggtctagatataacgcaagagcatatagaagaaaaaccatatatagcaaggcaacacatctacacatttgttatgaaacattatctttatagaaactttgttttgtagataaccaaacgatattcacttctattggaaaagatgttcggcttacaagggaatcaccaaacgcctcaacagcctggagtctttcttcatgcatgtcttcagtcataagaggtgggtcctgtcatagctcatgatatctgagattgttcacgataagatatgaaacagccaaggacaagtcgatactaacctgggtaaatggggcatggagttgctgacgtgacttcaggagcatcatcgtccccactggtccagctgaacctctcctgatggcatctgttgggctttggttcacagaatttgtgcgttcagttttccgctcaaatctgagttgcttagatgtatcttctgcaattgagctgtatgcaaggaaaaggaatttaaacacccttagtcaagatttcctctctatcaagatttaacattcaatcaagagctctcacttgctaagttcacctgtcacgtttcctccgcagttcttcttccgaggatgtatttcttctcttgtcgaccttgtggtgttcctgagaatttattcaaagaaatgtttcatgccaacaacacaggcgcatcaggaatttatatttaagtatttacatggctttttttaatttaatgaaacacatactgccagcacataacaactaatgtacgatatacaaaaaacttagccaattacctccatagaaacagaagcgtctgaactgtcatcacttcctatacagtctaggaactcttcattcatttcacgttttttttcgatgcaaattgcaagctgatcacaaagaagaaattgttagtatctacaagtaatttgaaatttccgattaaggatatatagaggattaccaagtgtaacttttggttgatcaaacaactggacaaatcaatagaaccgtcaattggcattttcggcaacggctgtgtctcttcccaacaccatcgaacttcacggacaaactctatccagagaaaggcaatggctagagatgggatgcagaaaacaaaggaaaaatacaacacaagatattaatcagataattcctttcattccgtagctggcagtttaattcattttccctataatgatgtatggctggccaatgtggcatggtctactggcacataccacggatattgcaattgccaaaccacagtgagtgcaaacagaattgtgtaaaaagagattcaagcggtgcagccttaagagctcgagaaagcctgtgttcgccttttgtaaaatctgggagtttagaccctgaaagagattggaaaaaggtgaaacaataccacatagctggattctaacaaatggttctagctgcaaatgcaaaattcatgcatcaaattttagatggtttcaaagtgaataatactacatggtaactcgaattcttgaaccagcaatgataatcaatattcaatgttgtgaaacagaacacaagtttatacatgcatctatgttcacacataatatagtcgaagtataccctcacgaaagagatctttaatcacccgatcaagaactgacggaggagggatgaccactgaggtctttaaattttcggagcttggattttccactgtgagagattaaaagaaaaaaaaaacattagacagtggatatgtcaggaaaatctaatgctgtaagataatctaagaacataagggaaattatcatatgctataactcattctttgatagtggaagtttctacatgtgtttgatgtatgaggaaaaaaataaaagcacacaaatttgcggcagacctgacacaaaatcctccataaactgagctgagaaagacgaatccaatgcttcaaccaagcaaagtagttgggaagcaaaatcaattcttttgccatgtgaaggatcacccctggtaaagctatatttgttataaaactggaagggaaaaataatataccacaagacatgcaaactactattttgtccaagaatgagaaactatgagaagcatttcttacagatatggcgagaggattgggtgtaaaatccacttctcagcatcatggggtgaggcattttcaagttcagccatctcaagtgtgctttctacagtcctgtcagcccatgtgaccaccaattcgaatcctgtccatatcaaccacaaagttagataatgaattccttgcattgcatatacaatagcaaaaagaccagccaatacttgaagaacaatacataattttcatcacacatcaattatcatctctgtgtatgttggaatacagaggtgtgatagaagcagttaatagcatcaataatatctactatagtttcaacttaaccaagtttattatgagggtaaaccatggttagtttagctttcttggtttggtctatgtctatatataatgtctgagagatttgggagagtttacaaattcctcagtttcatttggaatgcaccaaagatctatgaaatacccttttctataagctactcgtatcaaggtgtataaagatagctaataaattagataaatgagttgtataatcatgggaaacacacacatggcctcaactattccgaaagactgagagtaaaaaacaaatcctcaaagtaatgtattgtgtagactgtagtccaaaaagatacgaattttattcatatgatgcatggatgtacctcttagtggatcttcagcagagtaccactcactccaaggacagtcatcatcccagagcaccttattgcgtgactcagaaccatagtgttctgcagtgtctgatttgtcacccataacctcatccgtatcaatttcctcatcctcctcgtcatatgggaaggtttggtatgttagcctcatcataaaatggactctgaaagtatgcatcgagaagtccactcctgaataaaccttcaaataataaaatgtcatcgatgaatacaatatctagctaaacaatttaattacgtgatagaattgatggctaatgcttaagtttcaggtccattttgataagcaatagccatactaatggacatcactaattaagagccacgaagacttacaaacttagaaacaaacaactcatatagcccttccaggtgcatgagtttcacgggaacttggctgccaacacgatctgcttcaaatcttctagtaaaaacagtgcccatattctggattccaatatatgctttgcgtgaagggtcatgcacagggacaaaggctggccacaagctagataccaaagtagtataaaaattcttaataatcactcaaccaaatatgcgtctaatcattatctacttagcaaagacagggataacacatttctatcaactctgatttccaagacttcggagtaattggtaggcaatttggatcaactcaaagaaacagtgtatcgtaagagattcacttgacgatgcaaaagctaaagtgatgttactggctaggatatcgtacctgccacagttagacaaagcaatagcaaccgcactcagaagcttgctagactctggtgtatcaagaagcaccccactggcactttgtggagcaatcaactagaagatgccataaaaatcaataaaatatcatatatgtaaacgggcaggaactatttcaagaaaaaaaaaaagtggatttaaagtgtaccagaaaatccttcaccccaaagcaaagctggagatcatgtgaattactgttccaattaccaattccagctgcatcagtcagatactgaattatgaaacagaaaatacagtttctcccagataaacagcattattttgaaatcatataccttgttggctaccattattatcaatttgaaagtagaactccatacaatagctctttgcaacattcttaagttcgtgtttgaccgtaaacagattctttgaatcctccactgcaacagcacccttttcctgcactcaccaaatgcaggtagcctaagaggtcaagcagataacgaaactaaagtggatttcacaaaacaagactaactccatctttgatcatcaataatatccaaaatagtacaaccagctataacgtccgggaagaagaaaactcgagcattcatgggattctaacgagttctcacttatagaactcgatcgaagatggatgagatcatttggaaaagcaaacgtaccaccaggtttttgggaccatcagctaaccattgacgacaagttgcttcaatgtctgagatgaacctaaaaaagcgacgggattagtaatgacattagtgattgaatcaaagcaattgaaatcgtgaagatgaatacctttcccaggaagaagctagagtgaaatcatcgaaatgttgcacctgcaaaacaattgctgatcattgaatacaaaaacgaacagcagaagaagaacaaaaaagttttaggatgtagtaactggcatacctcttcttcagcatcatcatcttcttcgagatgattcgatttgcttacagaagccataataaattgcgtaacgaatatctctcagtctctctctgagtttgtatgggtaaggaactcttgcagatcctccgatcacacagacgaagagatccgcttcgggaaagaacaacgacgatgatggtaaagttacaggaaaacgtcgtcgtttgaagctgacttgagactttgacaaacggcatgaacaacgcgtgccgtttcgtttgattgaaaaacgggttgcattattgttcgacgattaaaaaggccaataataataggcctaatattggcccattataactttaatgctcaaatttaagtagtgaagtgaacacatgttaaaaactaagaccatctctatcaatggtttcttatctagaaactgttcaaagtatgagaaagagtagaattagtttttcaagtgagaaactctgagaaacccataaaaatatttatatatcatctattgatcaaatattattttattattaaaatttaattatataattaatatttattaaaatactaatctcttttttttactgatgaagatgccttaatcttttcgttgtcatcctaaattcctaatatctgtattttgtgatcattaaaaacacaattatgttagcagggaccacaatccaccactaaaagataattatctgtaagaaattaaatgaaattggtccaacacatataataagaaaattaatgataatttgcaaaattaaaatacaggagcgtagtggatcgagaagagagtgtaaaaatcgtactgctttacataaatgaagtcgtcctcactaaagctaacaaagatgaagaaatccaaaactccctgaaatctgaaagcacaaaacttccattttcatctatctcaagtgctcattgttcattgtcgacgtacaatggctgcagccttggagtgctggtcgagtcgtgccggagatggtggcgatcccgacaacgatctggtcgatcaggtactcatgcgaacgcacgacaggtctgagtccgtaattacgtctctacctgagacgagtttggaggttgaaggttccacgacggtttttgatcagagctcgtcggctatgcagaagcggtttcagcgtctcagccgcaacgtgtcagaggcgattgtgtcgcttaaaaacacgcttaatctggattctgctcgggataatcagagtttcggcggagctatgacgcccaaggcggaagtcagtggcggcggcggcggaaggaagctcgtttgggctactgtagtgaagaaccttgctaagatgtatcctgggagtcaattaccggagaagctcgtatcaaatctcaagaagcattacgattccttgccattcaggtaaacctgagtttctaattatggacagttacatatagtgtgtgtgtgtgagttagcaaatcatggagcaatcttaggttaattggttttgtgcttggtgtttgttgtttcaacagttatagtcaggctgatttcgatatgaaagaagtatttctacacgtcaagttgatagaacaagctgctggagatgacaatcctgtgtttatgattcaagaagtgtctactgaggaacctcgaggttccgtgctcagactcacattcgcctgtaactcttttctatcatggtcaactatgtcaggcgttcttgatagtgcttcgatttgttgcaagaagatacaaatctttgagaagaaggggttgactctcggggttgttcttcttctggatcaatctgggcaacatagtttgtttaaaacccgggtagaaaacaccctcaaggttgcaaccaaaaagccaaaaccgacatctgttaagctccctttcgggctttgtggctgtcaagaacagaacggtggtgtaggggaacttggaggtgttgaagaagagtccattcagcatagtagtaggctagggatagaaaacttgaatagtacgatccagattcaggttccacttccgagttcttcatttgctgtatcagtagatgaatggcagaccatccaatcgggtggcaatgagattggaaaatggctattgaattctgatagttttgagttcggtgatcagattggaccaacttctctcaaaggaattttccgcggtaaaagagtgggaatcgagaaactaaaaggttgtgataaggggaattcctatgagtttgagctccgaaaagattacttggagctgatggcttgtggacacaagagcattctgcaattttacggtgtttgcatcgatgagaaccatggattatgcgttgtgacaaaactgatggaaggtgggtcactccatgaactgatgttgaagaataagaagcttcaaaccaagcagatactgcgaattgcaatagacatagccgaagggctgaagttcgtgaatgaccatggtgttgcttatcgggaccttaacacacaaagaatattactagataagcatggcaatgcatgtttgggaaatattgggatagtcaccgcttgtaagagctttggtgaggccgtggaatatgaaactgatggttatcgatggcttgcacctgaggtcagtattcttttactcttgtctttgttcaacagtttacttgaaaagttagattgtgaaacataatcatgtttgccatattctgatcctttgttacctctaagccaaatgatacaaaactaggtacctgaaagcttgctaagaaatttctgtggcccatatcataattctcatagaaacaaatcggatgccctatgtgcttcatctctattgtccccatatgacccacggcatcttgttttgattttttttccttttgaaccaaataagttcctttgctttttgttttggccatatctgatttaccattttttgtttgtctgggcagttattggatcctcacttttggatacatatatcgtagacaagtgtggatctaatttggttctgtctaatcgtcacaaaagcaccttagactagctaacaactccaatttcatcacttctttagttgagctatacttatctttttttggttatacattagtaattccaaatgttttgaaccgtatgttacgcctcctagctttgtcaagccatgtgcttgcaaatggtccaatcattcctactagagcacacttatataattgtatttggttctacatggccagcctttagttcaattcttggatctgaacacgaagttactagaatttaatttacgtaattaaacctatttttgtatgaaatgcttgaaagcagatcatagctggtgacccggaaaatacgacagagacttggatgagcaatgcttatagttttgggatggtactgtgggagatggtgacgggagaggcggcttatgcatcttgctcgcccgtgcaggcggcagttgggatagcggcttgtggcctgagaccggaaattccaaaagaatgccctcaagtcctgagaactctgatgatcaattgctggaacaactccccctccaaacgccccaacttctctcatatccataacacgttacttcgcgccgtttcacggtaagtttggcttgtatttgataagatcatattgtacattcagattgtaacacttaaatcgtaattatatagtatgtactgatcataatagtgatatgaactgttggaaacataaaggggaatggtgcgtgtaggtttgattcaatacttgttgttgtggccttgaggacccatctcttttgtctgttttaggccgaaatatagagcaaactattatctcactcatttttcaccatttgtaaaaggcattgtgtgtagtagaacaagcagattttaaagtaaaaaatgacttcatgaactttttttttttttttttatagaactttccatgtggaattttttctcactaatcttgaagattttcgacttgtaagttctataacacaaaagcatttagcagggacttttagattcctatttgatagtaacttgtaagttgtaatgaaagagacctaatcataattacaatattgaatcagtacctgatatgtactaacaaaataacgaactcaaaaccaaaaagccaagcccaaatattaaatctagactggagagggggaataaattgcaaaaccacagttccataagtctacgctttatacgatttgggctgtatgctaggcccgttacaaagcgaatccatagacccacaaatgcagtacaatacaagaacacgaatatgagaaaagagaacatgagttccgcatattggttaacggggaagaaggagacatttcatctttagctttcgtcaaaagtggtgacacgtgatgcttttcagaacccaccactccacgtgcccttttcgttgtaccaccaccatcaatccataattattgagtttttaactagattatcactttttagttatttatgtagcttttggctcttccccaattctttttttttctttccacatttttgttgtatgtgcgcataaagaatttagcctgttaaacaaacaataagctaaataatagaccgaggaaaacaaaatgttagcaaatagtactcctacgtttttgttagcagttagcactaattaaactcgatttgaataagtttaagcaaatagtattgttatagcttctttttttttttttttttttttttggaaggcagtatttttatagctttggttgtactttttcaatgttacagtaatcattttgttcgttggtcccgcctcacgtgattattcctctttagtctttactcccacttctctattttctttgtttcatgttctcttatttattttaaacccatttccatttcatagttttttctgttgacggaaaaaacaaactcattaatttttcgttatctatttttgtgtatataattgatcttatttcatataaatactgagattacaaataaaagtcaagatataaatttaatacagtatgaaaaagatatggatacagctgtacatattataggaacataaaatatcattaaaaccatccccaacacttgccagtttgatctttgactttgaagtttgaatacattatactataaagagtgattaatcatcatttatagaataataataaaacatttactgtaatgaatttcatttactcacctttcaaatcttttgtttttccttggagaataaaaaccaaaacgaagattgaacgacaaaaacaaaaacgatactgtggttttggtttatgcagtataatcgataaatctagcaaatatttggggttaatttatatgtggtccgttaatacaacattacgctgcaatctcggataacaacagtttcggacctatatactctattacgagtatttttcccaaacggaaggatcaaatttaatctcatgtggatttgtgttgttctatttatagaaattttaggctgtataatatctatcctatcaatctatggctaattaaatttcctacaattttagaacttaaataaatgcaaagtatcgatagctactacacatctatggtcagaaaaattagttgctatcttattaggatttcataattcatctaagttcagttttaaaataaaatatttattcttaccctgcaatttaattcaaaagaagtattcaagtcttcaatatctttactaaatacagaaaatatcaaaatatttgtaatcagaattcacctcacctgtattaattacagatttgatcttcttattaataagtgtgttcaacctacaaatcttggaaaatggagaaagtattaaacagaatactaactatatttagcatctaatttcttttacctaattataattagtaacgctaaaatcacaaccaaatgttagaaaccaaaacaaaaacaaaataaggagagagatttaacaattccaaaaatcttccaaccacttttttattaaccagccctctctcttcttccccaaatctccattttctctgcaaatcccaaatccatcacaaaccctaattttagtctctcaaaatctccaccgtttctaccaccgtcaatgtggcggccgtggcgtaaatcgtcggttaagattcacgacacatactctccaaccaccgcttccttcaaagacattcaccatctctgctccgacgactcaccttccttcccttcttctccctctccatctccaaaaaccgcttctagagtcttccaccgagtccgtgcagctaatttgatcctcaaatcgtggccaactcgtcaatctaatcacctcctccgcgcagattccgaacctatcaatctaagccggaatcaaaatccagaatcagattcgaaacaatcgaaaaccaaaaccgaaccagatgtacggatttcaatcccaggcgcagagaaaagcattgtcgtatacttcacaagcctacgcgtggttcgtccaacattcgaagcctgcaaatccgttacatcgatcctccatagcttcccggtacgaatcgacgaacgagatctctcaatggacgcgtcattctccaccgagctacaacgaatcttcgggaaggatcagaaccagaaccagaaccaggcgaagacgccgaagctgccgcgagtcttcatcggtggtcggtacataggaggagcggaggaggtgaaacagctacacgagatcggagagttgaagaaacttgtgcaagagttgccgaagattgaaccaggggtatgtgagatgtgtggtggtcatagattcgtgccgtgtaaggattgtcatggtagccataaggtgcatacggagaagctagggttcagaacttgcttaacctgtaacgagaatggtctcgtcaggtgttcttcttgttcatttccacaatctcctccaccctaattcctagattttcagtttttttttttcaatttcaattttcgaataccagaaattggaataattaaatattggtttttaatctaatttttaagaagtttccaattttgtataattcgtaatggaaaagaagtagtttcggattattagattcgtcgaaagaaaaaacaaatcattagatcatgtgatgaacgtgattagcagctaagtactatttgctgtccaagagtatatatattttcaaattttaaattatagatctgaaatgttgtacggaagaggaaaaaaaataaaccagaggtctaaattgttagtataaaatatagcaaaagtagcaaagattaataattgatggacgttaacacatttctggcctaagaaagaatgtatatgtacatgtgcgcattacatttcatgttatttttgacattattattactcgatttataaaaattataacgcttcatagatgaacaattgattgtccatatcgttgagttaacgtacaaaataatgttggctgtttgagtttttatttatatcaaattttccgagaataggtgaaaatgaaatataaccattggtccactgcaaatatttttagtatttatttatcaaaaaaaaaagcaaaagattattattttttaatgatttttaatttgtaactctgccataccatgattttaaaataaatattatgcacttgtaaaaagtaacaactctaatgaatacaatttgttttacagaaatgaatacaactagattttaacctgcggtataccgcgaagacaatttacttttttaaaattaatatatataaaagtttgcaaattatatctatctataaaatatttttattttctagtttacaattgttattaagtaaagtcctttcaaactcgtcttaccaaactcgtcccgtaaaaaaacctgaagtacaccgctaatttaaatatataattaaaataaatattttacgggattgcaattgtattttagtttgtcaaacagatttttgttttaaatagttgccaaaataagatttagtgaattgataagaaatgtatttagatgcgttttgctcattttaaaggattgcaattgtattttggtttgtcaaacattttttgttttatatagttgtcaaaatctagttcaaatgttggaaaaacatgcgtgatatatgggattggaaaatatttagaatgtttttcgtttgttaatcaatttattgccaaaaaaaccatcaattaaaagctaatggcaaccattgtaaataagtttgaactccacgatttatttcacaaaatcgctgcaaaaatgtatatatagattttatatatcagttattatgttctaacataagacattgtatatattaggtaaatactgttatttatcttagttaatttatatgttaatggctttttatcaccttttatggtttttttattttattttatggttctaaaaataagcaactatcattatgtaaatactggttttcaatagttgataatatattactcaaaattttatcacagtaaattccaccatattaaacctaaaattataaagtattttataataccttttttctcatttattaatttatagaggttctggtgttgttgtgtttatgtatggtgtagagctactcgaaggctggttgtgtcgagcaagcactgatccatgatgcttcaaccatcgatccaatcgagcagccgtgtgttgcctttgtacaaatgcttatatataccaaagaactaggtatttaatttgcataatcttgtatgtttcaaagccgttatcgtgtcacatatttggattagtctacaaaatcaagaacatatttattaggtaaaaatttggtaaaagaaacttatcatgatttaaattctatgactttgttaagcaacttgcacaagtgtgtataataaacttcaaactgttgtttcttttagaaaagaaaaatcttaagagagtaatgaaaattggtcgttgggtttacgataattaaacaaaggttgaaagagcatcaaccgttgattagtcttcttaatcctcaacgacgaattcaactgctcctccaatattctcttccttcttccttctttcggaaacaaccacagaagcaaagaaatcaatctcctatgagttccaagagacggcggagattcaatctccgaacagtgttctccatcatcttcctcacctttcttcctctgaatcttaactctcaaggtagttgactaatctctatgtttctctatgcaaccttttgtgtgtctctttaaatgatgacaattcatttcttgaagagattgtagaggtctttgattcttctcaagatcacttcttgatccaatcccgagtttatgcgaaccatcgcagccttatcgatacacctcttcctggcaaagaccctgcccttgatgcctctccgccatctcctgaatccgctatcctcaaagatccattgctgcctccgccaccaccagaaggcaacgaaaccccgagccctcctcgaagtggtgtgccaacacaaacaccagagaccccacctgctatcactcccctgcctgtaccactggctccagctccgtctccgtctcctcctgtgtctccaggaactacaaagaagtctcccaaagtttatatgatcgttggcatagtcggtggggtattcacagtctcggtagcattaatcatcatctttcttatcctcactcgaaagattccaatcaagccttggaccaacagtggccagcttcgcgatgatcttatcacaggcaaacacactcttcagtcttcatctctcttttttctctcttcatatggaatttctctaaatttatagttttgtattggagcagatgttccgaggctgcagctatctgagctacaagcagcctgcgaagatttcagtaatgtcataggatctttctcagacggcaccatttataaaggaactttgtccactggtgctgaaatcgctgtggtgtctattgtggccggttctcgttcagactggtccaccaccatggacacacagttgctacaaaaggtatcagaacctcgtttgcacttgtcttgaactgagatttgcattgccattaatgaacaactgcgctctgtttctgcagatgcataatttatccaaagtggatcacaagaactttttgaatgtgatcggttattgccttgaggaagagcccttcaagcgaatgctggtttttgaatacgctcccaatggatcactctccgagcatctgcactgtgaggatttcatctcctcaagaaaccttgtttgatttaactcgtacactctttgaactgtttgaactgatctctcatctcatggcagctcaatacgtggagcacttggactggcctaccagactcagaatcgtcatgggaatagcttactgtctagagcacatgcacaatcttaacccacccatcttgctctccaatttggactcctcttctgtgtacttgactgaagacaacgccgccaaagtctctgacttttctgtcatcaactccatatttccctctaaggagggttcctcgagcaagaaccttctagaaccctcgttacttgatccccataccaacgtctttaactttggtgccgttttattcgaaatcatcagtggaaaattaccagacccggattctatgcttctcgaacccaagcccacaagagatattgtggacccgacactgaaaacatttcaggaaaatgttgttgagagactgttggaggtggttaggcagtgtttgaatccatactcagatcagcggccgacaatgagagaggttgtggtgaaattgagagagataactggaatagaagctgacgcagcaatgccgaggctgtctccacggtggtggacagagctggagatcatatccacagaaggaaactaaagagaaaggagccgtccttttaggtgtcccctgtatatatacacaaatgacactgtgaagtgatgatcatctttttttgttcctctgcattaaaagactctttactgtatatactaaaaagttggttttgcatagaaaccattggtaagattaataaatggcagcttctttacagcatccatttatagaagaagaaaataaaagttaaatctatttataa

SEQ ID NO: 925 - DNA, 81672 bp, Arabidopsis thaliana
gatcccaatgaaatatacaaatgggataatatggttgataccttcaaattaatctaagccaaaaatggtgttgtcaatggaagaagcttgatccttggatctgctgtagagatggagcgtctcggtgtggttagggtccaaacagagagcagcttcacagtcttgagtggccaatgacagattcccagtggcctcgtgaaatgctgctctgagatgcagcgtttgcagttctggtctgaaagctatcgcctttgacagctcttccactgcttctgtctctctctgatcatccatcagcactgccacacatacgatcacttctttaactactagaatttataagatgttaatacagaacaggaagagttagttaccggcagctcggtatctgtagggataagttcgcagagggtcgagtgttgtggccatgtcaagatcttctttggctttttcacgttcacagtactcagaccgtttctcgtaggctgctgctttgctacacgacttctcgatcagctttgtcatctcctcacaagcttctttacgttggttcttcaaaaaataaactcgcgccagcccttggcgtgcacgaatgtgtttgatctctatagcgttcttatatgcggtttcagcttgatctagcatccccaaattgatgtagatgctcccaaggttgttcagagcctgcagaaacataacaaaacgactaatcagattacagtgtgaataagagaaagagaaaggcgagacatcaaaatgccaacctgtcctttgcgtagcccatctgaaggacacttgagggcttcctctagaacctgaaccacacaagagatctcgtctgcatcgagattcttgtcagctagagcatatgctttgaggaaaaatgcttcaaaggatcgctgaatagagattgcctcctcagctttagtaagagtttcttccacataacccatgtcgtataaaagccacccttcgtagaccaacctttctgcctcagaagtagccaagttccatgccattcgcaaacacctcatcgcggctccttgacaattcaatctgttacagatcacaaaaaaatgtagcttccgtcaactcctgaagaattcaccaatcaggttgccagagaaacaaaagatattcttcttaccttaagagaagaagagattgtctaaacctcagaaagtttttgctgggatcattctgaagcatctgatgaacaacagccaacgacgcaacatcatccacagctgaccatctatcgaaaagcctcacccaacaatccgcttcactctctacttcaatacattgcgcggtcagagcctccaccaaatcatctctcattttcccaccaaacacaacataattgggctctaaagacagcactgctctaagatctctcaaacaactctcccggtcaccagtggctaaatacagccaagccctcagctcgagacattctggactaagcttgaactgaattaatctatcaatctcttggaaggcttctttaatctgcttctgttcgaatttcattacggctctgtacttgtacggaaaagacagtgtcgggtcaagttcagtggcggttgctaaatcttttagtttctcaactccaacattgtacagagacctctcctggtacatccatccatgtggcttgtgattagagatgagaaagttcatgagcctgtacgccgaatacctcttcccttgtttatattcagttcttgataccccagccaaagagtagacatgccctaagcttgaagctaatctgaaatgaaactgggctgctttgtaatcctttctctcaaacagaacacatcccatttgatgcaaagacaaagccttttgccagtttgtacgagcaaactctcgagttctctctagcaatatcagcatagtgtccgtcgtgagtttctcttccatgcctacttggctgaggaagtagtacaacaggaacacacactctgaacccagaaaagctaattgctcttttgcttcggaactgcagaagaatctcatcactttgggattgtgaagagactgaggaagctctctcagaaacacctgcaagcaagcagataagagaagcgttgtgcgttcctccaacgcgtactctacaaaggttaaagctttatcaaggtcagtgacagaagcagccaagcgagcctcacattcagacttcagatcatcgcaacagaatttgctggctaattgaagcagctcaaatacagtttccacacgaaacagatcaactcttttgattctactatatatgttgagtgccaacattgcctcaatagagatgccattttccgagaaatcaatctcagaagttgttgattccacgaaagaaccatacaacatggcctcaaaaggacgcgaaagcgctgcgattctcgacctaacacacttagccttctctgaacctacgcagaaggaaatatcgctaacctcatctagacccgaaaactcatcagccttagagattttaacgtcatcactaccaaattcatcctcacataccgtagaacattcacaaccctcgtcgtctacattcaaatcacaaccatgagtcaaactagtcttcggacattcagaagcaagcccattacaatccatagattcaactcccacaagttcatgttctctcctaaaaaatctcaaccaagcagagaaaacaaccttacaagggacatcaatggcgtgcctcctagcgttgagaaggcacctacgcaagagcttggcatcaccgagactgcggagaacagcgtactgctcaaggtagagcatcgatgcctcggattccgaactggactcgattctccgatatagatttgataatgactccaccaaatcgataggtttgaggtaagagtccaagggaggctcgaggaggtctgtggtgggaaagccatgagggagaagtgaacgagatttggatttgggatgcccaaggaacttcatcattcgagggctaccattgctgcttgtagagggagagtcttgtgtagtaaaggcgtggacttgagtgcttttaaatctctcaaagagtttgagattgcgcattttgctatatcacagaaatctgagaaaagggtttgattttgaagtaaagagagagtgagggagacggagagagcaagagagagagagagagagagagagagagagagagagagagagagagagagttgaaaacacaagctctgtctccggtgacaacacacagtgcagagacaaaaaggagagagagagagagaggaagaagaagacgatgaagtgtgattgagaatataaattatttttataaaaaggtcaataatttggggagaaaaaagagtaatggcgtcgatttttgcaaacccaaaaaacatttatatggaaaaaaaatggtcgaatctcatatctgtttttctttcttttatgcatttttttgtggaacagtttacgaacttcaacagttggtggttcttattgggtgcgatacgaaccagaccactttcctttctctttcctttttgtgtaaagaccactttccttttttaaaacaatattttgtttctgtttttttggtgaggaaatattttgtttctttgttaaattgttatttttttccatatttgaagatattggtatggcttttaatttgtgaaaatttgggtttattacagagttatatgatgattaaatatagtttagagaattatagatggttggttcgtttcgggtataattaaaataagcctctctgactatccaacgtcattgattcatgtgatgccaagataggtaggttaactagttatgtggtttcttatcggttatctcctatctaaacaattgagcttaacattaaactttgaagatattaacttatctctctaatgaacgaaaaaaattcagttttattggttgattggttatgatttcaatgactaacaaagaaatggtctttaatttatgtacagcatgaatttactcaatttattacatacaacatgatttcaaaaaattgcttaaaattttgcaaaacatttctttactgtgatcacactaatcatttgttaatctggtgtctacttttttactcgctaacgtgagcgtgtatatttatattttctgagatcttcatagttttaggtttttagcttgtagttagttttttttgttctcgatattggaccaacaactatcaggaaacgcataatttattatatatataaaaaactctcataaaacgtactgtattaaaacaataacaaataaaaagtggagagaactatatccagaaccaattctgatgttcttttgcccgcacacctggaaaacacatgcaagtgtactctttaaagataaacatatataccatttgcgaaataattgaggattttttttcttttgccaacagataaataatataagattgtttcagaaaaaaaataaagatggataattgaggattaggttggcattatttgatgcaaaaaatactaaagaaaatctcacattgaaatcaattaaaataattttcttatggtatatacaagttgatgcaaaattgataaaagattaaacaaggcaagagacgtgtggtcatgtgtctcggcaacccatgtgagggaatctgaatcactttttttttttttttttttatgtttctcgaatctgagtagcacaataattgaattgtgtttcgtaactaaattagggatttattaatcatgaaaaattatttgatgaaatcaaattgtggtccgtctagttgacttataccagcccaaattatttagcgaatataaagcccaaactaggcccacaataacaaattatgcgtttcctcaaacgaacaccaccatgtcatgaaccattctagccgaatccaaatagaacgaaactaaaattgctttaatccatatgtgaccagataaagtaaaacactccttttggggaaataaatatccacttttcaccatctttttggtaaacaataaaacaaaccaaattttgtgtgcttgagcaacaacaactaccaaccagttactgtcaaaaaaaataaatgaaaacgtaatcgaagaaaaggtcgtgttttctagtgttgcagaaaatggcaactactagtactactacaaagctctccgttctctgctgctctttcatttcatctcctctcgttgactctcctccttctctcgccttcttctctccgattccacgattcctcactgtccgaatcgcgactagctttagatcgagctctaggtttccggccaccaaaatccgcaagtcttcactcgccgccgtgatgtttccggaaaattcggttttatcagatgtctgcgcgtttggagtcactagcatcgttgcgttctcgtgcctcggtttctggggagagattggcaaacgtggcatcttcgaccaggttttcgatcattcaattcacttaattaaattatacacgcgtcgatttgttgaataacgtttttggaatgttgctcgattctgcaatttctggttaaagcaactttggattcagagtaatggtagtagtaagctttatcgagtaatggatggcattaatggcgaggataataaatcttattagttcaagaaattatagaatgtgaatggatacctattttggggtggaagaacactgcgataaacaatgggaaagtaaccccatatctggtaaattagtgggaaaattgctcagaacccaatttggggatgaaatttttttgaaattcgtgcggtataatcacaatctcatcgtaacttgaagattcaaccatatttatgatatatatgaattttgtaggtttaaatgttgcacaatttctttgctatactttgaaggattatttcttcgtatgagtcagtctatacacatattggacatggcttgtttttttttcctttctcttatgtgtttctccgcagtgacttgtttttcttcaagtaatttggttaggagtagaggaattatctatgattagcaaaaattctattaaacatttttggtttgggaatacctgtatggcttcagctacttgattttgtttctctgaccttatcgtgattaagatatcatctcagaacccattgaatttataagatccacaggctgtctgatgtaggactgactccactttcatggttttattgaatgaggcattggtttaacatctgtggttgacattggtgttatttcttatttttcagaaactcatccggaagcttgtgcatataaatattgggctagtttttatgctttgctggccgctgttcaggtaataatacggagtgaaaggatcgattttgatgtaccagcttgcttttctgcttcaccagtttatttcgatatcaattgtttcagttctggaatccaaggagcacttttcgcatctcttgtacctggactcaatatagtaaggatgctattgctggggcttggagtgtaccacgacgaaggaacaatcaagtcaatgagcagacatggagatcgcaggtagctgaatcgaacaagtgtctgtcacaatatccaacaatctcttagcattcttggtatctatgatcaaaattcggtttgtctgtttattattgcttttgtcacttcacaaagtgtctgtagtcgctctctgcatcagggaactacttaaggggccgctttactatgtactgtcaatcacatcagcctgcatctactattggaaatcatccccaatcgcgattgcggtgatatgcaacctttgcgcaggagatggtaagtacagttagctctggtttgatccaataacattagcaacttttgtcttaggaatttgaatccattgaatgatgattctaatacacacacttgctgttaaaaggtatggctgacattgtgggtcggcggtttggaacagagaagcttccttacaacaaaaacaaatcatttgctggtagcattggaatggccaccgccgggtttctagcatctgttgcgtatatgtactactttgcttcatttggttacatcgaggatagcgggggaatgattcttcgtttcctcgtcatctctatagcatcagctcttgtggaatcactcccaataagcaccgacattgacgacaatctcaccatttccttaacctctgccttggccggattcttactcttctaataataccctctcgttgttatgtatcatcaaataaagggtcgagcttgattgctgatatggaggtaaaactgcattcattgttcccatcttcttctgtatgtacgtattagtgaaacatctcatattgttgttgtccacaaatcttatttttcagctgcaattgcagttgggtacaatgttgtaatgttctatccattagtgagacatatgatgacgaacagtgacgcttctacaatttgtaacagatactcttttgtaacagatattcaatacatgtttgtttgttatttggcctatggctatgtggaaatggattgtttgcttacaacaggtgagggcttgagtgtcccgctccaggaagcctcttctgacaggtcggactggtgactgtaacggcgtttcagacaaggaagcaacacgaggaacaagaggaagacggcgaagctgatgacaagaactaccgtcaagatctcaccatgcatggcgtagtgtctgtctctagtgaaagtaagtcgttcgccatcttcaggactcgaggcctccaccgtagaagttaccattagagaggtaatctcaaatattctcaaatctcaactcctttgctcatacctacttcatactgtcatgcatcatcttggagggatttgtgtctgtttctttttcctctctgaaatataaatttgacttgggagaatatgtatcaaatgaaaacaatatgtcaccacagaagaaaagaagagtttaaatatatttctttgggataatttagtagatggatttttgtataaaggttggtgtagaaagtgagactgggacgttcgttagtgattgctctctacatatggggcgttggattgggtctttttggatcttacgtgcgacgtcgttttcgtaatttgaagaaaatccttttcgtgtggctcccataaccgactccgtgactttcccggaaatttcctcaagagagaagcgaccttgtgtctcatgttagttgcttcttcttctgcccttatttatatgaatacaaaaattaattactctttgatttggcccatttaaaattgctaacttcttcacgcattctcgaaatagaagaaaacgtggtatgcttgtattaattgaatggttctgaaagagacattttcagaagaaacaaaaaagcaattgtgccaaactagaagaagaagctataatcgaggtgtgctctactgagattttgcatgggtgctgcaaaaaaaaaaaagagatttgaatgggccatgagatgggcttttaataaaaaaatcataacagaaattagatgacgtggagtgtcgttttctttctattcgaggtgacggtgagaaggaaaaccgtgtcgtttatatgattaagtaaagaaacgcttgccgtttaatattttagcttggcctgggtgccgtggcaagtcatgattggtggtttcttcgccgatgtaaaattcaacagatcgagagagaaaaaactctctctccctcctccgttcaccgtcgcgactcggctctacagtgtaagctttctgattctacggcgatttcgtttctgtatctatgcttgtagactgggtttgttttattggatgatttgatttggaacctgaaacagtaaagttgtgaggaatgagtagtagagtttcctatcacagaaactccaaaacgaatctgttagatagtgatgatcgacttttttgatttctggagaaattcgctttttctagggctcctgatggtgatggaaatctctctttacgatttggttttgattttctcgcagacattttgttgagcaatctcgtatttagaggattccaatgtctggcgcagaggataataaatcttcccatgctcaggtatttgttcatttagtctcatctcatgatgaattcaattactgtttatatgctccacattctcgttctatgtaaaactattaagatttctcctccttgttaaagtaactgcctagtggaaactaagttagacttacgtttctttgctcttgaactttgcttgcagctttcgtcccaaatttttcttgatcttgtggattcggtgatagctgatgtagcatctgagtgtcatcgggtagcacgactaggacttgatcgtgatttggatatagtagaagaagagttgagattgtcagtggaagcgcgtgcgaagatcgctgatcctagcaacaacctcgaaaccaacaccaaatatgttgttgatatatttgggcagactcaccctcctgtagctagtgaagtgttcaattgcatgaactgtgggcgacaaattgttgcaggaaggtttgctcctcatctcgaaaaatgcatgggaaaggtgatcttattgcttgcatgcctccttatctctgtcagatagtattccagaatgtgttgtttcattgaacctctagtccttactttttttttttttttggaaaccacctaacagggaagaaaggctcgtgccaagacaaccagaagcacaacggctgcacagaaccggaatgcacgacgcagccccaatccacgatattctccttatccaaattctgctagtgagaaccagttagcaagtggatcacctggtgttgcaggtgaagactgctcaaatttcacagttcgagagaacgtgaaaggagactgaagtacaactgatgagaggcttatactgattactgaacgacaatgtggctagtaactgactcgaccagactggtataaatcgaattgctaggtttatattcagttcacaaaaaaagagagaaaagcggcgcaaaaggaaaagtagcggaggttcataatgtagctatttctacagcttactaatggggtatcaatatattagtacatgcaccatcatgttataattacaaaaaactctgtagagtcctcaatcaaacagttcccactgttgtgttatgattgttaaagtgtttggagcaaaagaaaagcacaaaattccggacctggcaaaggcaaatcctgcttggttgcgttgtggttcatgtcgcggttgactgtttgttttctgacaagaaacagtaaaaacagacaagtctttggagcaaaagaaaaacacattcgctggggaatttatataaacaaatcgaagcattattattgtacatcaaccatagggcctaacatgggcctaagcttgtgctgttggttcttcactatatcaaacttgtcatcatcacatacaaatctcattttcatgggccttaaggtgggcttttataaaaaacaatttagcacaaattagagaacgtggagttgtattcgcggtcacggtaaaacgaaacggacataataaaaaaagtgtttgtgattgttccagaagaaatgaaacaaaagatacggtataaaactaatagaggaaacgcttgccgtttaacgttttagctgctgcagtgccgtggcaagtcatgattggttgataaaattatagagtgattgggttcggggcactgcagcagctatgattcagaagtccgccgactcgccacggcacgaacccaatcaacctcatcactcattctaccgattttggcctcttttgtgaatagtttagcttttgtccttagggaagaaatgcgatgagtgatttcagggtttaggtctaaaaatacaaagagtgttagagtaagcaatcaagatagtaaactttgaaaacaacctctcagctcatttgatggaaaaccatactttgatcgaagactagaaatatcataaaggttaattatatgttgtggtcattagaaagttaacgtttttcttaattgatcactcgtttctcgatacctatttagttctaaatcgatgtatgtagacgaaataaactagtcttcaaaacaaaactgcaaagcatggtggtgtcctaccgaatatgaaatgatatggaagatagaagaagaggccaagaataatggaaaatacaaaagcataattttaagtttgcaacaataagttcaacagtagttagtttgcttttgatcccaacccaaccaaatgagaagtgagtgatgttgccctctgagattctttcactgtcgctctctacgcttttttcatctttcaaaatcacacaactccatattttacatgagatctaattacatattacaatttaattaagattacatgaccttattagattttgcctccattagctttaaatcttcaaccaaaagcttaatcaaatagattacctcttttgtaaacatctttctgttttttaaccacacgaggcttttggttattcatattccatttccaaaattgttcacaacaacatttttacttgtctatatataataatatttctatttagatgaatcttgcctcgccgtcgggaacactttgttacgctccgatctactactactactacttaacatcctcatcaacgaactcgatgctgatgacgtcattgacattgatcttctccgatcacttcttgttcctccatcgttgatctcctcatcatcatcaaacacttcaattctaacctcttcttctccatcgtcatcccctgttttgagatcatcttccattacagaaagagacagtgaaactctccgatcaccggagacgttgctctcgttttctcccgctggagacatttgtaatctaacctctgcttcttcttcgacggcgttaacggccagcttaagattttcttcatcggagacggcggcaagaacaggggatcgacagagaggacacgtggaatgagaggacaaccacatatctatacactctacgtgaaacccatgtccacaatttctcaactttctaccaaaatctccagcttcccataaccccaaacatatcacacactcttcttcttcatcctcctcttcctcgttttcttcgtaaacaaacagaggaattgaagaaatcactgaagaatccaaacctttgtcatcccttgttgcagtagcagctggagaagatactccatcatcaaaacctccgagtgggagagaaggtatgattcttgttgtcgtcactgttcttctccggtttcttcgtcttctccggcgatgtctagcggcggcggagaaatcttgatgagagggagaccagaaaaagcgagcgtagaaatggagaagcaagacgaagaggacgactaagagaaggaagactagagcagctaaaagaacattggaattgtaagaagataagatcttgaggaagcttgagagactgcttttgacactcattgagccgccgtcttcttcactcataatcttggagagacttctcttttatctcttgatttctttattttgttggagggccaactatatacatgtgtctagagtaaaagtgtatagtatagggataatcaaaattacgcatattacgaacaaaaatgaaagaaatatattagtcgttttcctttatataataaacccataaaatcaggatatttggtcaacaataatttctcaatttaagaatatttaatagaagtagctaactcattcttgaacctgaaaataatattgaggaccaatgtataattccttatgaataaaaaaaaattatatatatggattacatgcataatcattgtttggaatattgatgaaatgtgatgtgtagaagtacttgaaaagaaaattatgggcctttgtcttttagtgtgttgtggttgcaaccaaaataatagagtttaaaagaagggtggggtttgttttgtatctttataactacattatgaaccaatctctaaacatatgttgatatatatacttccatagatttttttgtgtgttctatatatatactcgattttaggttcaacttcaacacatgaccttgtcattaaacaaattacataatagtcttaatacatcaagtaatcctgcgttcctaaattgtcattagtaagatgaagaactatataaacaaatgagaatcagaaatgggtaataatacaagagaagtaggtaatggatgtcacatgaaagttagcttagaaaagaaggcaagtagggtgagagatcggaagattttacgtgaacataaagcaaaagtagaagacgaggaacgctatgcaattttttcatcaaaacctctttacacgtttctctattaatcaaatcttatactactacttttattcgtttttcttaaaaagcatatattatagtatcatatcatctatacctgcgacatatatattcgatgtgcgcaggacctaaccacgaggagccgaggagggtctttgatggtaaatcttcaaaactaagtgactcgtcaaggcgacggagggaacaaatccccatgattctctaaaatgataatttttttcacttctcaatattatagactatagtactaaagaataaaagaataatgcttcctaaatttcgattagcttaagggtcatttaagagttttcttatatttttgcattattcacatagaagtgcaggtattgtacttgagtggtataataattgtttgtcaaacaggtgcgagaaaatgactttccatgaaaatggcagtcatggaaataataagaaagatataaatgtagataggtgagggggggggggggggagagatttggagtctataataagaactttattgaccaaaagtgactcttcttcccataaaataaggattgcaattgcagttgccaacaccacaacactactccttattttgggcctttatttttccaacttccaagcatttagccttctttacttctttttgacctattttcttttgttccttgttggtcatgttgtaactcttagctttatgcgttcagttccttgatttggtttggtttaagcattttgggttcttttcacttttgagaaatgagtcggagttagaaaaccacattttattttggttttggtttggatataatcgtataatcatataaatataagtattcttgcatataattaactaaaatatgatttttaaaaaatatgatttattataaaagtttagtttcgactttgatgttcggtattgtttgtttttttcgccatttctagtaaatagtaataatatagttgtgctacaaattgtagcctacaatgtacaattgtatgtaagaaatagttggcacatacatcaaagtatcaattatcatacatccacttactagtgctattgtgaagataaacgtttagaaaaacacatacaagggtacttagaaatgaggcataaaagataaaatctgatattcaatgcaggaacagctcatggtcagaggaaattaaatggtgaaagagagatagagaagtgcttaaaacatggtgttatttgtggtggagcctttcgaattataggtttagggtccatacaaatttgttgggtccaaaattaactaactagtttttacttcttagaagcaccacatgattgttccctttgctgcaacaccaaacatgtcaattacagattgtgtaacctgctggccacaaatccatttcggatgattgaagatgaaagcaaggatactaatttgatgccgaatactattatcttaaaccaaattgacacagtaaagagacgacacaatagtcaaacacttacacagcaacaacataaaaaaaaatcttaagattctctttctctaacacagcgcaaagactcaaacttttgaagctaccatcatgttcagtgccaagtataatatattaaaataaagcaaagcacacttagtgatgccaacaaccaattttaatttgatcacttaagtgcttgcctctgttttcttctcttcttctaccttctccttttttgtttctttatcttcctttgcaggctctttctcttctgcttccttggctttctcctcacttatattttcctcaaccgaaagattctctattaaaccagcagcctcgtcgccctgggtgctctctttccctacttgctggctttcagctatttcagtgaacttctccataaatgttttgcaatctgttgatgcaacactatcagttagccactcgagaatctaaaaccaaaaagacagatgcagaccctaggatattaatctcatagattatgtcagcgtctaatttaacatagatacgattatggtagttgtttagcacaacttaaggatcatggaacccttttgttcatttgtttagtgataagacccacaaccgcagagaccaacagagtcttggaaaatggcctgagatgtttattctcaagacaacaatgtctccctaaaattataaaatgaggcaacattataagtattgccactacaaaagcagtattccatttcagtcttgagctatctatatggacttgatgaatcacaattcatgggagacttaaatcatcacaactagagtcttataaagaataccttccaaaccatcttccctgattcaactatcataaattaaacatcgaatactactaaatgtacccacgttactctcaatcaaaaacaagtatacgaatttcacaagtataaacttactctcaatggaagcaaatcgaatgcagaaaagctcatctttcaactcgccgtcggagaaatcagtagcgtgccataaacaagacttttcattcccactatgttcctgaacactcatcccagacgaaactgcataatttcaacaaaagatacataaagtttagccctttcgaagaaaaaaaaaaaagatcttcttcgagagagaatcaaacatactgaggtgattggcacagatctttagggttttagattgtctcataacaagacgaacttttccagtttccttatgcttcaataacttcacagttccagctcctctctccttccattggttcccttctttatcgaatcgatacatcttcgatttcctacaaaatcataaacccagaagaatacatcttctatcaaaaatccgacactcatcttctatcgaaaatccaacactcactttaaccagaggcaaggaaactagaatattaacggaacgagtaacatacagatcgaggacggcgtcttcatcttcttcgccggtggtgactgcaacctcttcaagcctaacgatcggagctacctgagctccggtgtcttcatcttcgttgacttcggtttcatcttcacggttctcacgctctggctcagtgctcgccatctctgtattgaaacttgaaagtgtgtgtgtgtgctctgcaacttctttggttgttcaatttgggagaagaagtttcgagaaccagaagaaaaaactggaaccagggtttttaaactttatatccaaagttaggcttctgaattatctctagtgggctaacaggtcattatctcggtcatttaagcccattaaggccctatacgacaattcatgattttggtatgtagatgaagctagaaagtgtgaactcgtatcgacaatatagaggatgaaacatcatggctaaggaacgccacagctcaaagacctgtaatgagtaatgtaccatatttaaattatgtataatctctttacaaaactaaaagtaatacagatactccacatttatcttggagtagaatgtagatgatgctctatgaatgtactccatccttaacacatacgaaaaaaatttgaactgctttttttttctcagtcgtggactgcctttgtagtgttaaggtagaccaccgtgacaatctttatatatgaacggaggtggattatttatttattaatttttttttttttgagaggtggattatttacaaatggatattatataatgtaatcaatcatgctttgatatcaagctgatgtcactcgacactagtattcaatcaactactgccgatgctagtacaatgtaagctgaatatgaacatttataaattttggaaacgtgttaaacattcaattaacaaattttttttttgacctgttttttatcgtaacaaaataccacttgtttgccttctcgttacagtaggaaaaagaaacgttttcattgtcgacgactcaaagagtagaacctgaagtccgataacagtcgataggtagtaagatattttgaccaaaacatcgtgaatttattgaaatgctgaacgaaaactgatacaacatcatttcatggactcgagaactcttattactggcacggtaatattgaatattgatgctaaagtcaaaagggacccgcttagtcatttgtctgatttccaattttaaaatccgtttttgaatgaagctgcgttgtttcaatgacaaatcttcgtgtttgtataatttagggtctgaaataaatagtcaacaagcaaaacccaaaacgatatgaactggaaggttgtgtcagattacaaatgaatcatcaaagggattaaaatcctcagacagggataactgttttttcatatttgttctcatcatccacaatctaatttcattaaatcaaaaagagaaaacataattccttagaattcaaagattagcctcagcagtcctagtcaagaagatagtatatcaacacacttattgaaatttcagtaaccattaatatctaatcttcatcagcctctttatcagattaaacaaaaaaacattaaccaacaaaaacaaattgaagttgttaaatcatattagaaagaagaactcagtcccttagatgttcataataatgcgatcattaccgcaatcattacaggtctgtaaactgactcatcactgttcttccaaaaacttatacaaaaacccaaatctagatttcaatacgaataatatatagctgctcagttgtgattctcccaaatcaacatcagcaaaaatcgtataaatacgaaatcaccgaagattcatagggagaattatataaataacgaaagcaacacgattgattttgcttcaagggaacgaatcatatgggaacgaacaaatccacatagactatctgatgaagccaatctttcaataaacataaatcatgataatcctagacaaaaggcaagcccaataacaacaatagagagaacaccaaaccctatgaaaactacaggattaaaaacgaagcttttcagtgaattgattttggattgcttcttcttaaactctaaagttggatttcctctatttatagtagagaggttttgagaaaaccctaaaaggcttttttccaataagcccatcgaatgtatttttttaaaagcccaatactgtttgttttgggcttgccattgttaaatttcttgttactatgctttgtttgcatggaataaaaattataattcatttgaaagaaaatttcctcaaaaagtttatacaattgactgattccgtgattaatcttaagattctctcttcgaatgtgttaaaatattactaaccgaataatttgatggaaagagatttaaaaagaagctaatagatgagaagcgtatacaacaactggttccatgtatcaggtaaaccaggcaaacaccaatggctacaatctgcagactggtctggtctagacctttgtgaaccgctaatgaggccgctgtatactgacggatgaccgtcttttcttagggaagagaggagtgttatgtcgagaagaaacgccggattgtgcatcccgtgaagcacttcaacaatcactgatcttagctgatctgtgtaggagctcactggataagctgttcctgtgatcggttctgtttctccgtagcagttcttggatcctgaagacgatgatgccgcccagtcactcgggctgatcaatcccaaaatgtatacaaatggtgtcaggacattcatttcaaaaacatcagaaaatatgatccaatataacaagagaggctgagttacttgtcgtgtgttggagaaatggagaggaacaagacttgtgttcgggatctatcaacgtgagtttcgacccaatacgcccaagtacgaagtgctttctccattgccacaaaacggtccatgtcttggtaataagaattgcctgattgaatcaagtcccatctgtgttcacaagaagatatataaagaaactttcacactagaaaatcaagtcattggaagtgtggtaacttacccttgcatagatccggtgtggctccaccagtgaccagtgttgaagatgaggagatcagcgtcatgccaagcattggcattaccagagatctcatccagcttcaacacacgcttgccttgaacagcatctatgtccaccaagaacggagctttgtaaaatgacattgttatcccataatcctatacatcaaaaaacagttttcttatagaagaacctgaaaaacaagatgtgagccattgaagaataagaagaaagcattaccaagaatctgaaggtggagagaggcaagcctctggtcatttctgtccgagtggacggtgcagatgaaacaataaggcagatcaaagactcccattgattcttccccaatgaatcacccgcaaacattatggttttgcccttcattttcaacagaaactgagcaccattgaacctaatccatttgtgaaagaccagaaatcaaacactaaaaccacagaatctctgattttgagcagtcgtaatatcttaaagtagaattctttcaaatgggtttgccaaaagaatacattttgacaacttagctcagtaaaattctgacgaaatcgaacctcattaccaataacgacacaggtatacactattaccagaaaactcaaagatttaaccacgaaaattagaaaactttatgacaaaaaagaaagaagaagaagatgagtatgtgtacatacgtgggtaaattgcaattctgaggttgccatcgatacttgaggtagtcagagtcaggacgaccgtacatctgacaatcgaactcaggctcaacgacgccgggacaatccgccggtttatagagaggataagagttatcacgaacccacgtgccgaggaagagagagcacgtgctcctgttcccttggaaaccagctgatggtctgcttgaactgtactggttaccactactaccagaggagcttccatggcgtttcttcaagctcagtataatggctgaagaagattgttctggttgttgaagaaccagaaagaaaatggcggagactactgagatgccaagaagaggaagaagagaacccattcttttgctttttcgtggaaaacaaaaaaggaagctgtaaaataattgagagattggagaaatatctttagaaagaaagaaagttttttgagattttcatttttcatctgtgtgtctgtctctgtgcaactgggtatgggtcttcacgtgggtcctcttacttgtgttaatattttacagttttcaaaatttgtattattcggtcatatgataaatttaaataaacttcaaatttcaacattgctaaagatgtgaaggatttaatggacttcttttcttcttctgcatgttcacatggttagtagttagatttataaacgcaacctattattggtagcaattacatttgaaatgaatcttttttctattgatcacaacaattcacaaaggcatataatactttgcttaatcatatatgtttcctcttttccaacttggcaacttcatacaataaataatgatatatatcaagtgtcagaagagaggtaagcatttgttccttcgttttttcttttcttttcttaaattaacacatttgggttgtttcccaacttaagattattatacacacattaatcgtaagatctcaacctttgatgtttgaagattctgaacaggactcgtggtggagacaaagtatctgaggatgctctaaccttggagggttcatacttcatgttaacctcatgcattttgaccttcttcgtgagtaaaactttacaatacggttttctttcttgatcaacaacctttcttcttgtgtttttatttccctgtaaaacaatttaagaatagttaaaaactgtatgaagctatgaccatttctaagattcatggattctctagtcactatcagaagcctagtttatcatctctaggcttgaacaattgccaagaatggtcacgatgtctttgaacttgtttctcagttcgtatctatcatcttattatttatagattgactctagacagttatattacacatgtaaagcatcaaaggcactactaatcaatatcaccaggttagggatccttactctcatggcctctctcctactgtaccctctatatttctattcaatatcaccaggttaagtattggttctctcccaggacccatgcaaggcatttgtatcatgttttttttttctcgttgttggtgtttttggattatgatggagaggagtgagagtttgaacaacatactctggtggatttttagtggacctagactcctcgaggtgctgttctgcctgatgtacttctgatccatcatcagaagcagaattgtcttcaatcctgaggatgtcacactgttgttcacctagagatgctgcatgataagtttaaaacgttattacaagatgtttgagtttgaaagcttacagtctgtaatgaaaacataacaaacatggagactaacctcattggaaaaaaaaacaaagcaaaacatgggcactaacctatacttggaattggatctgctacgccgctcttgatcaagatcttctcgcacaatattgttcgtccgaactccaacaaggtaaatttcagaaagttttttctttcggagattgtcatctttgtaaatccaaatgagttgatccatgtgttcagcacgcatggaactgcaggcaggaccaacctctctactcccaagtcaatgagcacctggagaacacaacattttcaagagaacagttaagaggtcttcaggataagcaaacaaagcttcttgagccaaaggggaaagttaagttttcaatagtaaactaaacaccttttcgagttcattaatcaaaacccggcacatcccacgctggcgatgctggaatctagtaccaataaagggcatttctgcaacctttttccccaaaattctgaaaagagaacgaacagagcaagtcaggctaacaattcaatagaggttttatacaggccacgaaattctggagtttctgtaatttaagctttatgaagtttacctaacagtagccacagaaaccagttcgttgttcctttctagaagtaccgtgtaaaatccactgaagttcaaacgtttgaattttgacctgcagttttagagttaggaagcctgatgcgaaagaatctaacagaaggcttttacatgaaatactttatggtagtaattgtttgtctcttaccatctgctaaaaataacatcttcagcaagatctcttccaccatgaggtctttttacaggctcgaaaagttcatgcatcacatcaagggcaacactgagtatgcagtgattttctgccgcagcctcaattttagaagcgtcatctccatacatatttggttccaaggactgcaccagtctccaagttaatttctccacgctcacctctcttggttttccaataaggtcatagagaattacaaatatctgtaacgaaagtttttttttctttacgtaagagcaatactgagtatgacatgcagtatacatattatcttaactgcagcatttattttcttaggctgcttagttagttttctgatggctgttaacaatcacaaatggaacatgggatttggatttatgtacctcttcacagtccttgctgcaaaaccacttttctcccaagattttatccaatgaatcacaggcaccatcataacgcaagcaactagggtgatctatatgaaccacatagcaaacaaaacttcatatcatttaaaatatcttgttgactctttatattagcattagggaagtattccatacacttaagttcgcattgcttgcaactgataaacttttcctccttggcatttgtgctagtagtctttagaaagaattgtccacatgcaccacaacaacatgactggcagaaccaatcaccatctggaacatcctacaaattccaacaagaacgtgttcagaaaccacaagaaaaagcggtgaagtttcaagaacggtcatagtgaaaattggtgaaaaagatcaaacctccagcccaagacaatttgcatggaaggcggatggacatccatcacagagaatcagtttgccaccatagtgacaaacggagcaaaatacatcgttctccccttgacgcaatttcatcttcaacatatcaggtggttgtgctttctttctttttttataggcttctacttggcattccaaaagagatcttccatcatccaggaaaatattggctgctccgctgcaggatgcaccattagcatgaacttcaaagccatttatggtgaaaactctacggcaacaactgcattttattccctcacgggttagtttcccctcttttctcacagttgtatccttttggttacagcatcgtatattttcccttggtagaaccacattgttgtccatgagccaggaaagaatatttcgtggactgtgctttcttgagatgggagttattactcgttgcgctctttttcttgatcgtaacacacgggttttaccacgactagttactcgattcttgatatccattaacttttttgaagtgtgcccccttctcatgctccgattgacattctgtaaacctacaatcacttcgtccttcttaggtgtctgtttacgcttactttttaaccttaggatgatgccttgagcttttgtttttggctcgatcctgacacggagtgtctctttctgacccggaaaggcttttttgggacaaaaattgcggctttctctcgtaaagacctcctcgtttccttgcgtttcatactcaagcaaggtatcagtagacagcttcaatccttcaccaagagcgacacttctattaaaggcaggcaatgccaaaacaatagacctcatttcctgggtgctatacgtctggttttcactagacagagaaggagggttagccatccccggagtagtcagggatttatcaggttgtttcagtctgaaacatacttgacgaagagaatgctcttttagtcttccatttggtgagaggtagcgaaacctttgccttccagcttcgtctaccatatgttctatggtccatcccatatacttaagatgcatcctgacatgcatggccatgggcagtaacggtgacctgataaagctcgacacagcttgtgggcctgatttagcaagacagtcgaaaggatgccagattccaggtttcttgtgtagtatatcctttttatgagcggcagtagatttcttgctggaaatttctgttgccttattgatgtcactcgcctctgaccttatgccagaaacagaagtcaagacagacaaggactggcatctctggcttgccggtttgaaatctttgtcaatgcaggaaaattggtgttcttgtggagcaatcgttagcataccgctaagacaagcattggtctcataaaccgcctgagaagcttcatttaagagcttcaattgagggtatctttcagcgtcaaaatcatgaagaaactggtcaatggtgattttaagattatcttcaatcacccccagcatcaaatcttgccataaatgcttagtagagcaagtccattcttgaattcttacaaaaccaatcctgtctcgtatgtcataccaaagttgctttaccgaaaccgggagatagttatattccttatatatctcaatcaaatcaagaaacaaccaactgccacgacactcccacgtctctgtagcctcattccaatcctgagtaatacgtaaagattgaagatcagcatccaattcatcacccaaatcagggaaaaacaccctccttttctcagaaccattctcgtggtcaaagagcacaccttcccaccaagcatcactgaaaaacacatcgacgcagagcccatacgcaaggttcagtttagcaacatccagctttggcggcacaggtcttaaacgtccacggaaagtatcagaaacatcagtgcaatcatccaacccttctactatatcagaaacatcaacagtttccacaagattaccagaaccatcatcagagagaatgttgtcatatctgatacaacgccgacgtcgctttttagctgaagttacagttcctaaataccaagaacccagagacccctcttcaagactccttacctaaacaagcaacacaaatacttttccaggattagaagacgaagcaacattaaaagcaacatataagtttgcactaaaaatggaaactactaaacttttaacatctcaaaagctaaacaaaaagctacagagaaccaaaagtgattataatggagaaacagacaatgtagcttttacaaaagttgaatccatcaattacactccacgatgaaactcaaaccttgaaaaaaatccgaaattgctcaaaaggttgagaaaatgaaaaaccctataaaccctacaatcaaaaagacccatggtggaaaggaaatagtcaggggggaaaacaacaagcgacctctatcttatcaccgtcgagaagctttttccggcggagatttcgtctaccggtgctgttccagccgaatatcggctcttcttcctccgccgctggcattaaaagcttcgagtgagaaatttggagggaaaacaaaaacaaaaaacgcagtgttccgatagagcttggagaatattgaagagaagatttttgtgggtaagagaagagatttgggaggtacttgtgtgagtagcagctttctccccaagtaacgctgtactagtctctgcaacttttttagtctaatcccaattaaacagcgagattaattaaaactaaaggacattgatgttgttttttggttgatacacgcgaaaagagtggagatttttaattttggtcaatttgcactatttcctaattaaaaatccaaaatttacccatttcaccctcttatttctttatttcttctactttcgtactattaaagcttgctcatcactctttgactttgactctgtttttcactcttctcagatatagctcatgaatacgacattctttcttcggattcaccatatgacttttacttgtgaagatagtaagatactatctcattagttaccagttctttttatttacgtccatgaagaagaaattggcttccttcttttaaatcaagaagatagactaatgggccaaacctaggtctttaattatgggctttgaaacagatcattatcctcgtatagccccgcatcggtatttctggcccagaagtgcttggcgccaagtcgaagagagataattcactgcatttaggaccataaaagtcaatatggtctgtccaataaggctctgccatttggggttttgtcgcagcgacgtcggctgataaaatagcaaatagcaatgcttagtcgctttcagttggtcccacatgcttcttattccattcattctagtcagattatggattcttgtgggtccttttcctaattgtacacttagacttttctaccttttttccctttttatttcgctttatatcaaaattaacctaacaatatatctcatcgtgaatacaagatcttgaccgtctgttttcagcatttttcataccattgtcttttgagtgactgacttataacaaatttttaaatattgatttgacattgggaatcaacagtgtttatgttaagaaacaggatataattatctaaaaattaataatttgtcgtgtatatatacagtatttgcactatcatattaatattatgactttacttatttattagaactgtaaattagaagaagagaaaataaatggctttgtgttatgatgtgagagagagccagtggagcagcttcgttaatgccgctgcaaaaagcattgatgggttcggttgcatgcatttggatttggtctggttgcaatacaaaacagtagtcgttttcaaaaaaatattattatacatttgcaatttatgactacttttatatagtagtacaacattgtcatggatcacgaatcactatcttttaatataataatacaagcatagcgacagaaaatacaaagtttggtaaggtttgttcgaattctttccattaccgaatttaaatacacattattttagtctcttaggatatttgtattacctaatcgtctttttgttggaattgtcgaccgaaaaaaactgaacataaacgtcaatttctcgactttataataattatctcaattatctttaaactttatgataattaattttgatgaatataactcaaatcaaagctatgacaaaagagagttgctatcaagcgaaacccactcgagacggttccgattctgtgttttggtgcatgttgagattattctggggcggtgacaaaccaattaaaaagctatggttaattggttatataactctaggtaacaggcagtggttttatctttagctcgtgaatggagaagaaaagtaagtagctcattttaaaaacatgctgacgatgcatggtttccacgtcatcccaccaaaaaccggaaaaacgcgtgaagcgtgacaaaaccgatgagcgaagatcctctgtgtgaagtctaacgtacaccttcatttccttcagactttacaaattaaaattgaaagtaaaataaataaatagaaataaaaaagacgagagagaagtagaagaagaatgatggagatggtggttttgttttattatttagagtaagcttcttcatttttttaaaaacttctattattttgaccttaagaagaaagtgacaaggagaggaagaagaagaaaaaaaacataatttgaggaagaagaaaaaaaattcggatttgttttttcaataaattgactaattgagtactcgtttaaaggaagtgaagagcggttttttggtagtggtggtcgagaaaagagagagtttgtctctgtgactcagaggtagaaaatctttactctttgtttctttgatttgattagtcactaatttagtttcagttgaatccatatatgtcgatttgttttagagtttgcagtttgtttttaattgttttgctgattggaaaatgagttaacaatatgattagttttcgatgttgcaaaagtggttaattatggatctgttggtgtttatttttggtttggtttgttttaaagttggaaactttgtatcccaaactaacaaactcttccttctctccttagcttaatcgtttctgcagtttttatttctgttttgtatgattttgttctatgtatattaccattttaatcagaagaaaaaagattcatccttttcaatttgttctgcaattttttttgcagtgaaatcaatagagcgggaaaagattgttgcttttttttgccatgggagttgatgagctgtctcacctcaaattctctcttctgctagaatcatcagcctgcaatgatttgtccggttttaagtctctagttgaagaagaaggtcttgagagcattgatggctctggtttgtggtatgggaggagattaggatcaaagaagatgggttttgaggagaggacgcctcttatgattgctgccttgtttggaagcaaagaggttgttgattacatcattagtactggtcttgttgacgtgaaccgctcttgtggctctgatggtgccacggctcttcactgtgcggtctctggcttgtctgccaatagccttgagattgttactcttctgctgaagggctctgcgaatccggattcttgtgatgcttatggtaacaagcctggagatgtgattttcccttgtttgagtccggtttttagcgcgaggatgaaggttttggagcgtttgttgaaaggaaatgatgatttgaatgaagttaatgggcaagaagaaagcgagccagaggttgaggttgaggttgaggtttcgcctcctcgggggtctgagaggaaggagtatccggttgatccaacgcttcctgatatcaagaacggtgtatatgggacggatgagttccggatgtatgctttcaagatcaagccgtgctctagagcatactctcacgactggacggaatgtccctttgttcatccgggtgagaacgcaaggaggcgtgatccgaggaagtaccattatagttgtgtcccttgtcctgaattccggaaggggtcttgttccagaggtgatacttgcgagtatgctcatggtatctttgagtgctggcttcacccggctcagtaccggactcgtctctgcaaggacgagacgaattgctcgagaagagtttgtttctttgcccacaaacccgaggagctgcgtcctttgtacccttcaactggatcaggtgttccgtccccgcggtcttccttctcatcttgcaattcctcgaccgctttcgacatgggaccgattagtccgcttcctatcggagcaacaaccacacctcctttgagtcctaacggtgtatcctctccaataggtggaggaaaaacgtggatgaactggcctaacataacccctcctgcattgcagcttccagggagcagattgaaatctgcattgaatgcaagagaaatcgatttctctgaagagatgcaaagtcttacttctccaactacatggaacaacacgccaatgtcatctccattctccggaaagggcatgaacaggcttgcaggaggagcaatgagcccggtgaatagtctcagtgatatgtttgggacagaggataatacatcgggtttgcagatccgacgcagcgtcattaacccgcagctgcattccaacagtctttcttcatcacctgtgggagccaattctctgttttcgatggattcctccgcagtcttggcttcaagagcggctgaatttgctaaacagcgaagccaaagcttcatagaacgcaacaacggactgaatcaccatcccgcaatctcttccatgactacaacttgtttaaacgattggggctcattggatgggaagcttgactggagcgtccaaggagacgagctacagaagctcagaaaatccacttctttccgtctcagagccggtggcatggaatcaagactgcctaacgaagggactgggctcgaagagccagatgtctcatgggtggagccgctggtgaaagagccacaggagacaagactagctccggtttggatggagcaatcatacatggagacagaacagaccgtggcttgaatcaaaagttttgaactttcattaaccgttccacaagaagcaaagtcagaaagattccgagaggtcgatgctaatctatttcattttatttgtttaatgctttgttatttttctttagaataaaaagaaaaaattcttaggggacaaaagagagttcgtttgtctctctctctgtctccaaagaaaaacagaggtgaaaaaaggtttcaaaacctaagaaaccttgaattacctcacctcacttccttgattctttactattcacaatgagtaatcgatttttttttttcttggtaacactctcacgctgaatatatatgttttttagtaataatataattggaatacagaaatgtatttacacttgtgaagttagggaaagtgttgtaattgtttcttctaagagttgatctaagatgtttgagactatatcttcgcttatgattccttctatatcttcgagctttaaagcttttccgttaaaccaatctgaaccttcaaggtcagatacagtgagtttgcagatcatgagccacatctcttggtagccatgaagtcggatttcttggtcttttgatctacttgtcaatgtgatgtgatcttgttcaatcgtttcattgagcttactagattcaagttctgaagacaaccgtcttcttgaaatgtttcctgttacaaggaaacaagtatgctttaataacacaagaaaggacatttcaattttcaatactgaagaattaccaacctggtgatggagttactcgaacaccagcataccggtcataatcaagaaccgagacagggctcgaatcatcgcagcttccacactcttcttcttcttttgttgatctcacttcacaatttactaaatcttcttctttggaccaacaaccattactttggacccaattctccttctcgatgttctgtctcaacttagtttcttttcgttttcttctgctcttacgtttctcctttctacgctgcatcagttctccaatctcaagcctctcacgtcctggtgaaacgttcatggcattgatgttgttctctttaccctctaggtgtgtttgatcctctgttttgctctggttctctctagtatctctcctcttcttacaatttctagttcccagctccttatcatttttatccttctcgaaactgagaatgaagaaatcatcatcttcaagctcaacatactcaagagtggacttaactcttctatgctttccctgaatctcatcgtcgtccctcttcaaatgattcactgaatggctccttgagagaaatctggttttgtcgatcacgggaattgagtccaaacccatgagcctcgccacagctcctggcccatctcctctgcctctgagtggctcggggatgaaatcacgagacttgaaactgggttcagtaattagatcagatgggtaggtagaagaggtgccggaacagagaaatctttgaagaatgatagagatacagccgaatgaccgagtcttcgagccgagtgagagagaactagccggagaaggcgatgacttcatcttcatggtctatagtgtcagtgtttcgaaactaacggagaagtaacgcataaggaaaataacttttgtctttacttttttttttcggttgagtgatgatggagagcaaaacaaaaagtgtgaacaaactcagagcgggatctagaatttgaactaacattctcagtcaaaaacaaaatgtaaatcagctttttttgttgtactttttgtgattgagaaagcaatagacaacagttgagacgctgtgcactgcacgcgttttgacaagtcaattcccggagaaattcatgtcgtccggtgccgcttttttataacaaacctctgtcacttttgttctttttagttcttgaaccgagtcaacaagaaaaaatagttgcggatcaaatatttgggccgttttgatacttttcagtgggctttatgttacttctattcattcaagcgggggtgtaagtgcaataaaatataaatacaggggtatttaagcaaatatttcaaaatataagacgtcaacaacaatgagcaggataataatattccagcatccaaacaagtcttattgaactctctcgttccgtcttctccgattcgctttacactacttcttccctcgtctctctctctcgcgcttcactgtgaattaatcgagagatctaaatatccgccatggacagagcacaattgatcttgttaggtctacctatattcttgttttgttcggatctcttcaacctcttcactcctccgcctcctaaacctcagcctcaccgtcctcatcagccaccgcatattcctcaccagcatcgtcctaatgcgatcatccccgaaaccctagactttccttcacaggttaaatttcttttatactttcgtgtatttcacttctattggttacggttttgatctctaagctcccattattttgcagaagacaagtggcttaggaggagcaattggatatggaaatacagtagagatcaacttctgcgtctcctgttcttacaagtaattcaatttttcttacttagattttaagaaattcgattttgattttaatgtttttacttagaatcggatttatagttattctagtgtagtcagagaatcttaagcagcttgtaagtgaggttttcgtggtgagaaagaaaacttagataatgtggaaactacataagaactatctgattcatgcttgaggtcattgcttccttgtagtcagatacatgaacatcctaattaacattgtcataagtttcagtgtcttcaataagcaaatcactgcaattagacagtttgagattttatttcataaaaacatcatctctgtgactgttgtttgcactgattatatctcaaggcttattcctgctgcaatgtctatacatgtatatgattttcagttcccattgactattgatttttataggattcattatagctgcaaggtgaataggattttagagatgtgtggtcgatcaactttgttgattggggatgattcttagatgctagaaaacctgaaaggcctgactttggttcttatatatgattatgaatgctaaatgacatgacttctttggatactgttttgaacttctccgcaaaaggcataagtaactctagctttctttatcagtgtgactggtgttcatcccaatttttttaatttgtaggggaactgcagtcaccatgaagaagatgttagagacggcttttcccggtttagatgtgattctcgcaaattacccaccaccagcaccaaaacgccttctagctaaggttgtgccggttgttcagatgggagttattggtatgatagttgcaggtgatcgtatccttcccatgattggaattacgaacccacctgcttggttccactccttgagggccaacagatttggatccatggcttccacttggcttatcggaaactttctgcagtcttaccttcaaagctcaggcgcctttgaagttcactgcaacggcgaaccggttagtaattaatggtttaagattatttccagatatgtaagatcagtttgtactaaatcctgtgtttctatttcaggtgttctctaaattgaaagaaggtagattcccaggagagatcgagctgagagatctcatcagtaaaactctaacacgaccgagcatactcacaggcagcagctactgaagtagtagtatcagaagatagaaacgctggaacctttccgtgaagttctcacaagtatttttaatacgagatggtggtacaatctcatgtgccaaaagtgtcttctatgtttcagttaatctgttgatgtagcataccttggtttacctagagtgaactcttttgattcaatcattttgcatagacacaaattggaaaataaggtacaaagtcattgccataagaaaaaaataaatgaagttgtatggagattacgagaaaatatctatatagacagattagagaaagctatatgaactgagatttaatctcagacaaactgaaaatgtaaacaagaagagttctttccttctgcgttaactaaaacattacgtcagcctctgccgacgacacgttggccggttgctgacggaggaacgccggggtcgtgcttaggatttgcagatgggtcaccgtagtcctcaacgttcaccatcaacaaactcctttggaatccagaattctcaaacccacctaatccaaacgaaatcattcagacatagagaaaaacatgaacgaatcgaaggaaggaaacaagaagatgagattcgaacctgaaacggaaacagggttgcgggctagagaagatgtaattgtaagcgtcaataagagacacacaagaagacgaactacaaaagtcatatctctctgtctgatataattaaaagaatcttaaaaatgcatcggttacagattcgtgtccgtcttatttataaagaaacgacaacaagtgtgtgtttatccaaactgattttacttgtctcaaatctcaatcaaatatatatacgtttcttataatgcggagatgatgaaaacaggtcagaagagtaagaccatgtagatgacgacacgtgtcagctaagaaggcgggagtgggaggtgacgtgtgcaacgcgtggtgccacgtatgtcacatcaaggccaagcaagtggaagtgtggaggcacacaagacagtgattgtcattttgtgcaaatcgtcaacgcttattaccaaattttaagatcattttaccaatttctcccactcccaaacttttttgttgacttttttctttctctttatggggtttcctcgaacttctcgccagaaaataataatttatagctcactctcctcactgttctttctaaacgaggacaaaacatgtttactacatttccaaaagtcaaaatatgttcatgagacagttttaaccaaagtaagtgaaattcgtaatgagattggtacttcaccgattatgccttaccatgcattgtactgccctccagtaattgtatttagaaaaatcttttatttttaatgtagttgtataatttgctacaaagattttccgtgggttctattgggctccttaaaacctcatattggatccgactaatggtgattggtgatacgcatcaaacatgctctcgtcaaattgatagatttttggtttctgttggatgaattcaaaatatataagaagaagtagacaagattatttacaatataatacagtacatatttactctacatctgcttatataatttcgttgtatagcagtatcggtataattacgaataagttcttttaattttcatttaaaaaccaaaaaatgttttgattaatttagaaaaatattgaaactttacgagagatgggccgacaagtaagattaaatggtacacgtacccacatcgcatgcaacttggtctcttcgtttatacagaatctatgccttatttgtgttacagacataaatccgtgacaagtgacatcaattcattagggaatattatattataaggaggtgttgatctatagatatatatattatggaaaatttatcattttttggaacgtaatcctttgtaactaaatgcacctatagatacacatcaaacacttcatttgttttaagtaatttaatagactttttaaaggataaaatcgaaagagatctcaagagaaatagggagagatgagcatcagtgagtcatatccaccggctttccggcgtgtaaccaacgacgaaaatcctccagcaacaccggttattgtccagggcaaggatatcaatatcccggttatcgatttggaacgtttggacaaggagatactgagagaggcatgcaaggagtggggaatattccgtctagagaatcacggagtaccgttggcgttaacgtcacggcttcaagaaatctcggagtcattactgagtcttccgtttgagaaaaaacgggaattgttcgctgccgttaaatctccgttatcgtatttttggggaacaccagctctaaatcgttcaggagatgcactaaagagaggagctcaagcttcgaacttaaccatgctcgaaggtttcaacgttcctctctcgtctctctcgtcgctctcgaagcttccaacttctacttgttgtgatgatgatgctcaagaagagcctaaacttgagtctttcaggtaacatacgtcgtcgttttcgtttaccttcgttgcttaatacttaatagtgtcattagtggtttccgcgattaattaatcaatcaatcgacgttaaagtactcaataattaaaatataggtgtaactagctgctgtacacatggactatatactaaagacaaaaactatatggacttatacgacaaaaccaaagataataaataaacttctgtgaatgtggtcaaattttgtattattaatttttcgagatgtgtatgtgaatattagattaatatagtattttttgaagtccttgatatgttataagatattttaaaatatcagagttttggtatgtgttaagatggcctagtcgtcaatcctcctaggctaataactcacgtgtagggagatgacaaattggtctaaatataattaaaccattaggtgaaaatgacgaaaaatacaaaactgtagagttgacgacgaaaagtattgacacgtgcatggagttttgattgatgagatgtttacttttcttcatttggattctatgcattttgtctaatacgtttaaatatagtgttgattttatgagatgttttgtgtaatccatccactagaccaaattttgtagtcagtggtcactatattctactttgttcaattaaactataaatggcttccaagattttggcaagcatctttttttggtcaattggagtaactaaatatgataaaatctaataacattatttgaatttaattaaatatctaagattataaagtctcagaatatatattttttaagccaggctggaatacatcaacttgttcacacatgcatgcacgtaatcttccgcaatagtgatgtttagggtgagagtagagagaacggcttgcttccatgtcttttactataccgcttgattactcccacatacgtggattgaagcatttcaatcttattgcaatgcctaagtcttaaccattacgctaatcaatgcaccttgtcattttacttgaatttttattacttaagacgtactatgcagttttaggtttatttatccatcaaattatatatatacatacataacatttattttcaataattgtaaatgtttaagactgagggtttacttctttttgattgtttgtgttgtgagtaagcagagtgttgatggaggaatatggaaagcacataactagaattgctgtgtcattgttcgaagctatagcacaaacactgaacctagaactatccggtaaccggagatcagaatacttatcggaatcgacagggctaataagggtttaccggtatccacaaagctccgaggaagcagccagagaagctctaggaatggaagttcacacagacagttcggttatctcaatattaagagaagatgaaagtggtgggcttgagatcatgaaaggtgaagaatggttctgtgtaaagcctgttgctaatactcttatcgtcaatcttggagatatgatgcaggtaaataaagtatatccatgagtttagctcaattatttttatcattttgattgatgaaatctgaaattgtatatacaggccataagcgatgatgagtacaagagtgtgacacatagagtgaagaagaggaataggaagacagagagacactcagtgtgttattttgtgtttccaaagagagattgcgtgataaagtcatcaaactataagctattcacttactcagattttgaagctcaagttcaagctgatgttcagtctcttggaaccaagattggccttcctagattcaacccaaattctccattgtttctctgaccgtgtctgaaatttagtatctatttggtttaccaaactctggatacttaagttagtccatcaataagactcaaacaaagaaagctgtgtttttgactctgaaataattttgggctggccctgatcatcgtagagaacttgacaataacattgtttgttgaacattaaaaacactctttgtttgctctacaatgacgacgatccatctacttattttctattgtgatagtgatatttcaacaaacagtatttgaaaattggtttgtggcattgtaaagcaattctgctttagtgataattgccattatgaagcagttttgctttaattagtgtcatagtgtgaattgccataatgaaatttcgcattagtgtgaattgccataatttagcaattggcgttagtggttagtggaccataacaacagcttaaacaaaattatctttatcaactgttcaaacaaattgtttatattaaagtcatacgtttcataattttgctgatcttaattacgtttaattttttcttttcacatctcttattatcgtatggcttagtatgactgactaatgtataccgacaccttaacattacaaacataaaaaacgtgtaccgacattgacacgagtgatgaaatgaacattatccacgaagcgctaacgaggctccaagacaaaccgcatgagcagtctcacgtgcttgtagacctctccggcacgatcgtggagccgaacggcacgaatacctggccttacctccgacaacggaaaacatgtctggccagcgaaatcgttctgagtgttactgtcgtaatctttgactgtgatacacagaagagataactcaggaacacgtaatgggaactcaaactccttgtcccaaattggaaaccattcgtctttatctatttctgttctgtaacttgctgtgtccaatggaacccctgcgattccgacctgaaaggaaaacaactacatttgagatatatccaatgacttgatagccaagaaacctaattagggtttattagcttcttcatagggatattaaaccatgttcttattgcgttttctacatatgaatgaacacttgcctttgcgtagaaatcaggaggagagtatcggtcaaagtgatctaaaggaaagtccatattccatccttctccagtgtagatcttcacctaatcatacaccacaaagacacgaagctaagatgtttccttacttttcaagaacaggaaacagaaactgagacaaagaccaaaccttaagagttgtcttgatcgggaggttttgactacaagggtcaaagatttcaccttcaggaccattggagagcaaaacatcaggctttttcacatagccacatccaccattggctttaaacattccttgcatcatccacagatacctcccatggctctgcatttacacaaaacatagttggtatttactattaagaatctctgcttatatactatagaggatagtgttaaaactattacttgcatattgaaggcaaccatttgagccccatgaatccacccaacgagaggatcatagttagatgagtcaaaccgtgtagtcttgggaaatatcctcaaaagattccgctgcgtgaactttactaaatcgggtccacgggtttttgccagagtctcaagccactgctcactcatgcttaaccgtatgactcggttaggatctccattcaagcaattcttcaaccctcctttgcggttcccagcgtgaatcgagattaagtctctgtattcaatcgctacactctcctcatcttcttcttgaacttgttcttctgcatccgaaattttctgtcacaacacaagacactcagaaaacatcaagaaacactaatgattactttatgtttttatttcttactttagctctagtggattcatccgttgttgaaccttttgagatttgggtctgaagatactcttttggtggctttgttgagatcaagatcttattcttgagtgattctggtgaaggaaaacactctgtagtttcgtccgtacattgaaacaatgatcccccaaacgtcttactcaccatctacatatatttttagtttcaccatcaatcaaactctatgctctaaacaagattccatgaatttatcagaatctaaccttagcgactttcttctgaagaattggagttaaatggtcttctaaagtaagcacaacaggataagcagacacctgaaacgcgttctccttaaccacgttaagacatttctgcagatcttcacgactcgttaacgtcctgagatgatcataaccaaaacaaatcaagaaaacaactaaatttgtaagtgattcaagaagtggttttatggtaagattcaaaccctccatgacgaacttcagcttcttttcctgaagagttaggccataaatcaagctcaatgacacgaactccatttctcagagctttcacaatcggttcgatgctgctattactgttcaactgattcccagtcaagtaagagttatgtcccgtgtacaagaagtaatgcgataatggctgattcatatcttgccaaacctgaaaccaaaatctctttaaacaaaactctttctctcaatgtaaacagatcttatattcctaaatctttacctcgcgggtcagaggcaatggagagttgaaatcactaagaagataacggtagaatccttcaagatgaattccacgaggatgaaaaacgccgtgatgtttaagtctgtggaagatatccttcacgtagttgatatcagcgtgtgtttctccttgaacttggatcacgaatctgagcatctcatcagcagacatcctgtcgtcttgagagtaatcatggaaaaggttcttgatttcttcaggtggctcacttgatttcaccttgaagtttcttacacaacagaaacacactttgaatgattctttcatcttttttttttcttgtgaaagttaagcgagagagaaaaacaagaaacagagagacttgatgtgtttgttcttgttcgtgaaacacatttatatctctatctctatctcaatgaaccaattaaatctatgaatttttctaggaaaaaatctatgaattattcttagtacaaaaatagataaagaaagaaaaatgagaatgatctgtcggctgtccgaaataaagttagtattataaaccgaaacagagccgctgactgaaaacagaaccgttgacccaaagtaaaaaaaaaacgtggcgaagtgtgtgtagccaatggctgagaaaatggtggtaggcgtgtcgccgtaagaaaaaatcaacaaattttaatttgtcattgatgagcaaatcatcatgtgaaacagctcatgtgttaattaacctttttgtttttttcgctcatgatgtaattgtcaatacagattatttattgtcaatattattgatttttttggtcaatactattaaggatgatgtgattgtagttcattgctataggaaaacttttcaaagtggtgctttctacaatctacataagcatggcactcggaccgaatcgaattggccactgaggtttggtcgaaccaacctgaactgaaagtttggttgaacccaactgagctcaaatttggcaattcgccggcttagatttcggttttaacttttggcctgaaagtccatcattggatggccggtttgattgaggaccaccaaaccaaaaatatttgttttttgtttgaactgaaccgaaattttgtcattacaaacccaactttaattttggcctacttcagtgattttgttgctaactgaaatacttaagtttccgaaccgaaaccggaccggttaccccaaatgcccatgcctaattctacatgtagtttacggttttcaacttttcattgtttttttgttccatagtgataaaaaaagcatatcgcatggtttttaattttctttttgttttagtctttttgaatgaatgttaaatttatccaaccaaaacctttatacaataaatgcatccttaaattgaatgttgttttgaaaaaagtaagaaaatcttgagttgaaccatatccttaacccatcttcctatttgtggggacattagctttttgttttagtcttgcatttgtttctgtgttgacagtgtagtactccattattgtttgtgaaagaatctattgctcttttttattttttgtcttgttagttctatagggattttgttctctaaatcgttcacaacattatctcctaaatagacagtacgtgtatttgttttgtttcgatgctactcttgtatagatcattctacgcaagtaatgcaactttgatgcaaaacacatcgaccaataattaacaagatatgtgttcagcttgggccgtccaaataattaacaagatatgtattctacaaaggcccattaataaaaagcccaaactaaagtgttatctctcgttgtcgttagattcaaagtgttgttgttgttgttgttgttgtctgggttgcctaagaagctctatcaacgcctcagcctttaccttagcaccacgactcgcactaccctgcgataaagccacgagcggaggaaccgctccttcacgagccaccatggttcgatacacaacactctcctcacaaagctgcaacaatatcgacacacttatctccttctgtctctgtgttcccgcttcaacaatctcaaccaacaccggaactcctccttcttccacaaccgccggcttcgattccggcgccgacattaacagattcataacaaacgctgatttatcaaccatatccgattcaaaatcaatcattaactccactaacggcttcataatcccagattcaacagctctggttttgttctcgttcgtcgaacacaacgagtataaagccgtcgacgcgtctttcttcgctctgaatccgccattttctagaaggttcactagtaaaggaatcgctcctgatctcccaatcgtgattttgttttcctccacttgagataaccggagcagagcacaagcagcgttctctttcgtcgtcggtgttcctaatctcaacgcattaacgagcggtttaaccgcaccggaagaaacaatcatctctttgttctcatcgcagagagatagattcaacaccgcagtgactccatactcttgaagctgaagatccgaagacgagattaaagaaaccaacggtttaatagcaccggctttagcgagtttgatacgattctctggtttgttctttgataagagtctaatctccatagcagcttgcttctgttcctcgatcgaagaagatgactcaagatgcgttatgagatttctgatcacgtcatcggaattatcaacggcgcaagagaggaagagttttcgttgacggctctcggaggtagttgttggaaactcgcaggatatgtcactgttacaatcgctgaaagcagaggaatcaaagttgagacttatatcgctgaagctatggtccatgtaagtgaaactgttgtgattcgccattgctatgagtctatgagattgaatactcactgcatcaaaacttcttttagaggtttggttttaagagtgtgaagataggtgtttgggacgcaactgcagagaaagagagaaccttgatggttttcttttaattgattttaattaaattagattaatacgatgatccagtttcagtgttattctagaagtcaaataaagaatctgttgtcaaaaaagaccaagtctttaattttttattaacgagtgacaaattttgatttagtccgtttttcatatgccaaaaagttccactctctttgaagtattattattattataaagaagaaagaaactctgttttaaggaaactctgtgtttaaagaaagtgaaaccgcatgagaagtgtaactgaaactagtctctcgcctttgcgatcatacaaaggaacagaacgtatgccttgtctcagctctgacacaggcaaacatgtctgacccgagaaatcgtccttctctggcatgttgtagtcgtgaacttctattcttagcaacgccagctccggtactgttagctgaaactcaaactcctcgttccagaatggctcccatgtcttttgttctttctttgttttcttcattaccttatcacctcttactcctgttatccccacctgcttttattcacacaatagtacaatccacatgaattagagccagagtagagaatcaactatggtctatgtaaacagaaccatctacgttgcttacccttgtgtagaagttaggagaggaccaagtgttgaaacatgttcgctggaaaccagagtcccatcctttgcccatgtatactttcacttttagagttttctttatgggtaacttcgctttcgggttgaacacttctccactgagattattgttcatcataaagtccggttttttcacgtacccgcatccaccatttcccctaaacataccatgcatcatccaaagagctcttccatagccctgaatatcaaagacgcaaagatgtatcagtgcgttgagatttagtcagatgttttgaaaataccgagaatagataaactgcaaacctgcatgttgaaagcgaccatttgagctccgtacatccaaccgttgtatggcctatagttggaggaatttactcgggtagccttgggatatattctcaacagattcttctgtgtgaatctagtttacagttgtagtaagcttagagaaagaaacaaaagaactagcttaaaagtaattgcctttttgaatgggcaagtgatacttactttatgacttcggttccatacatttcagtggctttcttgaacttctgctccctcaaactcagccgtctaactccaccattatcgattgttagtgcttcctttaatccatttttagcatttccagaaggaatcgttattaggcgactataggtgaggaaatccaagttgctggattcttgatcaaatccatcctcttcatttttggcctcacttgtttcttcctcagtctatacagatcattgcaagcaaagagagagatttaagatgacacagagaaatgaaaactcctaaatttggactgtaacagtaccttctcatcgtctgctgaaacatctgatgacgcctttcctgatgcatctgactcagaatccttgtcctttcttaagctacctttaggaggctttgtagatattacaattttgtacttgagatcttctggtgaaggaaactcttttaaaccaccagcctctggaaaatacaccatatccatgaatatctctttcatcatctgcaacaatatataaaaggaaaagtagaactttttcaatattttcaagactttctgaaactagcacaacaatgtttccttattgagatcaagaaagcacctcagctgctttggcttgaagatctggagtcaaatgatcttccaaagttaagatcacagggtatgcagatgcataaaaggcatgttcttttatagatctcaagcatttgactagttcaactggaggtgtccatgccctacaagcagtaaacatactctcttttttttgttaaaaacttctcgacctatagattttggaatatacatcataacacaaagacataccagccatggagaacaagtatgtcgtccttagtagagttaggccacatgtcaagttcaagagctcgaacacctctctttaatgcctttatgagaggtacgtcgctgcattcgctgttgatctgatttccagtcagatacgaattatggctggtgtaaatgaaatagtgcgacaagggagaggccatgtcttgatgcacctgaaagaaacaaaagctcaaagattgattctttccaagtttcaagaaaaagatcaagaaactgaaactggataccttactatcaattggatgattcagatcatctgagaacaagaaactgaagaaatcatcgaggttcagcgtatgcctcaagaacttagtgatatgatgtctttcacatgtgattctttctatgatcttctctgcatctgaaaccaacacttcagtctcgtcctgcacctcaaccaagaaccgacatagctgctctgccgtcatgtggctcctgccctcggtatactctacaaacgccgtcaccacatcctgaggtggagctcctctgttcatcctgagcttgtcactgcaacacaaacccattttgtaactccccatatctctcttcatcccagatacttcacaatcacaccagccaacctctatttatatttttcaaccgctggattctcttcaaaaagttcctgcaatttagttaaataacaactcctgcatatttggcatgaacttcatactcataaatcaactataagtcgttctcttttcttccatactttattataattatagtggtattactctttttgctcagtgctcttagctttcctcttctttttccatatattcccagccaagagactcatgttggaaagcctcactttccaaaaacaagcttaaacaattattatggtatctaattccagaagcatatgatgtaggcatgtagctcaaggaagcttcacggattcaacgattgggtttctcaacacttttcattttctttctttccttcaacatttcacggtatgcaacctctttcaagtcactgttgaaattctcctaaagtcattgaagaatctcaatacatctgtaagttaccaatctacagaatcaagaatctgtttttcttcactaataagcatatatgggtggtgtggtctttgtctatggattaagaataaattcctttaagttgtttaatgtaaagaaatgctaagaaaattgattaataagcataaagagattcatataacaacaaaagattccagaatactatactctacttcagaatttcacgtgtttagtgcagcaaacagagagacaaaggcttaaataactaacaatgtagctgaagatatgaagcttcttaatctattataagtcctcatgcgtataaataactactttaagctatccaataccaaatcatccagaaaaagaataaagaggttatgtttttatgataagatgagagatgcttattaatgttatcataagttctttggttttggttcttatttaacaaaacttcatcccaagaccaagaaactggtaacatatataaatgaaaccataaaggaaatttcagaagatctatatatttctcatgtaaagatcaaattttattcatcaatgaagaagcataagacacataaaacacagcatatcgaataaagtaagaagatataaatctagatggatacacgcaccaaaaatggcgtctcagacaaactcgaagcgcataagaagccgtgtggagctgtatttcactcccttgcgattaaagagtggaacagcgcgtatgccttgtcttatctctgaaactggtaaacaagtttgacctccaaaatcatctttttcattcacgtcgtgctcatgaacttcaacacggagcagagcaagttcaggaactgctaaagggaatgtgaactccttattccaaataggtgtccatgtatcatactctatttttgttttctccatcacctcatcaacaggtgctccagcaatacccacctgtattgaccagttataattccatttcaatcaagataagggataaaggaaaaatcaagattgtcgttcacatactctaacgaagaaatctggaggagaataagaatcaaagtgagtttttttgaagtctaggagccatccatctcccatacagactttcacctgccattgttagatgttaagaaccgagaagcgtgggaggcatagatgaaggaaccaacgggtgtttaaatctaaagcctaacctttaaagttttctttggagacgaattatctttggggtaaaaatcttgtccattaggacttgcatccataagaaaatctggcttcttgacataaccgcaccctccatttgctcgaaacattccttccatcagccacaatgctctgccatacccctacatttacgttttcaatcattatttagtttcatgatcatagtaaaacctggatgacgatacacgaaatgaggatttgagacaaacctgcatgttgaatgcaatcatttgagctccgctcatccaaccgatctgaggtttatagtttgaagagttaaaccttgtgcctttgggatatatcctcagaaaattcttctgagtgaatctgctcacgtataagggttttaataaattaacttgaaatacaagaagcaaacactagctatacagtgcctatttagcatgtgatatttatatacctgataacatctgcaccatatgatgctacagctttctcaagtaattgctcactcagactaagtcgcctgattttatttggatcaacctttaaagccatccgtaaaccgccttttggcttcccggcatggatagcgataagacgcttgtattctggtgcttgtaattggcatgacgtatcagactcacaagaccccctttcttcatcatcttgattgagatcatttacactgcttgtcacctgaaagcaatcaaaagtggtatgatgctacaagtttttgcttcaattgttattttgatatacagttgcaaagctagaacaaaccttgtcaagatcagattgcgtagaaataaggtcttctggctctttgccccatacatcctcatccgaatccttacctttttctccattatctttctccttagtatcgttagcttctaagtactcttttggaggttttgttgaaattagaatcttttccttcaactcttccggtgaaggaaattcttgacaaccttgagaatcatggtaatacaacatatctccaaatgtctgagttatcatctgcagagcaaacactttacggtattcatatatacatagacggaaccatgaactactttaaggtctcaagactatagaggtgaaaagaaagaaaaccttagcaactttaaactgaagttttggcgtgagatggtcttcaagagtaataataacaggatactttgaaatagcaaaggcattagctttaatagattccaaacattttcccaacttcacttcctttgtcaatgtcctgtagtttcatcaaagtgagaaacataataataacagttccatggagccaatacatacaaaagcaagaccataccttccatgtttaacgcagacatcatcggtaccacgtggccaaagatccaactcaacaactctcacgcctcgtctcaatgcatctgcaataggaagttcactgcagttgctacttagctgatttccagttaaataggaattgtggcctgtgaatataaagtaatgtgacaatggagcatccatgttttgatggacctgaaataaacaaccaacaatgttttagttatatcactgaagaattgagaatcttctctctgcagaagtaagcaactactagaatagaaagtatccaaaatagaaacttctaaatttagacaggttaatcaaacagtcagattccagaatttcagcagcagctgcagagtacacaccaagaacatatcatcgagaaaagtttcacccttttattgggatttgatgaattattcataagcattaagaagaagctaccaaaagtgatgatttttattttctctttgatcaaactaaatttaggccagaaaatagcaaaaagagaaaagagtcaaatagcgatgagagagaaaacattctgagattttccggtaaaaccaacagagagaagaatctaaagtcgtaatctttcaatctcaatctttatcaagaaacaaacaccatcaaatcccagattccaaaaagtctcagacttttcttcccaggaacaaaaaaaaaaaaaagagtttgacttgaaaaatttataaacctgatcggcgataggaggattaagatcagtagaaaagaggtaataattgaaatcatcaagagtaaggtttcgtctggtgaactttgcaatgtgatgtttccggcgaagaacctcgtcaacgattctctctgcttcctctagacttgtttctccttctcctccttcctccgtcatgagcttctgtagctgctccggcgacatatgagcatcgccttcggtgtatttctcgaaaagatctctgacgtcttcgacaggaccagactccgtcatcctgaacttccttgtgaagatcagacagaatttgtaactacccatctctttttttccttccatgtttgtgtatgtatcgtcgtcttgttcagatccaagaatgtgattctgattctacataaatactcggattgttcctgagttttaatattattttaaaacttcgaaaccatttcagagaaaacctcgtcaaacctcctctcttacacgctcacacctgaacacacaaaaatacaaaaacaaaaacttttttttactgaatctcgttttttgtaataatttacaaattagtctcctcgttaattttaaaaccagggaaaaaattgactaatttaaaagggatgagtaaaaatagtagttactgagattatatcgccaggtgttcattgtttttgtccctccccataaataacatactacaaaagatattttcattttcatttttgtgtgaagtgtgaacacaaaatcgagactattgagaaaaaaaaattagatatgttgaaatggcaaagcaacaaaataaagaactggtctggctacattggtggggcagatgcagatctaaatcttttgcaatttgttgtgttttgtattgtctttgtttttcttctctcaacagaatacattcttccattgaaataactccaagattaatatcgtctattgttgtaagttttgttactatactgatagacaattatctaccgcaagattacactctcgaaagctaaaggtcataatttcttgttggtgtttgaatatcttgttgataggattgagtggcgggccaaactgtagagttttgaaagctttggatctgttttgaacataacatcatggttattcatgatgtctcttttagaccaaaagtgtaaaaatatattgttttgttattcatagtaaaattaattcatatatttccattttattttatagcatgcttgggaattatttttcccccaaattatttgatgtttgtaacaatttgtatttttgcactatttatcagtggttgaatttctttaattatctattaaatgatgttttatgtaggaaaaaacaagaaatgcgaaattcaatttaatttttgaaatacttcagatgtcggccaaaagaaaaaaaaaaacagataacattagatatgttgcaatagcaaagcgacaacaaataaagtgttcggctatattggtggtgcagctgcaggtctgttgtctttccaaatccatcttttaggccaaaagttaagtactaatctcgccctttttaccctttctttttactaatagtaaaatattatcaatgatgtagcaaaataaaatgtactggaagactggcccaggaaagttgacagtatttaaatgtcatcgaattcttaatatggatggaaacgtgcttaattaaaatgatactgacaattaatatttaactaaccacttataaagttaagtaaccatattaatattagctggaacaagagtaatgtgacatgcttatggtattgatgttgagtctttttgactaagaattaaaaatgacttttgggtatccgatccagccatgagccatttcttccattagggttaccaactctgaattactattattatcatttcttaattaacaacaataaagaatcatagaattcacaaagattaatgggctgtaaccaaaccactcattagcccattacggttctacaacgatccgggcccaattacaattgtacacgctacaagccaggtggcggaatttaattggatattgacgtggctttggtgagaaatagcggtggacaagggaaaaaaaaagggactgtggagaaacactttagcacggtgcgacaagatggcgagctcagtgacgctgcttctatggagtcttcttcttctcggtacactaagcgctattcaggtatattcgtgtgtttccttctcactagtcgatcgatttctgcaaagctttatgattgagttcttagattgttgcacgatctagataataccaatttggttgcgattggttaacggtatataattgtcttaggtcttcatgttgattattatttgattcggtgtttgatgtgacatgtttctgatattagtttcaatcatcttaatcgcggacgattcgggtaatttctcctaggatcagggaacaaacctttatacgttcatcatgagtcatatagtgtttgagatttgaagccgaaagagttctgttgaattatggacttatttgattaaagaaactggagttaataatatatggttgtttggaaaatctgaatttgatccttaacatatgattagattcaacactagagagctagttactgcatgaagtgcgcctaatttgtgtctaaatgtgttgggatgatgtatatattatgaaacggttgtgatctagtgtttatattgatttctggatgtttggtttcatgttccaggccaaaaagtctaaggaaaacttaaaggagatcacacacaaggtttattttgatgttgaaattgatgggaaagcagctggtatgaccttgttcctgagttttatcttatgatgatatatgttagactgcatgaaatgctttgtggtttcttcttgtcttgtcccctgaaaacatctcatatcgattgatgatttttgtccaggtcgtattgtcatgggtctatttggcaagacagtccccaaaactgtagagaatttccgagctttatgcactggtaagaaaacaatatattgctcattctcatcctatgccaatcgattatctgttaacttttctctgccagcacagcagtttatctaccttgatatgaaaagcttacttaaactttatactcacaggggagaaaggaataggtaagaatgggaaggcgctccattacaaggggagttcatttcataggatcataccaagctttatgctccaaggaggcgattttacacatggaaatggaatgggaggagaatctatctatggtgagaagtttgctgatgagaacttcaaactcaagcatactggtccaggtgagggcttcttcagtattatgtgtttacatcggctctttgcctgtgtgaagtttttacatgattagttgttttcctttttccacagggttcttatcaatggcaaatgccggtcaagataccaacggatcacagtttttcatcacaactgtaacaaccagctggtgagtacagaatcatctgaatttcaaacacataaagccagtttcttatcttttactttcaagttgtttgacaattgtgtgggcaggttactactttctaagcttaagagtttcaattatggatagaattgtcgatatgttgtttccgtctgctgattagaaagtttgcaggttggatgggcgacatgtggtattcgggaaggtagtgacaggaatggatgtggtgtacaaagtcgaagctgaaggaaatcagagtggaactcctaagagtaaagtggtgattgtagacagtggtgagcttcccctgtaactcaacaactctagttttctccatctgatcatccattgatgtgagctctagtgtgcttgatgacttttgtgttaaaacgagtgtcttggttactttatgaaagattctaccggctttatttctttcgtctgctttctagctcgagctatgtctgactttatacacaaatgtctttcagtagcaaaaattctgcacttatgccgttttgcattgtcaacatttgtagaatttatagaagttacacgataatatatatatcagtaaactcctaaagaagagttagcgaaaaatatacattctgtctgtgtcagacaaagtgttttcagaacttaaataacgtgaaatacggaaaggaaaaagaaggaagctaagttttgcccaacatttacttaacaacagagagctagcatcagatatagacaaaatcgacataaattttaagatctaaagctaaaacctgactttagttttagttatcacttattcatcagagtcactctctgtgtctaagaaactgaactctctactacctccgtcaagcttgatcagcagtgtccctctgttctcttcacaatacctaactccttctctttctagcagctttaccacctgatcatatccataaataacaatcatataccatgactgcaatactaaattcttgtctccggttttgctgtgaaagggcgttgaagaaacttactgattgtttcaccttagacttcccaaacccagaagctccacatcctgtgatcactcgtagagtctgaatggctggatgatttcacaattgttaggaggaaggtattatctcgggttttatgatgacaagatctgactatgatgatctactaaagaagaaaagacttataattgagtttgctaagtactcacaaggaacatatgatccaaataagagatgtagcttcagtagcttcattgctggtttaacatgctgaccatgcagatcaatggttaccacattctctatacctttgtttctgcatagtcataaacaatggcttagtccaccacaaaatgtttaagcgcatcagcatactttgataatgcatcaaaacagctaaccttgcaacgaatatatcttggcttgccctctcatcagcccgttgagcttgtttagatgccactcttccctaaaagaaaaacaacacaagtttctgtcatactgtcaaacaaaatgccatgataccatgatatatgtaaaccgtgatatgcaccttgtcagaaaggtaagccgcatgagccctccctcctttcgaatatgcttcggcagccttaaaccaattaataaatgcattagttgaggagtctaccagagccagatatatggaagcaagtaaaactaactttttgatagtaggacttcgtaacattccactggtcatttgcaccttttctaagttcatgataactgtcatccttcactgcaacacacgtactgattgattggtaatgcaattcatgagtaagaaagattgattcaagagttgcaacacaaacaagcagtcaaaacttcagatgtttatgccaatgacaccaaagcaaaaattgccaagtgtttcatcaggtaaaacaacatacatcagaagctcgaagccggcaaactcatggcaaattgagcatgctatttgcagctatatacgcaaatactaaaatcaagaaaccatagtaaagtaccaaacgtattagggtgaggctcttccccactagatgaagaagcatcaatgccaagtgactgcattttctttgccacattcctccaactcgttgtctttgattcatgtttaggattctggcgaatgttgaacagagactccaacactttttgtggaagaccaagctcatcaattccttgggtagttgcaaaaggatcttgagaactcatgagagcttttgcgtagtccctaccattcagacaaagaaaagaaaaaaaggccagatatttagttttgacctcgtccacaatgttgaaattaagaaatcataatgtaagttttggcggtctcatgagtaatttagatatcatgtgttcatgaactgaatcctccaccatgaaatagttcgtttgttgttctttcatagaagaggataaggactaattaaaagataaggagaggttgcagagagctcgttatcttgtaactaacgtgtaaatcaactctgataattccaaaatcagtgaattgcaataacaagatgaaagcctaagaagcaaatagaagtacctttgactatagtctccaccccagaaaagttcacaatcagaagtatcagtatcaaaagatgactctgccagctgttaaataatgtcaggagattgcactttattttatcgtgtaagaaaacaaaataaacagatctatgaagattaacaaaaaaaacaatcacttacactatcgctgactcctatgccgaaacatttaccactcaatgaatcatcagttgatgaagaagacatgtcaagcaagacattcaaagcctaagaagaaaacgctattaagctttaaaataaatagtcgggcaagtatcagcatatttcaggagcttccctgtcaatatactaaatacttccccatgtaagtttgaagacaatctctgcttaccatgtcgacatcatagccacattgacctacaaaaaatagatacttccatgtcaattcatcgaacaatctagtctctcctcataacattattacggctatatttcgaatatcgcggacacattaaaacgtaatcctataactattaaggatcatacttttctactaacatcttctcccatggaaaaattaactgactaagaagaagaaatactcacacaaaacatctctaacaacagccatgctaagctcgcaatcatctccaagcattgaacttaagaactgttcagctttctctctatccgcagcttttttcccgttcccacagagctctttagaccgttccatcataggaaactcttttcgcacagggtttggcttcaagtaatccttcgcaatcacagaagaaaccatccctgtagcagcaataactctactctgcttgcttcccttaaaccatctatctctagtcaaatcttcgctacagctagaacttgaccctgccccatactcagaggtagacgctgtttcctgacccgaagaaccactcgccaccgaactcgtcgacggatcatcaccgctttccaccagatccgataaaatctcagcggctttgttcagatctccgcctgcttccttataagcagccatcgcttcctccattgaaaccgagcaaaaggcttccattaacgattcgataaaattttttccaacgttttctatctccctctttccttcaccgtccttcctctcttcctccacatcttttttgttcccgtccgacgtcgttccatcaccggaaggtttcgcggcgcaggatcgcttcttcttcttcttatgctggttcttctgcttcattatcgtacaattatagatgaaatcgtgtcaacgccgcttcaatagaatctcttccgatctgcagaagaaacttaaacccagatttccgacgagaagcgtcggagagagggaagaggcgttttaaccgtaaatcaggagttagtaatggagatgccaatatcagaggaaattttttgctcgtccagacttttgattgggaatcggaatcgccacgtcaatccacgcgcctgatcgtgaccacgttttaaatccacgcgcacgaatcaaacaccgaacacggtttcctcctgattgtacatatattgaaccggttcaactatgcaccagtcaaaattagatctcccacgttgactttcgtaattttatctcagatttgtttttggtttttatattaactagataatgtggcaacatgcgaatagcaaatcatcttatccaaaacttttaaaacaaaatttgacatcttcatttcgaattttgaaacgcggagttgataaacaaactttgcgggaacgaccagaaagagcgtttgaagacgctggtcaacgcgttttatacattaaaatttccaaaattcatcaacgtgttgaagcaagcttacacaactcagaagagctttgttagtaaaaaaaaggtgattcaagattcgtattcacagggaccgatcatcacaagagtgaccattgaccaataactttggttgaagttgagagtctacgcatgaaaaccgagctggacttagacgctcatggaactcgttgtgatcgttgttatggctgctagatatgttacactgcttcttccttctctgtacctcatccttgactttctgcaaatcacaaagacatatgtcacatagaaataaccgatgaaagggatgaatccttgtgcagtgcaaacacaaacgctataaatcttctaatttgcttaatgttcacttgcactagccaatggttcaattattatccaataacgccctcatttcaacagatacaactacaagagatacacagaaacactcgcaaatacatcaagagatccatacttttgaattctctaattgcttaaccacattgttcggtgaatgcttaaacaacactttttcctgcatctaccctatgttgaatgaaactgctcctagattaacaatgaagtaaaacaagaaaagactctctcagcagctgtgactcgacagaatctcaaacaacaactgtgaagatttgacacattttcagattggaaacctatcaacatcaaatacagattctagttcacccgcaagatataggtttggctgtattgaaagtaagctgcaagatgtaacagagttcttttgctaggattatgttaaagacatttgcatatcactatcatcggctctaaaagttcttactactgtctattagatttgcaaatctctcacagcatgcaattcagtaagctaatacgagaccaaaaaacaaacctgaagcatcatcaaatcgaactttggctgaccaatatgctctacagtgatggaaccaaagaggttccctaacaatgcagcatcaggaacagtcaaaccttcaacaagcccaacaatcaaacctccgagaaagctgtctccggcaccggtaggatccacctgcttcgccaagaacggaggaaccgtcatttcatcatccttatgataaatcctacaccctttttcaccattagtcaccaccacacaacacaagtgcttcatttgttcaacatccatgaaaagagcttcgtctgacgaagctttcaagaatccaattcgatgcaagatgtgataaaatccactttctttcaaatcaacaagcttcacagctccgtcaacaggatcaaaaaccctaatcaaagcttgaatatccacagcaacaacgtcacagatctccaccattttctcaagcgtctccggtaaaatctcgccgccgactccaacggccattccgaaatcaaatctcgaatcgggtatatccgaaggaagaatcggatcacatgcagagactcttttcaacacccgatcagcatgaccgatcccatcgattcccagatcgaaatacgcctcgaaaactgttgtttccttctccggagccacgatcggagagtgggtgacctcgtatctgaagtcgtgtcctactttggagaccaaatcgcaggagacagaggaagaatctaagacattagatatgaaagaggcggcgccgccgagagtttcagctacgacggatccgttttggattaaaacgtcgtggcaataatttccgacgatgagaacgcggcgattgggaatccgacgcggcgagtgagacgtttgctgcgacggaggaggattcaacgtcatgatcgcggctggtgcagaggatcatcgagaaagtgaagcagaaggaagaagaagaatcatggaattagtaagacgaagaagccgaccaacgagaagaagaagaagagacaaaactaatggctataagctaatacgtaacgtcttgagattcgttccctgctctctgtcttatgatatatgtgtcgcgagggagatgacgcgcgcctaattttcctcctttttttttttgtaaccgaaataaaatgatgttaaataataaaatagagaatatgatcatttttctccaattttattttgttcgaattccttattctcctccacttatccaagacaatttctttttgaaaaagctgtcacataccaaaacaagattcgaagcgcacggcggctcagtggacttttagtagatgctccgattctgttgtcgggaagaaaaggacaactaaacagagacgaaagacgatttatatgattgccattacgagttatagaaacagagagtcagggggtttatttatgagacatgagacattttgtttaagtcatggtgacttttgagtttgttataatggacatactattatagcaacaagagtgggactattatttatttagtcagaacgaataccgcccatgaagctccttggatctggacaattacccgagaactgagcttgcgagaagtcgaatcccgggttctgcaaaaaccaacagagaaagaacatgtaaaaggaaagttggtcgaaagagtaaagaaaagcatacttgagctcaatacaaagtaaatagaaactcatgcatacaagcagaaacaaaaccaataagacaaagccattaaggcatacatgaatcacacccatgtgtgcagtcttgccatgttaatttgctcaatccggttagactaaggctgagcaatttcatccaccatagctttactatcaccagctctatgcagactgtttattcatgaaactgataaaaatccggctacactataggtttactatcaccagctctatgcagactgtttatccatgaacacaaaagattcactacttgagagagacataagaaacaaaataagagagcttgaacaaagaaaacaatcatgggacatgactcatccaaaacgatcatttatggcaaagtaatcatactttgacatagattcattctactcagtagtggtgcctaagatttgctttggagatcaattagaagacctagaaaacaacatttattttttcaaaagcagaaaccatatgaaaccaagaggacttttacaggtagctaacctcttcttgaaacctctggagcatgagccgcttctgctcaagatcagtggcgtaaggatctaactgaccctgtcccagaatcggtgatgcccatgtttgccctttctccctcttctgcagggtaatgtgcattatatcatcctctgccaaatcaaacataacaatccagattagcaatcagtgccagactatgaacctaaaaaaactatgccagtaacttacatacgctgataatataacccaaaatatactgtacattccatcatccctccattagtctcaaattttccacattccaaactatatgtcccactatttataccaaactcagatcacatttccaggttcagtttatcctctctagcaatagtgaacgggtctaaaaacagaaacctaaccatcaaaaacaagcacccaatacagacacaaaaacaaaaaatggagtacctagagtccagaacgagcaatcagtcttcacaggagcactaagatcgtgctgaaaattgacaaaatttagacaattgaatcgagttatatataccacatcgaataactcagatttatgagacaaacggatcaaaaacattgaaagatagcgaaagaaactgacattgagatagggagggttgcctttgatgccaacttcgatatgtttcgactggattttgcagtggaatgactttggatgaacatttggcggcaaagttatgtacatgttcacttcttccagggtttgatcccactcaaataccttttgacctataaccatcggaaatcgaagaacattcaaaccaaatctcgtgaaatggaatcagctgaaattagagaaatagagcgaggggatagagaaagcgagaaaccattgtgaatgaaatcgtgtctcttctctggcgcaagcttctccgccatatctagggttttcttctccgttcccggcgaaatcgatcaccgttgatagtagttgttctggttccttttcaattcgtctcaacattggaggacaggcatttatgattcagtcctttcataatcatgtattttcttttagggttcttagttttagttatttacgcttagatcccttttcttgaggtacactccgtttctaacttggaagtcaaaactccatgccgttttattgaagttcttccaagttccaagaaacatttttttgttgtcgccaaagtagaacactctttcacaattccacagaaaatttaaagatgagaagtgggtctattcaatgcatagaatacggaggaaaacaaaattgaaagaagagtaatgtgtaggtctaccacaaaacatggtccattttaaagccttaaacgtagccaagtgtgttagttttttagcttttcaatgtcctttgggacaagagatacactgtacccatttccccctttcagtttcttcaacgtagacagggtagttattcaattttctcatattaaaacgttatacgtgatcaaagactttgacttataacagaagaataattttgatcaatcaaaaagttgtttgataatgtaaattatggtcttccatttcgctaatccaaaaacttactttctcaattccattggtcaacttgtttcatttgatgaaattcgatatgatacatgtttggccactgcatgaatcgaacgacagttagatctcaaatcggtttggtttcgggtacatgagttctagttatgaaaaaacaatcatcacgactcacgagtgtatatataactagttcattgaataagttgtcggctaatattcggttttgaccggtgagactgttaactaaaatgaatactattagagtagagacccacttgaagtgtactataattttaaaagccggccagcaaccacgggccagactctgcctctcgcaaaatcttgaccgtccgattgagaaccggacaaaatgctgtacacgacggttccttaaaaaactattgtaacaactgttgctttcgtaacacattccagaaccacaaattaaattgataaacacgttaacatgaaacccaaaacactgtttgactttagtctattttatcttaaacaaatgttgcttcgttatgctacatcgtagctgtgttcaaagcaacttgctttggataatttatcatagcctttaaaacaggtaagcatcgagtcttgaaactatcctaaaacacgttgaatcagtcccacaaactttttttgtctttactctaagcgtttatatgaagctttgatcaaagtccataactcactaataatcacaatggggtctgaaaatggcagcttgatgagaagaaacgaagtagacgagaatgtagcgttaatctttggcgtcaccgggcttgtgggtcgagagattgttaagacgctattaatgtctaaaccaggatggagaatctacggcgtagcgcgtaacccggagatcaattccatgacgaagatgtacaacttcatctcctgcgatctgcttaacgcatctgagactaaacagaggttgtctccattacaagacatcgtgagtcacgtgttttgggtcacgtggtctggtgagtttccattggataccgacgaatgttgcgtacagaacaagacgatgctgatgaacgctttggacgcgattctcccaaacgctaagaggttaaagcatttctcgcttcaaacggggatgaagcattatgtgtctttggtggaagagacaatggctcgtggagaaggttcgagtttgtattattacagcgaggagtgtccaagaaagagctctgggaagaatttctactatgttttggaggacttgctgaaggagaagatcactcgtagttccgttgtttggtcggttcaaagacctggtttgctaatgggaagctcttcaagaactctgtacaacttcatgggaagtctttgtgtttatggagcgatgtgtaagtatttgaatcttccttttgtgtttggaggaacaagagaatgttgggaagagagttacatagatggctctgattcgaatttagtcgcggagcagcatatattcgctgcaacaagtgggaaagtacgcgagaaaggggaagcttttaacgccattaatggagtagggtttacttggaaggagatttggccggaaatagggaagaaacttggtgtacaagttaacgaaacaaccatgtttgatgaaggtttctggtttgggagagagatggttgagagaaaacatgtgtgggatgagattgttgtgaaggagaagcttgttaggacagagattgaggatttggcgaattggtatttcttggatgctctgtttagatgtccgtttaagcttcttgggaaaagagaaaaagtagataggtttgggtttaagaggaaatatagaaccctagattcggttttgtattggattgatgtgatgagagatgaaaaactcattcctttgtaacacatgttgtacattagcaatgtagatcacggtatatatgtacttgatcaataatcctcatgtaagttttgtttgtttgaataatgagctttccacaaatccttttaagctaaatcattaaacataaatcctttgcagtgaaatgcaatagctaagttagattccaagcagtggataaccaaaattccagtcaggtttcgtaaacgcgtccgaacaaatgtgaatgtattgtgacatataataagatgaagtagtggcagaccatacttgagacaacaacaagatgattagctggactcagtttgtttatcgatgttattgcatacgtagtacagatgagttttggctgtcaagatgacgtaagagtaaagacatttcatcccatgtctccactcttcactcagcgagatcaagaatcattccaacaagtaagagaaaacaggggagagtaaaaactgaagagaagattcaagattgatccattccacatacttactacaattcatacttaagaatcaccaaaaaggatttcaagaaaatgccatacaaaagccgatcatgcgcccccaaaagaaaaaagaagcaaaattgccgccaaaggcaaaacaggggatgctactaaaacagactctgtacaagaaaacctacaaaaacagagtaagttagttatacataacgaccttcttcactcatattaagtttttgtcttcttggttgtttttgcttgatacttattgacttttatgtttttgcctttagagctaaatatgtcatcttcatcgtcttcatcatcgctgccacgcttttgcttctttcctttcttcttgctgtcaccataacatatgataatcttcttatccttcttctcctcaaccatctctgtattatcctgtggcctccaaatgaacagcgacctgcaaaaccggatttcgaaaccaaatccacaccaatgagagatcagtcaataagaaaaagtgtccaccaacggttactattgtagctgttgggtaatgaatcccgaaccttgaacttcctgaagctaaaacatcatcgcgaggatgcaacttgttgactggagtaatagttgtgatgtttggatccataacctctgcaaccaattgtccattgcttgcatcaatgaaatctattgggtgaagagcagttccgttgtagttttcactgatgtaacgaccaatcacgatgagtgactccgaggtatcctgcggatgaacatataacaaatgttgaataaaaaggggaattgatggaaaaggagaggagaaagaggttaaagtatcaaaccttagggtcccattcagctttgaatggtgtcaaatgccgattgaaatcattactatgaacaatctctcggcttggcaaatctaagttcccgaagatagagtcccatattcgaatacggttgtcctgacacgtcgtgaggattttcgtgcctgatgatggagagaagtaagcagagttgactactcgtttgtgtgcaagatcatgaagagaagctttaggttgtagtttacgcatatcccagattcgcgcctgaaaccataaccaggaaaatctattaaacaagttctgaaagaattcagataaacatctaaacgaatccaaagtgacagcatgatcttggttttgtttgatagacttacaaaatgatcgttcccacaactgagaagaagctcaggctggacagggttgcagtcgaggccacaaactttgcttccttgcttgtgtatcagaataggctcacccgtactgttattggtacgatgatcgatccttttacaaaagcaatcacgagaaaatcagtttggcactcatttaaaacagtaacaaagaggctagtctataaacagttcaaggggatgaaatcacttacatgtgaagaaacccaaaattatcagcagcaagcactacacctttctccgagtttatatccataccgtacagcattttccaactgtttgcgccctataaaccgatgatatgtcgtaataagttaaatgaatcagagaagacaaattagagaaacgagacgatggtgtgacctgccatccatcagggttgagattcagcaaagttgatgaagttccagtttccaggtcagtataaccaattgttccatcagaggatgcagaataaaccatgtcatcatttgtgggactaaacctgcaataccaacaaaagaagataaatttgataaaacaaaagacatgagcttttgtttccagatactataatgcagaaagtaaaaccacaacatatactgtaagattgaaagccagatttaaaaacttaccgcatattattaacttgaacagaatgtatgtttccatacacattcttctcatacacttttccaaaatcccagactccaatttgccctttcttcagagcattaaccataagaccaacaacagaatcgaataaaaacaatgagaaaataaacgcagaaaattagttacgtatgacttttgtttcattgtaaaaccttatctccagagagaagaatgttgttctttgttggatggaactccaaacatgtaacacgtctgctgtggtatctaataactgcacaatgaacttgatccgggatcacatattttggtttaatctgtccagcaaaggaaaaagagaaaagatccagtcaaaaaatctcatcaggtatcaaaaaatgtttggcgcttgaacacgtaaggacttacaggaggaattctcggttggagttggcgcttgaacacaaagtcaatagggttctttgtattcctatgagaagttgggagtattccgtggtcagtaaccactctatgaggacaggacattgtggtgtggccttcaagtgatgcagtagaaagcgaaaacattgagtaaattaacattttctccactcaccatcatcaaaaagctcacatgtaagcaagaatcgataagaaatagcaggagctttaccaggcattttacacaagaagcaaggcttcataggacaatcgatatacgttgctcctttaaatccagcttcatggccaggctgtttacaaacctataaaaccaccatgaaacaacaacagatacgaaacaatcaaagccaaacaccaaaatcctctgtctctgcatccaagtgaagaatactaataaacaataaagtgaatttcaggcaccattataatgggaaccaatacagtgaatacttctaatatgttcgaaatcaaaatcaaaagtcattacttattccacataagcctactcagaacttgaaatcataagccaagtaagaaaactcattagaaaagttagggtttttagaatagcgttactttgcaaactttcttaataagcttaacggtaatgggtgctttccctttggctttattcttctccaattcaattttccctccatttttaaccgcttcatcttcctcctccgactccgagaaagggtaattatcttcctcttcttcttcttcttctgacgaacttaactcggaatctgtatctctagcgatgacgatttctgggtccctttttcttctgctcctcgttgaactcattttcggtaaaaatctcacgacccgacaaaaggaagagagtacgaatcaaacagttttgtttctttttgggtttgatacgacgcagcggacacaaactaaagccggttaggtcgatgaccggtttaattatttacgcggataaaaacacttttactcccatttagatttaccattataccccctccagatcttgtaatatgttcctgtaataatgtgagggtatattggtatataactaactatctcgtggcgggagaggttaagacgtggcgaattaccggccggaagcaccattcacgtggctctcacgagcaatactagtattgggcctttttattcagataagtaatgggctatggcccaattttcatttatcccatatttaaatttgacttacaaacaacattaattgaggttctttgctggtatgttgacaaacaacattagttgaagttctaggaggaggttttaatgcatttattttctttaagaaaaggaaaattaggagacgtggacgaataggaactcgtataaaccacacaaaaaagaaataaaaagacaggagcttggaatttcttaacgataaagtttgtttgtggcgctcaatttcgaaaaaaacatgtcaacatcatcttcttccacaccgacaaaacacgtcgtcgttttcaaacacttaccagaaccatctgtggaggaaagaaagttccaaccttctctgcttataatacaatacttcccctatgctatcaaacctatcacaaagcctagagtaaaatcgattctcttaagatgttatctctacgagttcctactcccacttccttcgatttccggcgatatcaagccggagatttagagcggcgatggcggttaagtagagatagctttctctctttctcgccaaaattcgaggaaaacagaggattccgattcggagtcaaatcttccaaatcggatgtttcgtttacggcggcggaggaagaagaaactctgccggaagagctacatgcagagctgatgccgaaacatgtggcgattataatggacggaaacggaagatgggcgaagaatcgtggtcttcaaccttgggatggtcacagagctggcgttgaagctttgaaagagatcgttgagctttgtggtaaatggggaattcaagtccttacagttttcgctttctctactgataattggattagaccaagagtgagtgacaaacctaatttttaaattttagggtttcttttcgaaatctcagattttgatgcgattatgagtttattcctctgcagattgagattgatttcttgtttagtttatttgagagatcactcaaaacagaatttcagaacttagccaagtaagtattgcgtataatttgtaatcaagaagtgtttgtgattgattaattatgtctcaaaagctaatcttttatatgtaggaacaatgttcggatatcgatcattggagattcctcgaaacttccgaaatctcttttaagagtgattaacgaagttgaggaagttacaaagaacaacacgaggcttcagctaatcgtagcggttggttacagtgggaaatacgatgttttacaagcgtgtagaggtatcgcgaggagagtgaaagatggcgaaatcgaagttgaggagatagacgagagactgattgaggaagaattggagacgaattgtactgagtttccttacccggatttacttataagaacgagtggtgagcttagagtgagtaacttcttgttgtggcaattggcttatacagagcttttctttgctcaagaactttggcctgattttgggagaagcggttttatcgaagctttgatgtcgtttcagcagagacaacgacgctttggtggtcgtaaatcttgattttcttgcaaatggtgtaatgaaaactgaatatgatgtgtaatatacctcaagaactatgcttttgagatagtacagttccttgtgttgcaagatatttgttttagtgataagtaacgacaaagtaaccgctgatttttattagcaaattttcaatttaccgacataaagttacaacagcataatgatctctgactgtggaacaagtagtttgatagaaatctcagatgaacataacagaacagagcggagcagaggatcaaacccgacagccaaatcgtctttcccggcgctgatacgaaaccagggcctctagaagcttatccttatcgaaatcaggccaaaggaccggcgagaagaagagctctgtataagcaagttgccacaagaagaagttactaatcctctgttctccacttgtcctaatcaatagatcaggacttgggaactcagtacaatttgtcagaagctctctttcgatcaatgcctcgtctacatcttcctctcggatcaaccctttttctgatttcttcacaatactcttgcaagctcgcaagatgtctaatctcccgctgtaatctattgccaatatgagatgcttcttcttatagcttctcgtagcttcctctatctcttggactgttcggaggagagactcagggatcttcgttaggttcccgataacagaaactcgagtttcctctctgaaacaacaagattttggtaatccatgagcagatcatttgtcaacaaaaaagctcaattgagttgtactttatacctttggaaatattggatcttggacttgaggtaatgttggatcaaagacatcaagcacttaacctcaatcttattaataccaacaaatcgttagagtcaagagttgagtgagaatgtaagctacatagtctgaaatatcacaccttgtgtcttccccaattctctgtggagaaggcaaaagctgaaactgtatgaatccccaatttaaagcaaagctcggagaactctataagccgtttagctccggcctcgtggccttgtgacgtcagcaatccggcccgtttggcccatctccggtttccgtccattatcactgccacatgtcttggcatcagctctctttgtagctcctccactcctaccacataagttccctcgtcactacacaaacacaaaactaaagctacattaggaacgatctagcattgaaactgtgaatcttaagcgcatgttgtctatttgacaattttggaaacattgccaaaatcttctactaagcaaactagttatagtcttggtcacgctcgttttctttgccttttatatgaaacagaggaaattttcgttttctttttttttttgaacaccaaaacagaggaagtataacaattaatttctctggctttagtagatgattatcattaaataaaaaatttcgtatgaaatgttcactgaatcttatgcaattccattttcatgactagattgtttagttatatatgatgaaatttttattccttagatatgatttgagaagccaacaaacataatgagaagcttagattttatgaccactgtacatcaggaaactactaaaacctaagtatgttttagaaaaattaggaaactaccgttgctcgttgtcataatcgtctctcgaagatgtgattttgatgaatccgagtatttttggcaaggaaagagggaaccaaaaatggcttgtgatgaagaaacaagagatgataaacagaaaaaggagagataaaagagaagagagaatagacaacattgttgtggcttatgttttaatttattaatttggctttgcctcgagatatctatttgttcgactcattgaaagtttctcatatatagaatccaaagacatcacctgatcgatcaaaccttctttctctttttctacgtaaaacaggccgtacgtattaaacttgtacgttgagaaacttatactaaatcattttcaatgtttaatcactaattagtagatcactagtattttttattcgtatgtcaccaatacgatgacatgttatgtttaatttttgatcaaagattccttaatacatcagctattgatccgtattagtttattaccagacccttccaagagtactgatgtaatcgaacaaatccaaatttttttctttaattggttaaactaataaataaataacttgttaaactaagtcggcaactccactgcactaaattgtttctagtgtttgtagcttaattcgtttggtcaacaacaatgacacccacaaattccttaaaataacatattttctgtctgttgttacatttaataattattaaatatatgtacgagttgaaaattttgcatctcacttttaataccatttttaatacttttactagaacttattagatgtctaaagtttaattattattgttgatctaaaacttaaaaaaagtaggtgaaaaattgaagtggtatatgtttaatacttttacgagaatcctttattaaattaggtaaaacatttgagtgattcgtttaatctaacctagggattatctttgtccagctcaaagaacccacgtttcttgtgtcacaagatattttaataacagctgatgcatacgtacgtgtagtagagaagaaaaaacgcaacacataaaatatgttacttcattggaaataccacattgatctacgagagactagacagtataattatttctgcaaaagtcagatgaacataaagacacagagagaaacagaacaaaacagaggaaacatgacagaccataggatcaaatgtggatcaaagccgggagccaaatcgtctatccctgcgctgatacgaaaccagggcctctataaacttctgcttatcgaaatcaggccaaagtacaggcgaaaagaaaaactcggtataagcgagctgccacaagaagaagttactaatcctctgttccccactagtcctaatcaagagatcaggacttgggaactcggtacaccgagtctgaagctctctctcgaacaacgtctcgtccacgtcttcctctcggatcaaaccttgttctgatttcttcacaatgttcttgcaagcacccaagatgtcgaatctcccgctgtaatctatggccaagatgagatgcttcttcttgtaactctttgtagcttcctctaactcgtgaactgttcggaggagagactcagggatcttcgcaagattcccgataacagaaactcggatttccttgctgaaacaaacaagattattggtaacaaactgagctattgagaagctctactatatcgaataagctcactcatttatatatacctctggaaaaattggatctttgacttgaggtaacgttggaacaaatacatcaagcatttgacttcaatctgagtaattaagttattagagatacaaaatggcgaaatatttaaggataactaaaacaattcgcatgaaactgccacaccttgtgtcttccccaattctcagtggagaaagcaaaagctgagacagtatttatccctagtttgaagcagaggtcagcgaactcgagaagccgtttagctccagcctcgtagccttgtgacgtcaacaatccggtctgtttagcccatctccggtttccgtccattatcactgccacgtgtctcggcatcagctctctctgaagctctttaggtgtctcctcctctccgaccacataagttcccttgtcactacaaaaacattttttaagaaaaagctaagtcatgaaaattttagcgggaactttcatcgagtttaaccagaaaaaagcaagattttgtacatcttctttttgtttttcagagatcctttagcaggaaagcaaggtcggagacaaggaagtagaagaagagagagaagagatagaaggaaccagagcatagacaacattgtagagagtgtgaagagtactagcaagtgatttgcatggatcataaaattcataattgagtttttattgactggctctggttgtttctctcgcagttttggaaaccttgccaaaaattaacttagttactttttcactaaacaaacacgagttaagcattgacatttttattttgcctattcggtgaaacagagtaagtaaaaagattaataatctctctgttaagtagatgatgctcaatcaatgaactagtcagtatggttataaattgtgttatctaccattcaaactattttgtgttgattgagccagccgctaaaatctttaaatgcataaattttgttgtattatataaattggtaagagacgatctaattatgatagtttctatagtgaatttattgaaagtaaataaatagcatttttaaaacaaagacaacaatttaggtctcatgaaattaaacaaccgtatcactacgtactattgcatcaactatgagacatgcaaattctaagttttaaactcgtcgaccgaatcgcctctgcctttgctgataccaagtcaaggcctcaagatactcagcttcgccaaaatcaggccacaaaacagttggaaagtaaagctcagtgtaagcagattgccataaaaagaagttactgatcctttgctctccgcttgttctgatcaacaggtcagggtttgggaattcgctacactttgtcaacaactctttctccatcgccttctcgttaatgtcctccacttgaatcagcccgtctttcactttatttgcaagacttttgcatgcttgtaagatatcatatcttccactatagtctattgctataatgagattcttcccttcgtaactctttgtagcttcctctacctcttctatcaaacctagaagcgactcggggagttttgtacggttcccgataaccgagatcttgatcttatcactaaaaaataaaggggaaattagcatcaagacatataaggctttaaaagaggataaagaaaaaaacatcttggagtagataccttcggaggtaaggcatatcagacgctaagtatttctcaaacaaggccatcaagcacttaacttcatcctgatcaaagaaaaagaaaaaactgaatcaaaatgaattatataaaacacaaaagttttcaaggtcacaaattttaacctgcggtgagaagaaaatactaattagtaattaacatgcatgcaagttatattcgtaaggtccacaatttttattttttttggttttagtccataacttcttggttactcaaaagcagattaaaactcttggaacgttttgtgtaatcacctctggtctttcccaattttcggtggagaaagcaaagagtgagatagtgtttgtccccatagcgaaacaatccttagcattctccatgagccttctcgctccggcctcgtggccttccgatgtcccgagtcctcgtttttcagcccaacgtctgtttccgtccaatataaccgccacatgctttggcattatatttctccctcgtttctgtttctctcccattgtaccactacaaataagtaataagaacaaacaaagttagtatactttcataatagcaaaagatgcataaatacgtagaaactatgattagtaaaaaccaaactaccgtttctcgttcctttcttcctcatcatcgtatttagaagctatgattttgatgaatctgaggatatttgtcaacgacaaaggaacatttagtcgccgagagatgaagagaccagggatgagaaaaagagctagaaaagtaaaaacaacagagaataaagacaacatattttttctgtttttgtcttttgtttttcagtgtttgttcgaattggagcgctagctcgtcatgtacttaaagagcttcgggttcaaagacgcacatgatgatcaatggaacctactttctttctctcacttgctctctgtctactccttgatgctacgcaaagacagatcatacgtattaagttttaataagatcttacgacacttgaaaatcactaaatggtttggtcacgtgattttctcattaaacaaagacatttttgtaagttcagattttgactttttcgatcagtataacttgcttgattttaacattaatgtccaagccaatcgcatagacatagtcatgcactcatgctctcacggtttgtctacacgttactaaaaaaactgaacatagaaatatacggggctttggctgtaattaaggcccatgactacacttcagaaggagggtcattagctatgatcatattcatcctagtttttatccaactcaacacaattatcagtgtgtatagtctatttattttatcgcactacccactttaattattgctatgtacagtgggatcactaaattgtttgttggggacattgaccttatccacatattttttaattgatccatacctctatcttttattttactcacccactttttatctattgtttattgatcaatgttgaaaatctcttgacatgtggaaactcttgaggtgttgtggttttccaagatctttttaacgctcaattcagtaaataaaatcatatacgatctagcaaaagcaaaagaggaatgaacttaaacccgcaaaactcctttaaacattaaattgtttcaaacggttttgtaacacatttctccattaccttttcttgttgtgttttgttaatatcttttcaaattgtgtagtagtcttttgtaaaaaatagatacaaaatcacacaatacaagtcaaagtgagacggcgtgaaatactacagtactattttacaataacgtggtcgccaaattattatttccaagtggaaaaatcctttaatagaaactgccgaaaagccctggttaggccaaaaaccccagtattggaacaagggtatatccgtcattgcacgcataaatttcgggacttttcttgaaaaagcagcttcgagaatcgtaactgatgaatcgctaaagagaggtttatcgagaaaaatccaagatttactaaaaaaccactatctctctgctcttcctctgtctacattaatgtaattttgatcatcggattgggtgaaagaaacatcaaactcctaaaagagaagcctttaaagtttttttttaatcaaaaacaaaaggaagaaaattttcctttttgttttagatggcatgaatcatcatcatcgctttgctttcttgattctctatttcgtttgatgggatttgtttttctgggaatttattcattcacctgctgccatggctaaattatctttcaaggattctcttaaagctcttgaagccgatattcaacacgctaatacactgtaaattcctccattctccacttttattgaaatttatcgacttttattgtaaagtctcgatttttagtttatctcagcgttcaagttagtttttttttttattctagttgttgcttaattttgtttccctttgattggtttgcatgtaagagaattgaattgaaggttccttcttgtttgcagtgaaaatagatgtgatttttctttttttaggttctgtagtttgattctctgaggtccactagttgagaaagtgatcactgagttaggcatttatgtagattggaactgtattttagtacaagcaatgaaagtttaagctcgtaattgattcttgtgattcttgttcttatctagttgacttgaagaagctgctttagctgaactagtattggtctctacacagatcaatgtataggctgctactgctagtgttgaagatgcaactttcttggaatctgagaatgtttctgtgattgtgtgttatggatcttttatattagtgttaaagttgtggcagtatatttgctgtttgaatattttaatggttggaggctgcttatgatgatcttgttgtgttttcgttttggaaatgaataacagagctttagattatcctcgggagaaggatggagcgcgcgttcagatgagattatcatacagcccgactgctcaattttttctttttcttgtacaatggactgattgtaagcttgctggtttcctcggtttactcagagttcttatttatatggtactgtcctctttgttttacttactacatccttcttcatactcttctttgtgattgtttgattaacctgttgagttatatttgggttcagacttatgcagatgggaaaacaaccatgtcggtttacgaaagaaaagccagtattagagagttccaaggtatgcttatatatatggcgatgatattatttctggtaaacaagattgatatcgtttaattcttatgagctttttaatattttcgttatgttttagctgtgatattaccatctttgtcacaactacaaaggggtgttacagacatagatgacagcaaacaaaaagaggtatgcaagatgcgatacagaaagaaggatgagagcgaaatgtcggagattgagatcgagagggaagaagaatgtggaatctgtatggagatgaacagcaaggtggtgctaccaaactgtactcattctttatgcatcaagtgttaccgcgattggtaagttaacttaaaagcttgaaacatgttgaatgtaacgggtttactgaataagagttatgttttttcttaggcgagggagatcacagtcatgcccgttctgcagagacagccttaaaagagtagattcaggtgatctctggatgtttttggaccaaaacgatacagtgaatctcactgcaatcgctagagagaaccagaaacgattgtttatgtacattgagaagttaccactagtggttccagatcaagtgtatgcgtcttctccttacgatttccatgtgagatgaaggcggaaaaccggttctggtaaatctttatctgtatacttggggaaaaggaggacttgttttgtaaatgtattagagttagtacaagtagtagtaatcagtcactttcttcaccattatcttgggaaggttccacttactacgtgctttttctgcattttgctttggtttccttctatctcgtaaagcttcaagaagctcatgtatagttagcaatttatgaacttaaacctcctcatcaagaagagtgtttcacttacagtataatctacatttggatatcagaaaatcttgcaaaattcaactcttttcttaaaaaaaaaattgtctaataatttttctcacaatgattggttatttacttggaaactcaaattggtgattggttatttacttggaaagtaggtgatcaataaataaaaagaaatggggaaaaaagttggtgatccggttcactgtataaaatcaaaaaaataaaagcaaaccgacccattgttcggtataatataacgtaacccggcccacaaaattctgtcgtaaccaaaccgacccatgattcagccaacataacccgacccgtacaattctattacgcgtctccggcgactgactatacttgccgttcggagttagggttttactccgagagaaaattgagtcagcgatgaatccgttgacaaggtgaagaagacgcagagcattaacgcgaaagaattagatctagggatttacgacgaagcatcttggcacgccaagtacaaagattcagcctacgtttacgtcggagaattaccttacgatctcacggagggtgacctcctcgccgttttctcacagtacgtgtttcttctcacattgttgaatttagtatattatacctagctagtggatgattcttaattctgaaatatttgtttgattgaagatatggtgaagttgttgatttgaatcttgttcgagataaaggaactgggagatcaaaaagatttgcgtttgttgcttatgaagatcagagaagtactaatcttgctgttggttagtctataaaatccttttgctttatggatattactacacattggttcttgcttctcttggtttcgattcttctcttaattgttagataatatcaatggagctaaggtgttgggaaggataataaaagtggagcattgtggtaaatacttaaagagagaagaggaagatgaagagacgaagcagaagaagagagaagctccgtggtgtttgcagagcttttcagagaaaggagtgtactcgtggagattcttgcaaattttctcacgatgaaaatgtaagaaagaacattcttctcagatatatataacatttgaatcaacatgctcttcttattgattttgtattgattctttatatgaacagagagctgccaataccgggtggggtcacgaagatcgtagaagttccaagtgagagatcaagtaagtaaataccataatgatgtagaggataaatagggattgttcatattgatatccaagtggtaatgctctacattgaagaatggtttctaagttgtagctagaatctaatggaaaatgtgatttattgaccattagcttacacaccggtgttttgctctgtatatgtcgatcttattttcagtgttcacctttacatttacagattgtttagtataggaaacacagagttgatatggtttagaatttagacaggagaccgtttcttgagtttcttggctattcctgcaaagtacttgccatggtaatttgcctgctgaatctccagctctgttggctcgcgtgatccatcagctgcataagtccctgagccataaggcgaaccacctttcacctctcccatctcgtacatacttttaccgaatgtgtatcctaccggtacaaatatcatcccgtgatgagccagttttgtcactgccgtcaacctgcagattacaaatgaatcacttgcatgtgttcttctaacatttatgtgttaggaggactatgttcttacgcagttagttcttggcctccaccgtggaaacccgtactccagaagattcctgcaggtttcccagcgagagcctgtgtagtccagagatcatttgtattgtcaaagaaagtcatgacctgtgatgccatcactccaaacctagaaggaaagccaaacatgaatccgtcggcttccgccagttgttctggtcgaatatccggcacatcgtccggtcttggaacggccttcactttctccaatattttctccggtaatgtctctggcacttgccaaagtgttgcttccacgtctggaacagagtttactccccgaagtacctctcgtgccattgtctcgacgtggccgtgcaaggaatagtacctaacagaaaagtccaagaacccaatttttcgtcaaaaccaaactggtacgaggattcaatctcgtcctgtgtgagtcagtagtacaaaatcgcagattactcttgatcgggaaattgatcgccagttgtttaacttggcactgattagtttaaactttaaagactcacacaatataaatcttggtgacagccatagcttagagcttgaagttactgacaacaaaaactctttgtccctgaaactaagaacaagatacagttaacttctaacatctgattattttcgatgattaaaatcatgatttctatatcgaagagaagacatttatacgttcctttgaggatcagcatggtttgtttatcacgccgtcac

SEQ ID NO: 926 - DNA, 77758 bp, Arabidopsis thaliana
aagctttgactaaatttagtcgaaatgggaattttacaaaagctgacattattggatttcctaattcgaaacggctccaatgcataaagtaggaattctgagaagtaactaacctttgtgaaaagggccaaggaggaggaggagaagaagatacagttttgatgttcggagttagcttcggagatgttcaagaacaatacgacttcaggtttggtgaagatgatctttaagaactatagatgacgtggcaatgagtttgaccgaccatttttttctcttaaatgggctcattatcttcaagcccaataaaatgatttaatcggcttcaatgcaaaacgttttttgggcttgaagataatgagcccatgtctctcctttgggataatttagtcaaacaaatgatgataaatctcatatgattaaaaagtataaatcccatagtatatagtattaaatttaagaaataactattatgtatagtatacacatatcgttcataatatttaggaaaaactttatggtgtagaaatattttaagaaataaatatgtagtagtcaaatataacaagatttataggacaacaaattaataatttctataattttttgaagtttttacgaaaagtagtcaagtaaatatctagtagtcaaataccttaagattcttttcttattcagataaataataaaaccaatgtcgactaggaataaacagatttttatcagaagatctctaagatattgtaagaaattaaattttgaaaagtaaatttttgtataaaaactgtttagtagtatagaaaaatatcctttcatttcatgtcaatacatctccacagaaaataaaaagttgcagtaatcttaaaaaaaaaaaaaaagttttaaagatggcgaaattacgagaagcttcattttgtgcactcgcatgtgtccttgtattgttcttgagttttgtctcggcagacacatataatcgtcaagataaacaagtatgttattaaattaaataaagaataatcaataaattttgtttctccctatcatttgatccatagttcacgatgataacgatgataacaatccatgaaggtgtatgttgtctacatgggttcacttccgtctcaaccggactacaaaccaacgtctgatcacataagtattcttcaacaagtcaccggcgaaaggtgtgattagttacaattaattttaaaaattgttatgaagataagatactaacaagtgatttctttcctagttcgatggaaggtcgtttggtgagaagttacaagaagagtttcaacgggttctctgcccggctcactgagtcagaacgaaaaagagtagccggtgagtgttcttccatcgagacgtacattttctgttgaaatgttttttaaggctaaacgttttaaaaccctttgtgttgatagaaatggagggagttgtgtccgtgttcccgagcaagaagtacaagctccatacaacggcatcttgggacttcatgggattgaaggaaggaaagaatacaaaacgaaacttggccgttgagagtgatactattgtcggagttttcgacactgggatttcgccagagtcagaaagcttctccggtaaaggatttggtcctcctcctaagaaatggaaaggagtttgtaaaggcggcaaaaacttcacttgcaacaagtaattctcttaaattacaataaagagtcgtattagggacgtattttgaagaaattagttttgtgtttgggcataaaatattttggttacaaaaataaactatagagttaatattaataatgaatctgcttacaatgtttcagcaagttgattggagcaagagactatacaaacgaaggcaccagggacattgaaggccacggtacacacacagcatccacagcggctggaaacgtagtcgagaacacaagcttctatgggattggtaatggaactgcgagaggcggcgttccagactcaagaatcgcagcttacaaagtttgtagcggagcaggttgtagctcggagtacatactatcggcgttcgatgatgcgatcgcagatggtgtcgacgtcatcagcgcctccctcgggggagacaccgcgtacatgtatgaaaaggacccgattgcgataggggcttttcacgctatggccaaagggattctcactgtgcagtcagctggtaacaatggtccgaatccaaccgtgagcgtagcaccgtggatcttaaccgttgcagccagcaccacaaaccgtaggattgtcactaaagtcgttctcggaaacggcaagacacttgtcgtaagtaccaagaaacgttctcatatctatgatcctagtctccttctcattaacgatgtctctttttttttataacaggggcaatcagtgaatgcttttgatctgaaaggaaaacagtatcctcttgtgtacgaaacatcggttgagaagtgtaataatgaatctctggtgaagggaaagattgttgtgtgaagttatgcgattggttcacaagtccctgttgcattcatatttagagacaaaaaagagttcgcctctgttcaaccttggcccgtctcttctctatcactagacgactttggctctctcatttcttacattaactccacaaagtaacgaacaaatcatctccatgtttcatactcttatcatgtggtctggattctcattctttgtcttgatatctttgtgtttatttatctcaggtccccgaaagcgactattctaaaaagtgaagcaatctttaaccagacagatcctaaagttgctggattctcttctcgcggtccaaacactatcgcggttgatattcttaaggtataacatttgtatgatgctacctaattctctttcgtttcccagcctaagagaaaatggttgattgaattgcagccggatataacagcaccaggagtggaaatcctcgctgcttattcacctttggtttcaccatctgcaacaacgttggacaataggcgtgtgaactacactattacctcaggaacttcgatggcttgtccacacgtttcaggtgtggctgcgtacatcaagacgtttcatcctgaatggtatccttccatgatccaatctgccatcatgacaaccggtaaacaaaagtcatatacatctgttactttcttgtagtacaagtaacagttttgttgattactctgttcttattatttactactctttgcagcttggccgatgaatccttctggaactgacgcagtatcaaccgagtttgcctatggatctggacatatcgacccaatagcagctataaatccaggactcgtgtatgaattaggcaaatcagaccacattgcctttctctgtggcttgaattacaatgcgactaccctaaaactcatcgccggtgaagctgtcacttgcactggcaagaccttaccaagaaacctaaactatccttcaatgtcagctaaattgtcgaaatctaaaagctccttcaccgtgactttcaacagaaccgtaaccaacgtaggtacctccaactcaacatacaaatcaaaagttgtgataaatcacggatctaagctcaaagtcaaggtctcgcctagtgttctatccatgaagtcagtgaacgagaagcagtctttcacggtgagtgtttcaggcaacgatctcaacccaaaattgccctcgtctgcaaacctaatctggtcagatggaacacataacgtgagaagtcccattgttgtttatactgattatgcatcatcagttgacatcttttaagtttaaaatcaaatttcccattgttttatttcatgacatctcgtttagtatacattaggtttaagatgaaagaatagtaagtactgtaactcattttgtcattgaattacaatattatgttattggtttattgattctacacaaaatctaatcatcaaattattgtatcttgaattcttgataaggtattctaaaagcctttgagaatctacaagcaaaactaatctacgagaatatgcaaaactctttggcaagcatcgatacataccatttggagagaacgcaatgagcgtaaacatggtacaagacccaacccatctagtcgtcttatcaaatggattgatagacacattcgcaatcaactttcggctctcaaaatcagtggcgatcagaaatacaacaatggactccaactttggtttgcatcaaggaggatacattgagaacagtacctaagagtttctttttaaaattttcaaaacttctttaaaaattgttgtacttgttgtaaaaacgttcagttctctttttgaatctaatttaacattaaattcaaaaaaaaaaaaaaaaactctttagcaaaactgttaccaagacgattgaaaagcgattccgctatatattacttgcgttaaaatataactagaaaagacataacatgattaatccacttaaactcacttttcagcgttttataaaaattctacgaatattttatccatttaagttcgttcgttaacaattattttgttattccactatttatctgacattaccactcaaactcaaagtaataatgtaataccaagtgttattgtaataacaagaatcaaattttggtcaatatacaacgatatataccaatttcctatatattgtttttggacaaagccaacgatatataccatttgatccagtcatccagttatcatcactaaaatctactatagttggtaatggttattcttatcgtaatttacaaataaagaaacagaatcacaaggatttcattggaggattttttccttgaggcatgagtcaaatatttatacataaacaaattgaaagtttgtttcattgtcttgaaagaaaaagatggcgaaacgagattatttttgtttcgttgtcttgtttttgagttcagtctcagcagtcatagatgatcctcaaaataaacaagtgagttctcataacttaaaattatcgagttttttttcttttttctttttttctatgtaatatatcttgtttctctctagtatacaatccatcctacatgattataaatatttgtaattcatgaaggtgtatgttgtctacatgggctcacttccgtctttactggaatacacaccactgtcgcatcatatgagtattcttcaagaagtcaccggagataggtgcgatttaattaattcattctctaaccattgattagtcatgaggatttataactatagtgatatatacgtatgtacactctagttcggtggaaggtcgtttggtgagaagttacaagaggagtttcaacggtttcgcggcccgactcactgagtcagaacgaataagagtagccggttagtgttctttgatcgagacatattttacgttgaaatgtttttttaaggttaaaatatttgaaacccttttgtgttggttagaaatggagggagttgtgtctgtgtttccgaacattaactacaaactccaaacgacggcgtcttgggatttcttggggttgaaggaaggaaaaaatacaaagcgaaacttggccatagaaagtgatactattatcggattcatcgacagtgggatttggccagaatccgagagcttttctgataaaggctttggtcctcctcctaagaaatggaaaggtgtttgttccggcggcaaaaacttcacttgcaacaagtaattctcttaatttctctaatagtattgttttaggcaacaagtaattctcttaatagattgatgtgttgacaatgtttcagcaagttgatcggagcaagagactacacaagcgaaggcactagggacctccaaggtcacggtactcacacagcgtccacagcggctggaaacgcagttgcggacgcaagcttctttggaataggcaatggaacggcaagaggcggtgttccagcctctagaatcgcagcttacaaagtctgctcagagaaagattgtaccgcggcatctctactgtctgccttcgatgatgcgatagcagacggtgttgacctcatcagcatctctctcgcgtcagaatttccccaaaagtactataaggatgcgatagcgattggggcttttcacgctaatgtcaaagggattcttactgtgaattcagccggtaattccggttcgtttccatccacaaccgcgagcgtagcgccgtggatattatcggttgcagccagcaacacgaaccgtgggtttttcaccaaagttgttctgggaaacggcaagacacttgtcgtaagtattcaagtaacacacttgtttttgtcatcattgtagctctgtcccttgaaatatccttttttcttgacagggaagatcagtgaattcttttgatctgaaaggaaagaagtatcctcttgtgtacggagataatttcaacgaatctcttgtgcaaggaaagatcttggtttccaaattcccaactagttcaaaagtagctgttggatccatacttatagacgactatcaacactatgctttacttagctccaagcccttcagtcttctaccaccagacgactttgactctctcgtctcttacattaactccacaaggtagctaacggtcttctcgcaaaaactctagattctccttctttgtcctgatacctctgtgtttgttttctcaggtccccgcaagggacttttcttaaaactgaggcattctttaatcagacagctcctacagttgcttccttctcttctcgtggtcctaacttcatcgctgttgatcttcttaaggtatattattatttctgctcttgattctttttttatctttcctggcctgagagacaatggttggtggatggattgcagccagatatatcagcaccaggagtggagattctcgcagcctattcacctttgggttcaccatctgaggaagagagcgataaaagacgtgtaaagtactctgttatgtcgggaacttctatgtcttgtccgcacgttgcaggtgtggctgcgtacatcaggactttccatccaaaatggtctccttccgttatccaatctgccatcatgacaaccggtaagcgaaaactaaatccaatatttagtatcttgccctacaagtaacctctgttttaaactctgttcttataaagtctctttactaataatcgttgcagcttggccaatgaaacctaatagacctggctttgcatcaaccgagtttgcttatggagctggacatgtcgaccaaatagccgctattaaccctggactcgtctatgaattagacaaagcagaccacatcgcctttctttgcggtttgaactacacttcgaaaacccttcatctcatcgccggtgaagccgttacttgcagtggaaataccttaccaagaaacctcaactatccttcaatgtcagctaaaattgatggatataatagctccttcaccgtgactttcaaaagaaccgtcaccaatctcggtacccccaactctacgtacaaatccaagatcgtcttaaatcacggagctaagctcgtcaaggtctcgcctagtgttctttcttttaaaagggtgaacgaaaaacagtctttcacagtaactttttcaggcaatctcaacctaaatctacctacatctgcaaatctaatctggtctgatggaacacataacgtgagaagtgtgattgttgtctacacaacgtgaggcagtatcagttcaccgtagtcatcattatcataatattgtcgccgatgtgtttctttctgatgattggttttcgtgtttcagagctttgcatttatttgaattaaattcatctatatgtcctagaataaatatattaattgaagctttctctttctaactatcatctcaagtctcaagaaaaaaaaattgtaataaaaatatttatttacggcgggaagttgaaaaaacgaaaagaagttgagttcataatagataagacaaatttacaccaatatgttttctaaaagtataaacacaatattactactgttaacatgaaaaataaatcatttgagaggatgtacgggattaaagttcagaatctcttagaaatttttaaaattttgaaaaatctaaaccaataaccaataaactatttataacattttgctatgaaatatcagtggctcttggctacgaatagccacggcttatttgtaattagtcgcaagcaatcattagccactacgactccacatttgttttgtgttattgaatgttttttttaaattctcatatttgtttagtatgaggaaaaaaatgaaagagagaataattgttgtaacatttttttgttttgttttcagtaaaaatataaaagaaatttagttcagaccaaatgtataaaataaaacaagagatatgtttcctaaagatataaatacattgataccattctatgttttcgagataccatttaatacgaaaatatcattaatatatggtaatactagttttattagtcaaatgatatgattcatatcctaccatacgaatatgataccatttgatacagataatcattaatatatggtaatactagtttttattataatcaaaaggtaaagaaacaaaatcagaggtatttaattaggatttttattcttgacacggtttaggaatgattctatcatttatacatcctttggatctccatatcatttgaaagtttattcattcataagaaaaggatggtgaaacgagcttccttttgtctcctctcatgtctcattatattgtttttgagttcagtctcagcaattatatatgatcctcaagataaacaagtatttaaatcattgtcaatatattttgtttctccttattatacgatctttcttacatgatgataatgatgatgatgatgatgataatccatgaaggtgtatgttgtctatatgggctcacttccgtctcaaccaaactacacaccaatgtcgaatcacataaatattcttcaagaggtcaccggagaaaggtgtggttttattaattcattctctaatctatgattggttataattagtttacgttatgaggattataaaagtgatatacacatatgtatactatagttccatagaaggtcgtttggtgagaagttacaagaggagtttcaacggtttctcggccctactcactgagtcagaacgagagggagtagccggttagtgttcttagatcgagacacattttatgttgaaatgtttttaaagatttaaccatttgaaactcttttgtgttgttagaaatggagggagttgtgtctgtgttccggagtaagaactacaaactccaaacgacggcgtcttgggacttcatgggaatgaaggaaggtaagaatacaaagagaaacttcgccgtagagagtgatactattatcggattcatcgacagtgggatttggccagaatccgagagcttttctgataaaggctttggtcctcctcctaagaaatggaaaggtgtttgtaaaggtggcaaaaactttacttgtaacaagtaagtcattaaaatttctctaatagaagattagtattgttttaggcagagattgatgtgttcacaatttcagcaagttgatcggagcaagagactacacaagcgaaggcactagggacctccaaggacatggtactcacacaacgtccacagcggctggaaacgcagttgcggatacaagcttctttggaataggcaatggaacagcgagaggcggtgttccagcctctagagtcgcagcttacaaagtctgcaccataacagggtgtagcgatgataacgtactgtctgcgtttgatgatgcgatcgcagacggtgttgacctcatcagcgtctctctcgggggagattacccttccttatatgcagaggacacaattgcgattggggcttttcacgctatggccaaagggattctcactgtgcactcagccggtaacgctggtccgaatccgaccacagttgtgagcgtagcgccgtggatgttaacggttgcagcaaccaccaccaaccgtaggtttttaaccaaagttgttcttggaaatggcaagacacttgttgtaagtatcaagtaacattctcattttcatcatcatagtatctttgtcccattaaattaccaattgggttttcttaacaggggaaatcagtgaatgcttttgatctgaaaggaaagaagtatcctcttgagtacggagattatttgaacgaatctctggtgaaaggaaagatcttggtttccagatacttaagtgggtcagaagtagctgtttcattcataactacagacaacaaagactatgcatctattagctctcggcccctctctgttttatcacaagatgactttgactctctcgtctcttacattaactccacaaggtacctagcagtcttctttctatttcattactcttaatattctccttctttgtcctctgatacccttgtgtttgctttctcaggtccccgcaagggtctgttcttaaaactgaggcaatctttaatcagttatctcctaaagttgcttctttctcttcccgcggtccaaacactattgcggttgatattcttaaggtatcatattatttatgctcttgattctttctttttttttcctggcctgagagacaatggttggtggatggattgcagccagatatatcagcaccaggagtggagattctcgctgcgtattcacctttgagtttaccatctgaggacaggcgcgataaaagacgtgtaaagtactctgtactgtccggaacttctatggcttgtccacacgttacaggcgtggctgcgtacatcaagacatttcatcctgattggtctccttccgtaatccaatctgccatcatgacaaccggtaaacaaaagtccaacttttactttcttgcatcgcaagtaacgtgtgttgacaactctgttcttatactgtctcttaatgaatctttgcagcttggcagatgaatgctactggaactggggctgaatcgaccgagtttgcttatggagctggccatgtcgacccaatagccgctataaatcctggacttgtctatgagttgaacaaaacagaccacatctcctttctctgcggcatgaactacacttcgaaaacccttaaactaatttcaggtgatgccgtcatttgcagtggaaaaacattacaaagaaacctcaactatccttcgatgtcagctaaactttcggaatctaatagctccttcaccgtgactttcaaaagaaccgtcaccaaccttggtaccgccaactctacatacaaatcaaagattgtcttaaatcatggatctaagctcaatgtcaaggtttcgcctagtgtcctttctatgaaatcgttgaaggaaaagcaatctttcacagtgactgtttcgggcagcaatatcgacccaaaactgccttcgtctgcaaatctaatatggtctgatggaacacataacgtgagaagccccattgttgtgtatattgatggttactgatgaggcattatcagttcaccatagttatcaatcatcataacattttgctatacatatatttcttcaaaaacatgtctactccatatacgttttctgattatgtcatcataatgcaaaatgaaaataaagtactaaacgatcgagaaaaaaacagttgtaaaaaaaaaaaagattttgattaaggagttgaagaaacaaaaacaaaattgagttctaaatagatgtgaccaaataaaaagtagatatctatttcctaaaaatgtatttggtcaacatacgatacttctagttaccaaaagagttttgctcaacatacaatcacagcatttgacagaaatatcattaaaattactaattttatactagtgtataaattatatcatgttgatctcgataaaaactgagaaattagacaacctttaattcattttataagaaaaagatggcgagacgagcagattcgttttgtctcatatcatgtgttcttgtctcgtttgtaatttcagtctctgcagtgacagatgattctcaagataaacaagtgagttctcataacttaagattatcaagtttttttttttcttggtttctctgtaatatatgaccaatcatacataatgataatccatgaaggtgtatgttgtctacatgggctcacttccgtcgtctcgactggaatacacaccaatgtcgcatcatatgagtattcttcaagaggtcaccggagaaaggtgtgatttaattgaatcatttctgtaaccattgattagttataattagcttacgttatggggattataacaagtgataatatacgtatgtacactctagttcggtggaaggtcgtttggtgagaagttacaagaggagtttcaacggttttgcggcccgactcactgagtcagaacgagaaagagtagccggttagtgttctttgatcgagacatattttatgttgaaatgtttgaaatatatgaaacccttttttgttggttagaaatggagggagttgtgtctgtgtttccggacattaactacaaactccaaacgacggcgtcttgggatttcttggggttgaaggaaggaaaaaatacaaagcgaaacttggccatagaaagtgatactattatcggattcatcgacagtgggatttggccagaatccgagagcttttctgataaaggctttggtcctcctcctaagaaatggaaaggtgtttgttccgccggcaaaaacttcacttgtaacaagtaattctcttaaattaatttctctcaataaagattagtattagggatgtattttcaagaaattagttttgtgtttgggcataaaaattttggttacaaaaataaactatagagttaatattaataattaatctgtgtacaatgtttcagcaagttgattggagcaagagactatacaaacgaaggcaccagggacattgaaggccacggtacacacacagcctcaacagcggctggaaacgcagttaagaacacaagtttctacggaatcggtaatggaactgcgagaggtggcgttccagcctcaagaatcgcagcttacaaagcctgtagcgagatggggtgtaccactgaatctgtactatcggcgttcgatgatgcgatagcagacggtgttgacctcatcagcatctctctcggggcaaacttagtccgcacgtacgaaacggacccgatagcgattggggcttttcacgctatggtcaaaggtattctcactgtgcagtcagctggtaacggtggtccgaatccgggctcagtcatgagtgtagcaccatggatcttgacagttgcagcaagcaacaccaaccgtgggtttgtcaccaaagttgtactcggaaacggcaagacatttgtcgtaagtatcaagtaacactctcatttctatcatcatagtatatttgtccctttcagtgacaaagggctcttttgtttttttgtctaaacaggggaaatcattgaacgcttttgatttaaaaggaaagaattatcctctgtatggaggttctactgatggacctctgcttagagggaaaatcttggtgagtgaagataaagttagttcagaaatcgttgttgcaaacataaatgaaaattaccatgactatgcctacgttagcattctgccctcctctgctctgtcaaaagatgactttgactctgtcatctcttacgttaactccacgaagtaaccaacgatcttctcttttttcatttggtctagatcccctactttgtcttgatatctctgtgtttgtatcctcaggtccccgcacgggactgttctaaaaagtgaagcaatctttaaccaggcagctcctaaagttgctggattctcttctcgcggtccaaacactattgcggttgatatacttaaggtatataacatttacatgctcttgattcttttttattatcatttcttgacctgagaaacaatggttggtggatggattgcagccagatgtaacagcaccaggagtggagattctcgctgcgttttcacctttgaattcaccagctcaagacaaaagagataatagacatgtaaagtactctgttctgtcgggaacttcaatgtcttgtccacacgttgcaggcgtggctgcgtacatcaagacgtttcatcctgaatggtctccttccatgatccaatctgccatcatgacaactggtaagcaaaactcatatccaattttcattttcttgcccggcaaataactttgttggcaactctgttcataaacagtctatccattaacgtttgcagcttggccgatgaatgctaccggaactgcggttgcatcaaccgagtttgcttatggagctggacatgttgacccaatagcagctataaatccaggtctcgtttatgaaataggcaaatcagaccacatcgcctttctctgtggtttgaactacaatgcgacttctctaaaactcatcgctggtgaagctgtcacttgcactggcaagaccttaccaagaaacctaaactacccttcaatgtcagctaaattgccgaaatctgaaagctccttcatcgtgactttcaacagaaccgtaaccaacgtaggtaccccaaactcaacatacaaatcaaagattgtcttaaatcacggatctaacctcaaagtcgaggtctccccaagtgttctatctatgaagtcagtgaaggagaagcagtcttttacagtgactgtttcagggagcaatatcgacccaaaactgccttcttctgcaaatctaatatggtctgatggaacccataacgtgagaagccccattgttgtttatacttatagtgttagtgactgattaagcattatcagatcaccataatcatcaatcatcatataataaaaatcaatattgttgttgttgagaatagtgtttcaatcccatttgaatctatttgaatttaaaactcattcatacattctaaaagaagacatcatttcaattcaagcattgtcaatcatctattctcaaggatccaattaaatcaaactctaggttaagattttgatagacctcccagtaacaagaagcagaggaatatcagaaatgcagcagaggaatattacctcagcgaattgaaacaatcatctacaacgaaaaactgtaaagctacggatgatgttaccgcgcgattcggacgataataagcttgctcatgaataatctgttggaattatgaatcctaggttaaatcctgcaagaagaagaagcttcaatgagaagaagaagaagacgctgacgtcatgttcgtgataggagaagaaggatagggtcaacgaagaaagaatttttgtggttgaggtaattgggccaggaactaaattaaagcccacttaagtatgggtttggtttattaagtggattaggttaacttaacaatgattcttaccgtccaacagagagatgcgtagatgcgtagatgcgggcccatggtaagattccaacaacgtctacaccagatgatttactcccgtttccttaattagaaagttgttgggtcatactatatgtttacaaattacaaatgggccttatccaaactaaacattgccctatttgtttgtggatctgactgcattctgatttgcgggacaaaatcctcgagtttagttcgcaaatataaatattttcgactaatacataattatcgaaaatattatttcgaatttatagaacaacatttaaatttggtgaaatagtagttagctagagcctaacatttagagtatatacatatagaactctagctatttaaacatacagttacgttaatcaaactaatgtaataatcgcacatgttactatctatacggtttacattatattatcagagttaaggacaaaaatgatttcccaaattaatcattttattcatcttttctttattagattcgaatcattttattcgaattgtcataaacttttttgtgtttttgtgtttttttcaataaaattatttataatattatgctcaaggtagaagaaagttctgcgtatgccaattttacaattggaaaaaaggtatgtgtgggactaaagaatgtatatgataacttacttttccggttttttttaacgtaaagaatattgttggagagtgatgaaactcaaaagttacaaaattggttttcatttttactagctcatttcatattacttgggatattccacggtgttaatgttagctaaccatttatctattagcatttgctatttagatatcatatatttcgagtgaatatgttgcaaaatgaaaataaacaagactaaaattcattagttttgttgccaaacaagtggtttttactaaatatggatattattattttgtaattgatttctatattcttttggttgttcgtagatattatcttaataatggcgtcatataaagtacaataggaaattatagaggattttggaaaaatatcgatttgaaatttagtgactaatacgtctagatcctcatagagttatagtaatcgataatatcaatatttcctagttatcagattttgtaatcttctttgctcattgttaacttctggggtatatatatatataaaattgtattaatttttctataaagtgaaaaaaaaatccatagctataaggtcaattttatatattttagaaaaaaaaaataatggaatttaatgggtcattcattggtttgaatttatatagcaactcattaagttctctcatattccttatgactagctagctaaactatctcctttgatttgtgctctcctctccttttgactattctattcttcttcattttttccatggaagaccgacgccttgtccatggagctgcgccgccgttgacagccgtggagagattcttatacggtcaaaagaatgatgccttgtgttccaagaaacaagagagttctagagaccaaccgatcgtgaagacaaaaatatcgattgagactagaagcgacaacaaagagaacacaacgtttgggccgacgagggagaaacacttggtccttaatggcggcaacagaaaccctactggagaagtggtcgctagaagtgcagccagagattatcaaaacagtacgaagaaacgatcatccaagaacctcatcaaagggcaatggacggcggaagaagacaggtatatatagataaaatgttttattgcatctatacaagagtcaaaatatttagtatatgcgtttgttaatacaaacatatatgtatatatatataggaagttgataaggttggtgaggcaacatggggagaggaaatgggcaatgatatcggagaaacttgagggaagagcaggcaaacaatgtcgtgagagatggcataatcatctccgtcctgatattaaggtttctttttagatctctcttcacataacatatagttttttctagatctagggttctgacataagtccctcgatatctacgtttctgccaaaacaaaaaaaaaatcagaaagatggatggagtgaagaagaagagagggttcttgtggaatcacacatgagaatcgggaacaaatgggcagagatcgctaaactcataccaggacggactgagaattctatcaagaaccattggaatgcgaccaagagacgtcaaaattcaaaacgcaaacacaaacgcgaatcaaacgctgataacaatgatagagatgcctctccatcagctaaaagaccatgcattctccaagactacatcaaaagtatcgagagaaataacattaacaaggacaatgacgagaagaagaatgagaacaccatcagtgttatttctacacctaatcttgatcagatctattctgatggtgattccgcgtcgtccatccttggcggtccatatgacgaagagctagattactttcaaaatatctttgcaaaccatccgatttctcttgagaatttaggtttgagccaaacttcggatgaggtaactcagtcttcatcatctgggttcatgatcaagaaccctaaccctaacttgcacgacagtgttggaattcatcatcaagaggcaacgatcacagctccggcgaatacaccccaccttgcgtctgatatctacttatcttatttattgaacggtacgacgtcttcatactccgacactcattttccgtcttcctcatcttccacgtcatccaccaccgtagagcatggaggccacaacgagtttcttgagcctcaagctaactctacaagtgaaagaagagaaatggatctgatagagatgctctctggttctattcaaggtagcaacatctgcttcccgttggtctagctacatccatgatcatgtgatgttatttgatcattctatctttatgttcctttgtttaataatttagtcctttcaatttcttaaaactttccatagatcataagtttcaagctgcttctcctatcaaaataattaaggtttgtgtgctagctacattgtagtcgatttttgtttcttggaattatattgaaatccttcattaattttgttttttggctgttttcatcttacgttatatatgttgtcaagtaattaagcgactaatttagactttagagattagctagtgtgaaattgatttccacttacgttacgacattggtattaatcaaatttaagtccactaattattttgtttttgtattcatcaagttaaaccaaataaacttttattcaaaaagagttgaacaaactcaaacaaacaaaggcacaaaaagtgcatatatatcataataagtattttgtaggtggagaaaacatagaataaagtaggttgttcttaaaacaatttaaacttcaaatgacaaacatatttacgataatacccttaatgtgaatcatgcaagcacctcaccacgaggttgcaaataaacacgtaaaccgttcttcatgaaaagcgtcagcgacatcttttgctcaacgcggtgaccgggaaccggaaaaacccggtaacggaggagaacggctgaagccaccgacttcatctgattataagccaagtcctttcccaagcaagtccttggtccggcgttgaacgctacgaacttgtaaccatctttgggagtctcaaaccgttcaccgtcggctgtcagccaccgttccggacggaactcgagacaatcttcgccccaaattgttttcatacgtccgatcgagtaaatcgagtaggtcaccgtcgagcctcttggcacgaaagtcccgtccggcaaaacgtcatcgtctacgacgtatttgaaatcctggtcatttgaaacgttactatacgttacacacagctctttattatgaatacatgatgagtaattttgcgtcaattcttcccttttttattttggtaaaaataacacaaattaaatactcaaattatgattgtaagtttgtaacagtcatttgatactagagctagcagaaaaagaaatctgtaatattcagcttaaaagaaaaaacaatggaattcgtcaactagtcataaaagatttatttcaggtgtttctataaaagttgatatacatgtttagacataaatcaatctttgtgcaatatctaattatttctgaatttttacgttttctatgtaattctcgcctagccaaaagcgttatagttaatgtttccatgaatgcaaatagttagccgtcaacaaaaaaagaatgcaaataattaaagagagaaaaataaaagattttaatttatcacctgaggcacagaagggtataaacgcagcgtttcagccaaagcagccttgaggtaaacgagcctatctgcctcgtcgaactctaacggctcctccgtccatttctcctgatcattgccacgtgtctccttcagaaccatcgacaactcgttaacgatcttcgtttccacctcccggttattcatgacgagccagaagaaccagctcaaggccaccgaagaagtgtcacggcccgcgagaacaaagttaagcgcgatacgctgaagaacatctgttggaagaacgttaccgttaacgtcacgtttcttcaagaaacgtgacaaaagatcatcggagggagagtttttccgagcgtcgattgcatcgttcatgtaagtctcaacgacttcaagactcttcttgagcttatcttctgatccaatccccatagctttctgaatcctccacaagaaaccggtgtagagaagtctctttagagtagcctctgtcgcggtgtcaaaagcgacagagaagggattatccggtagatccagagagagcgtctccgggtctttaccaaaagtcagaccacaaatgttgtcaaaagttaacctcaaaaacaaatcttgaagatcaaccggtttgttgttttgaaccgcacggtctaatataagccataaccggttcttgatagtcccgttaacccaccgagccatggcttgtctaagagttctagttgtgaactcaagcgctgcagtcttacgttgcatgagccacgtgtcaccgtcgctgttgaagattccttgtcctaacaggtcgtggaaagcagcgcgccacatcggacctttcggatagttgtcgaaccgtgtcttaaggatatgctcgacgttttttgggtgacacgtcacagtgtaaaacccttgcgccttggctacgaaaggtatcaccatggtgcatgtttgatacgtaccaccagttgctcggagattatcagcgatccaatcgtgaattcggctccggttagcgattagatacggtaagcttcctacgaacggtaagactttgggaccggttagtcttcgggacaggaagtagaaccaaagagcgtagactgatagggctgccacggcgtagccggttaagatagagtttagagcttccattatcccggtttaggctttttgcttttgttctgtggagagattgttaagaggcatatatggtgaatgagaggtatgtgccgtgtgcgtatatatataaatgtagaaatcatagatattttttaaatataggctatagtaagaaaggttatattttgtttcaattaggagtaagtagttgggaagattaaatttgggtcgataggataagactattgtgagtacagtttggcataatagaacacgaaagcaaattagttttcccgtttcaatttagttatgattatttttttcttttgaagcattgattatatgttatatgtacatgctttatatataaaaacgagagtaaacgacaatatttcgtgaaaatcaactagatatgggctaaagaacttaaatttcaagatcagaaattacatacataacctttgcaatgtataaccaaaaaagaataggcatttcaaattttaatttctatgtttttgaaataattgtaggaatttagttagagataaatatatacttttgttgatatgaaataagcctagctgctaaagatctttcttcgcggataaagatttggtcaatggcagttagcccattctaagaaactgggtttacttcgagtcgaatacttaaacgcacaattgcgaaacatttgaaaaacaattatataaattagataaaagtacaaatcaaaacactaaaaatatattgagaaaattcaaagaaaacgcaacggaaaatatgatcaaaaatggcaaagatcatacatatgtggttgaattcggacggttactatagactatagttatgatggttcagattttattctcaacaatgttttatttgtcgcgttacattgttagtatattagtaagagtttcggtctcaacaattcaaattatttaggcaaaaaaatcatcagaaaatttttttggctagtccacaatatcacacactgatttttttgtttgccatcacgccatacactaatagtctataattcaatattaatttgcaaagtgaatgcaacttaagataaaattccaataattagcttatttgtgtgactgtgtgtctgtgtccaagaaaatttttgtagtcaaatttcagatcacccaatcctaaaaaataccaattttctcttttcaaaaattacacaaactaaagtaatagaaaattatagtattaaaaaacaaatcttgaaacatagactatgtggtatttggtttttttcacaatgcttttaataagagaatttgttacaacaagaatgcaaatacataaccaaaagaaagcccaaaactctgctccctctcacgtggcacttccaaattcatatgtttactaacgtgtaccatcatcaccaatactcattctctaaatcaacataatctcagcatcatcaacataatcaacacgtagatatgtgcttgattaaatgtctgatacatatgtgaaaaatgagagaaacaaaggataagacacttatggaaagctcatgtcaaaacgatccaacggctcagattcgctgacaatataatccctttgtaactaaagccacacgaaaattaacacacaggaatccaaagaaggacggtggcttcggtggcctgggcctctttgccaagaaatgagatcaaattgtgtaatctctgtaatctgcatttctaactctaattattaattcttcgttcattgagaatacaatatgaaaagcttcacgttcttaaaatctcacatcttatcatacttgatcagacaagatcgtgcatggttttggcattttggacttgatggaatcatctttccccatacgaagttgtatattaacataaatggtctctgtatatatacaagtggaacaacaatacaattgccaataactttgcagaaaaaggtagcaaatacaacaacacatgctctgtttgataccaagtaaaagctttttttttcttctatacatactaagtcatcgttgcccaggattcgcagctccttttagctttttgattcttctaagtgaggcagaatcatcatcgatgcatacatctttccattttataggctttgtagatgttaactggagctagcttgtgctggaagtaaagcagtttgttttcctttgatgaacactgcaagttcctctgagggtactactctatttaaccatttctgcaactcttcaccttctactttctcttcatctgaaaccaatcacatgttttcaaacagagtcaactactttaggagctataaaaattacgatataagaccatcaacatgtgagtctagtgaccatatcatgccatgttgttttgataccattggaatgaaccagcccatctcagagattataagcccaaactagccgttctttagaatactggtcttatgttttgtttcagtaattatagttttagtatccagaggtgtcatgtgttaccttccagttgagcaccgagcccttctaatacatctggattagcgcgaacaacagtcaacgcaacatccagagcagattgcaacaaatttgtcacctctctttgaacaaggtcaaccagatgcccctgtaaattcagcatgacatgttaagtttgctttccattttgaaaaagaccaacaagaagtttaggtagaatagagttacctgatctcttccccatggtgatcccccagagtcatcaatcccaccagcagaaagcgtagccacagagacgggtccgattttctcgttgagaccatattcagctactgccttataggccatgtcggttgctctcctgatatcatcaagtgcacctgttgatatacgccccgagtaaacaacctcttcagctgcacgacctccaagaagagttaccaagcggccatgtagttcatcaataaagagcaaatatctgtcttcatgcgttgggggaatgtatgtaaagcccaatgcccctcctgatcttggtaatatgcttaatttctaaaaatacaatatgtattagcagagcattaacacatgtaaaaaatgagtatcaagcaacatgcggttctcactgctttacctcaacacgggactgtccagaaagaagacttgcaacagctgtaccaacaacagcatgcccagcttcatgccttgcaaccacagctttctcactaccttttaacctagctgttttcttctctatgccctgaagcaaacgatgcaatgtaaggaaacaaattctgatgagaggtacgatagagactcagaaagaataagacaataccgctatagatcgctcgacagcatgaatgaagtcaatcttatcaacagtcatcttgctcttccttcccgctagcaaagcagcctcattaaccaggtttgcaaggtctgccctataaaaaccaaacataaaagttaacgaaatatacagaaaaaagcaggtaagaaactttcggtcaagaataaaatacaaatttttacccagtaaaaccggttgtcattgaggcaatgctagctaggttgacatcatctcccaaaggaagctctttctttgaaacatgcactttcaaaatggattctcttccaactttgtcaggtgattccacctgaaattaaatgtcagatagctttgacaatgtattacattgcatgatcatacagagccagatattctactaaccgtaacaacacgatcaaatctcccaggccgacgcagggcagggtctaagacatcagctcgattggtagctccaagaacaataactgcagagctactgtcaaaaccatccatctcctgtaaaccagttcccaacatataaatggataatgcaaagatcaagaaagcaactctggcaggaaaagtgcataattacaaacttacagtgagcaattgattcaaggtttgctccctttcatcattgctgaccattctgaatttaccatcacggcttttcgcgacagcatctatctgaaattgaaagaaacacaaatacatttgtaaagatttacatcgatacaaagtagcaggtaatctaacactgattttgtattcacacctcatctataaatataattgacggagcctccttcttggctcgtgcaaatagatcccttacgcgtgaggcacccatgccaacatacagctctacaaactcacttgcagagcaacttatgaatggaacatcagattccccagcaacagcttttgcaagaagggttttccctgttccaggaagaccgacctaccaaaacagggaaataaagccataaattctaaagatagtaaccaaacattgcgcataaaccacctaagaaatggccataagttgtaactacattattaaactcaccagtaggacaccacgaggaggacgagcacctagacgaacatacctatcaggattcttgagaaattcctgcaacagttaaaccaagtgtaagagaaattaacaagagcatgaacacaaagcaattacagaaacatttgacaatcatttcagcaaagtgcagagcatatataaggataaatgaacctaccacaatctcttccagctcttcctttgcttcatcaacaccagcaacatctgcaaaagtgattgtttcaccatcaccagaaacttttcccccaccaggaccaccagacttgcgggtcctcagctgtcccgttgtactctgtgtatacctcacagcttttaagaaaagtgcacatggccttaacttaaacaaccacattacggtatcatgaatatgcaaacctgggaaaagttaacaggaaatcggtggagaagccctgcaagcactgcaatgtagaacagaactatctgaaacaaaaacaaaaaacaagaaaagaagaaaccttttcaatctaagtgtttcctaaagccaacaagccattataattcacggtcttaccaatccagagttgaaaaagccaccagagcgcttatcaggcgacccgaattccacattattctcaagcattttctcatacggtgttttgatatccctcggcctagtagtggaatacacaactcttttagtcggagccacacttctaagcatagtctcagacgactcagagagcttaatactactactactagtttcactctcttgcaaattcccatcatctttcaacttaaacaaaacatgaaaaccatccacctccactttctgaacctcatcattattaactttactcaagaaatcactatacggtacactcataaacgtcgtctgtgtccgaggctccgaacccggtaacgggattccgggtcggagcaatcgcacaacaaacataacaatacccaattgtagtaacattacaccaatctcctgcgcttgaattatcggtttccattgccatttcttccctttagaccaccataactcattcttaccttgcttccgtcctttatccttattggtctttccttctccttcacttgagctagctttctgatcaccttcttgacaattcacaatcgttctactactactagtactcttcttcctcgaaaacccttgccaaagattaaacctttcctggtttatcgaccctggaactgattgaggaagttgaatcgatgaattggagacgaatcgattcggattctgacgaaaaccaaaagatcgatctcggaaaaagctcgaagcatgcaaatacaataaactactagtactacaacaagttgagaatcgaaacttatcgtgaatcaatggacttagcaattcgattgaagtcattattttttctttcgaaaccctagaaattgaggaaatcaaaggaagacattgcaacacatttttgggtttatctaatcttctttttgggtcatgaacgcgaggtttactgggaacaacgacttcgaatatgaaccgttggatttgaataaagagagttatctccaccgttgataacgccggagttctgttttgtaagaagattatctgaaggccagaatccaatgtggcgagatgtatagaaagcaatggtgttttgtgtgacgtggatgaaaggtaatggttgatgagattttaggttttttcttgaccacaggttttaaacggtggatatgggccacgaatctggttttttggcttctagggctcacagaatggcccaaaagataatcattttcagtttcatggctataaattttctgaatatttttcatagaaatttaattttgttaacatcgtcaaaaaatcaaaaaatttaatttttggttctaatttgggtttctcgtagtctagaccattaagattcaaatagtttcataattgtgtatactttttttattagtttctagaaaaatagattcggcgtttaacacacaaaaaaaaaaagagaatattacacgtagaggcactattttgaaactttagccacaaataggcactttaaaaggagaaggcactttaccaaatcaaaatttccaaattgccctctgaaccacaacgctttctcctcattttctctctcaactcttttctccatcgtctttatttctttctctttccaaaatcaaaaccaattttttacgggaatctcaatattccaaatcaaaactaaaaacccaatttcatatgatttatcatcatcttccctgtctctcaacaattatttgatttggttccatttatttctctccttgattaaggaatctctgtcatcgattacaatgaaaagtgaggatgttaaccatgatcagttaccttctaagcaatctgggcttgaaacggttcgtgatgttgagaacgcgagtagcagcaaaaaggccattgtcgatgtaacttcatctgaggcatagttgtccattgatgagtgtccaagcattcaagtccaaatggtcatctaataactcacatttgaaacatagttgtccattgataagtgtccaagcactctagtccaagtggtcatctagtaactcacatctgaagcatagttgtccattgatgagtgtccaagtactcaagtttaagtatataaagcgtgtaagaagatcaattgtagcagcaatgttctgttgttgattcttaatatattcttcgtttttaagttatgatagagaattttgagataatctcagaatttctatgatttgtaagaattatagagaaccaccatgattaatgattttgaaaaagaaaataaaaatgatgaaaaaaaaaaaacatggaagacagagaagataaaaaatgatgctagtttgtctccatgataacttgtccatgtaaacgtaaccatgtggaaataagtgattctcataagtaaaagaatatgcttttaaggttagacgttcaatgaaacatcaatttatcaagaaataatcaaattgtaccaaacaaggcgatcaaatggatatgaaatttaatactggaatttgccaacttgggttttccataaactctcaaatgtttgattttgataaactcttaaatgtttgattttgcaaggaaagaaaaaaaagtaataatgagaagagagagagagagagaagagagagagagagagagagagagagagagagagagaagcgacgaagaagaaggaaaaaaaaggaacgtggagagatgaaactttttttttaattataattttttaattttcaggggcaaattggtcaaaagtttaatgaaaaagttggaaaagtgcctcatccctgacaagtgcctcaaaagaaataaaattctctaaaagtgcctaaacgtgtcacattcccaaaaaaaaaatcgttaactaacaaaactttttttttctgttttgtcgtttaaattccctcttaagtaaacaatagaaagaaagaaagaaaaattaacatcctgaaacagaggatctccagacgatataacttctctaaatttagatactccatttatcagtttttttctttgatgccagattctttgctagatctctgaaaaaaaaggatcttgtttcaattgattttcatatcaatttttcatcttttgagattatatggaaaatgggcattgacacgaaagagatcatcgttatattatggaaaattcttggatattcgatgaacatgagcatcaaattcatgataaaccacccggttttgtcaggggtttcaatgtttttactcgtgctatacattttcctcccttctctgttcttcttcttgatctatacatcaccggttcttgcatgtgctctagtgtatgcccgagaaaagctagggttaagattctcaagttcgtattcagagccaaagaagagttgtggaggagaaaagagatgccatttaaaacaacaacgaagtgttagacgaaatgctcgaatgaaagttgaagaatgggattcacagacaagcgaagaagagaaagacaaagttatcttgacttctctttacaatgatctccttggtcgtactcctcaattcgaagagtctccaaaagctttagaaaccaatgtagtagaggaagaagaagacaaagagaaggagtttcttggagagggagtttctcgtgatttgggtcatctcaacgttgaagaaccaatggtttgcaactgtgagatcaaatatggagaatcagatggtaaagtagagatgaaacaggagatgagtaatgctaatgagcatgggatttcagagattgagagaaataagagactagagtctttaatcgctagaagaagagcgaggagacgctttagactagctttagatcaaaagaataagcttcaagctgaagaaacaactagccctagacagaacaacaccaacaaccttcacgttacggtttcgaggaactcacttgaaaaacgtcgaaataattcatcagatggtactactgttaaaggattacagattccaggctcagctccttctgtgatgttacaaggaagaaacccttttgacattccttatgatcctcaagaagaaagacctaatcttactggagatagctttgatcaagagttttcattgtttaatcaaaaagatttgttcttttgtcgtcatgagagcttctgtcgtttttctctgttctcaccagaacatgttcagtgtatgaacagcccagtttctgcttcagacatttcaactactaggaaacgtttaggttatatctctaacattttctggtaattaaattttggtgtttgtattttctctgtgaatattaatgtacttgttttgtctacagatttggagaatgaatatattgatcatactgaacaaaatctcccattaaatggaaaagaagctacaatagaagacgatgataaaagcgttgtgagtcgaaaaagcgaagaaaaagaggtagaaatgaatgatgagacagattcaaacaaagaagaatgtgatgattcaagttgttcagaagaaagtgagtcagaactatgccgtttaaacaaagcggagctcagggaagctatatgccaatccatggacaacaatcccggttatcttgtgaatcaagcaagaaatagtattccaagcacattacctagaggtatagtagcgccaagactagatgataacaacatgttttacgctcgcaaatgtggaaattcgcacagtcgaacattttcagttgcctcggatatgcaagttgaggtttcagagattggttcacctcctacaacagttgattggcttgatgactggtctactggtggtgaatcttacatttatgatacagatattgacagagaaatcgtccgcgatgaagaatcacgtaagaggatgtctcatcaatatgaatcaagaagtggaataggatcaaaagaggagaatagtgagccaagtactaaacctgaggccaaaccagatcaggattgtgtggtagatgaagaccttataacagttgatgatatgtcattgttagatagaagaacccaaagtgaagagatttttgagcagacaccttctagttccagtgatgtgtccaagcctacaagttctgggagatttgaaggtatgttgttccatacaagtgcctcattgtcgtctataacagaagaacctgaaacaatcttggattcgatcgatggcgtcaactcggagattatgaatagtttgactggagaattaactgaccagagacctctgactagtcttgatttatccatggagaatttgatagatgaagaagttgctgatatgcaacaaatagaaaatgatgatctttgtggatctcctaagattattgattttgatatcattgatcatcagcagacagatcaaacgtcggatagcattcaaggagaacatgaggaaactaagagcttcttggatgcttctttggacacaccctttatagaatcatttgagagagaggtacaagaagaagaagaatcaaacttagacaagtctactgaggaaacaacaaaagaaacagaaagtgatttgaagagttctccgggacaagtttctacagaattactagaaagtgtggtaagggaagagaatggtcaggaattagtcaaaagtgctgatgagaaagcaatgctagtagaggaagagaagactcataatgtcttggaagcatcttcgagcaatgctcatacacagttggttgatttagactatggaaacgcagaaaattctagtgatgtgatacttctgcaagtccaagatagtcataagtcaccactagatgagtcagttgatcaggagatctctaaggaagtagaaaaaacagagttattaaaagatttttgtggtgaatcaacccaagaatacaaaaatagaggaaatgttgaggcctgtggaaacgcagaaaatgctagtgatgtgttacttctgcaagtccaagatggtaataactcaccactagatgagtcaactgatcaggagatttctaaggaagaagaaaaaacagaggtattgaaagattttaatgatgaaacgccccaaggatacaaaaatagagccaatgttgaggaagaatcagtagttttagctgacactcaaaactcacaagattcacaaacatggactcaacaggtttcaccttctattctaatcatctttgacattttagacaaatctgactccaccaatgattcactgaatatgtgattatccataaccatttactaagataataaattttactagcttcttcctctgttgttggttcttgatttgaagttttagtaattgcttttgacacttttgtttttattgaatagtgtggtatagattcttcccaagggatatcaccaagaacattggagatcacccagcaactagagcaagacgatgttattgcctcttcctcaaacaccgtctctcaagatatcaataaagatattaccgcggcagtagccaatgacttagctgctagtgagaggaatgatgaagtgattctgaaacttgatgagcaagttggagaagctatggaaaaggaactagagcttaatttagaatcactgcaccataatattggtttagtcggtagagaagacgatgaagaatccaagaaagtaatagaggaaatgcaaaatgcggagatccaaacaacaaaacacgaaaacagagtcttaggttagtcgtaattcaaaaatggagaagaaagcatagatgatcagaaaagtgtttgatattcctatgttataaccaaatgcttactattttgcagaaaattaacacattgatgatactaacacacagaatcatgatgacgaaaacaagtaacgctgcacataaggtacggtacgccacaaggaaaatgtgttaagaattctttttgatccataacaggtgaaacattgtgttgtatcattatttaatggactttttgtttaattatacaacttgtaaaggcaactcattcttttgtaatatactgtatagagatggataaatcttttgaatatatactcacagaagaactactagcattcatttctcttcttttcttctttgttttaatgttaagattatattagcgaaacatattacaacctaaagctacccatatccataaaaaacgaatcgaatcgagaaagtttttcggcatacaacggataagtagtacaacaacggccctaagagctgccggcgttaaaggtgactattatataacaagattacaataagtgtataaatattaaaccgtctaactaataaggaaagaaataaatttaactgtgtttaacatttttgtctttcttggtaagcatcttcaagttagtatattttcccttttggcaaactaaatattcccaatttaattcttctttcctaaactttcatgatcatttaaatgttcatatctcgtgatctttgacaaccttccataaacacaaacctaatcaagctcaatatataaaatctcgcatatattagcttgattcacccttattccgacagaagctccaaaaaatcggttttggtataaaatctcattgaaacttttgctttgatattcaagtaaggatactatcttttccataaacaatttctacatttgttcattaattctgctctggctctaaggtatttcatgtttcatttgttctgttgtgggattgatttcgttttgagggtgtcgagaattagctagctcctacttctcggattttgactattggctttgcgttttctcatttattcgtgagtgtaattttaaaattctttcgctctatcctatggtttgtgtggggattgaggcagcatagaaaaaacgcctttaatttgggttgttttgatcataatttgagtgtttatagaccaactattcacaaaacgcctataaacaaagtattttacaaaacatatcaattcaatttatttgtacttttgtttttgggaaaaaggtttatatgtttatatgtttttttttgtaatatataacaataactcaggttacaaaggatggttccgaaagtggtcgacctacaaaggatagcgaacgataagacaaggataacaacttacaagaagaggaaagctagtctttacaagaaggcacaagagttctcaactctctgcggcgtcgagacatgtctcatcgtctacggtcccacgaaggctaccgatgtggtgatttccgagccagagatatggccgaaggacgagaccaaagtcagggccatcatacgcaagtacaaagacacagtgtcgaccagctgcaggaaagaaaccaacgtggagactttcgtcaacgatgtagggaaaggaaacgaggtggtgactaaaaagagagtgaagcgtgagaataagtattctagttgggaggagaagctagacaagtgttcacgagagcaactacatgggattttctgtgccgtggatagcaagttaaatgaagctgtaacgagacaggagcgtagtatgtttagggttaatcatcaagccatggacacaccattcccgcagaatttaatggaccaacaattcatgccacagtattttcatgagcagccacagtttcaaggcttccctaataatttcaataatatgggtttctcgttgatttcacctcatgatggtcagattcaaatggacccaaatctcatggagaagtggaccgacttggctttgactcaaagcttgatgatgtcaaagggaaacgatggtactcaattcatgcagaggcaagaacaaccatactataatcgtgaacaggttgtatcgaggtctgcaggtttcaatgttaacccgtttatgggatatcaagtcccgtttaatattcctaattggagattatcgggaaatcaagttgaaaattgggagctttcagggaagaaaacgatatgatttgaattacggagctttattagtttttagggttttatagttttgtttctgttggggtttttaatttttttttgtgtatgatggcttgacatgcaaaagtcaagtgttttttttttgacataacatcatctttttacattttatacaagtttcggttatacgtaaagttttctttaaacactcagaaaataatgtaccacttattttattatattatccttggtttttatatgatcatctcccaaattgtcccaaaaaacaaaatctataagaactagttaagatgaattaattaatcattttactttccgtgtcgagttttaattgggatggtaagacattgacaaccctaaccactagactataaatcttgcaactgagtaatttatttttgtaaaagcttttttaaaagaaaatatcttttttaatctttgttgattattcaattacttgatagcttttgttcattgttttaaaagctaattaataatttgtacctttttgttgattgaattccaaaattctttggttataccaaaaaaacaaaatacgtatagtgtctactgtcctacagactatctatagcgtgtctagaaaaaggaaaaaataaaagaaaaaattaaggactataaagtttaattagttgcactgttctcaaacattgtccgttgttataacttcaagtggttgttgaaagaatagtttggttgattgagacgaacaacgaataatgccatattgtgatctatacattattcaaacattacacgacaaatattggatatttaagttagagatggccaactttgtgtctttgaacctttttccctgcaacttgtattacaaacatatttttttaattttttccctcaacaactaacactgcacaatatcggatttaatattttttttatgcatcatactatataatatgataatgctgatatgaattagactattgttgtgtttctcaaaaggggttattcacaaccaccatttgcatatttggcactgtttaggatttgtttaagcacttcttacatctgctaattcgatcgggtttgtctatcgtacacaacacatatgatgatgttttgttaggtttagtctcggtttacgcttcaagcatgttcatgaatcttaaaccgctgatgaacttgtgtgtattagatgtgaagctgtgacagcccatttcgtatcggtggtccagaagtgaagtggatgagtagttggagttatgttgtatatatgcgtataacgtaagctgttaaagacgatataatttggcttcacttgtatatcgttttaatttggcatcacctatctttcattttgtcacaccacttgttaatttgcaacttgcaaccatttgaaacttaactaacaattttactcaaagataacttaggcactgtcaagagacttttattaactatttcaatttggaattaaaacaatggacgtttattatacaattgccaaatatgattgtttcgtccatatgaaaaattaagaatttaacttacactttttaattagagagatggatcttcattagctatagttgaaacattgtgttttgggcgtcatagcaagaatctgcattgttataccctccaatcataacctggccgtatgaatgaacgccactaatagcgtttccaatcgttatattgaaagcgtctgcctgtgttccattgttgtccgtttggttccaaggaaacgcggttagccttgaacgctgatctccaacaacaatggagctcttattggtctccaaagaagcctcctcttcgagatttacggtggttatgtcgtgaatgcttgctcgtctcttgtccttgccgccggaaagttgccggatgaagtacttttgggcgtggctagctacttgtgttggcgttcgcgttatcacaaagttccgagatatgtttctccaatctcctttcccatatttcttcaaacccattagaaatagcctgaattgtgacaaatatggaatcaaatatatctacatacaatcttgacccaaataaattgttctttgtaggtttgatgcgttatatatgtgattaggcaagattttgcagctaaacagtgttgcataaatcatactacgattatgcaatgcatttgttcaaacaaattagaaatagcccgattgtgagaaatatctaatctaagatattttcataaagttatatacaaccacagtgttatacatttatactatcaaattgtcattaactagtaatttaaatattggatatttttccaatcaatcatgtcactgatttatgtttaactattttactaccttgcatgattagtgaccaacatttatgtcaatttcaccactgactgagctgatttttaagtagatttaaatttcaccattccggtataaaaccatctaattccggtttaatgtcaattcccaataaaccggaaaagaacagagattttttctttcttttttgtgtaaaagaagaaacagagacttacttgtgttcttcctccgtccaaggaacgcctttcttccgctccagctccggcgatctaccggcctgcgaccgtttattacaaacctgatgacccggtttaaacccgttacatccgccaccgccgccggcccaatctagagtgaaaggcggcgaggtgatgtaaccggggaccgggattaaaccggcctcgatgctgctgacatcagcttccaaatcgttatactgtctaattacgtcactcactgtcttccccggaatcaccgcagccaccttctgccaccgatcaggagtgttgtcgtcgtaaaccgccaaagcattctcgaatgccttgttctctgccgccgtccacgtggcaccttcaccagaagctgcgacgccgctcttagtttcctccatgagccagttcccacctgacacgtgtgacgtcgacggtctcataacctccatgtccgaaaactaaaacctagctctgttttttttacggtaagtaagaacaaatcatgccgacaaaggtcaacggatttacgaattttgggatcaataagatcccaaaaatgatattaatttttttgggtttattgatgggaaggaagagataagagaatcaaaagaagaacacaaaaatcactatcaaatgatacttcatttttattttggttagagaagaaatcatcggaatttctctgaagcattgcttagacccacttcaaggaatctataaaagtttaaaccttttgaaaaagaattgagtaaaatctagtggagatctggtaagtgagtcaaaaagagagaatttttagggtagctctgagatttttgcagaagaaataaaaagaatctattggttttccagatttggtggagctaataagcagcatgagtggtatttaagtatcagagactcagagttaaaagagatttaaagatctgggtgtggataatatttctcgggaaaataaacatatggctacagaaaatgaaaaaaatgaaattaatattgaagaagctaccttggagcttacccaattaggaaaactataacgtgcaagaagaagcaaatgaacccataaatggaaagaaaactaaaatcagaaaccagattataaacttctcgagttaaaaaaaaaagagagaagtaggcagagaaaggaggtgatgatttgggctcttatagttctgtccttgataaattattatttttggttgatgctgttttttcttttcttcttaaaatttaagatttgattctcttttttacttctttctatttttttgtcaccttgcatagtaatattcctgcttaatagttaaaaatactcatgacttaacagttttgggtaaaatggttgaaagttttaaacggacgcttcaaatagatatttgaaatgagaaaagatgattaaaacatgtattaaaatttaaaataaagtggttatgaaccgcttaaaaaattgctcactaccgtccgtgtctatctatacaccaaatgtggtccatttttcaatttctcctatttttattttattttataaattgtttaattatattcactattattgaaaatgaaaactaaattgtttgctgtaattttaaaattattttcctaatcaagattacttttactccttatacatagttacaaactctttcttaatcataaacatttttttttcttaatttcataatcatcatttcaccaccggttaaacaaaactgcatatttttctactacttttgaaatcattttgattaaactttagctacttaattggaccctaaaaacttttaagctttttcaatggaaaagtaattagtatagttagaactttacagttataactgtcttacatattcactagtataaatggcgtaacaaatatgttagagttcgaactaaatgtaaatcgattaatgatgaaatcgtaaattcttgtgtttgatttggtcacacggaaagacatgaaaaatataattttggaactttgagaaagaaaataaaatgaatcgaagaaaaattccgtgaacgatataattacaaaataataatgctggtgaacactctgataaattgtgaaatacaaaataattgacattgaggcacaaaaaagggagaaaaaaaactcaaaaacaatgtatgataattatttaattaatttaaatacgcgaagttgacattttgtgggagtgtacgatgcctctgaaaaaacaataccaagttttcaacattcatattaaactaatatacaacaaacatatacgtgcttctgtatacttttataatctttattttcactgattacgtacattttgtataatattggcaaattgggattttatgtgtcagatgagggaaaaggagccgccaaatgaacggtcgagatcagcggtaactttcatggccaagttgtacaaaggggtccacgtgagatccgcgttttgcattatcattggtcggttctttctctctctctctctctttactgttttcttttattttccttttctgttttttttaagatctcgaggaatctgtcttctccattatgatttgttaacgtggcttaatactgtacgttagatctattcattatgatttaatgaaaagtggacacgtgagatctccgattgctcccaatttggttcggtttggttaatgatcatcatagttgcttgtctttttaaagcacagattctatggaggttatttgtaattaatcagatcgatgtttgaaacatatttttttgattaaatttaaggaaataaacatttaaacataagaaataagtatacattaaaaaaaataaaaaaaaataataagtatacataattagtatcaaataatgcattatataaactttataataaatgagaaaagaaatgagtatattttacaagatggttaaatggtacatcactaaaatataccatgcatctcttaatttattcccttagcaacaaaatttcattcaaaaagaatgtcaaattgattttattggtgagtttctatcacagtagttgaccatcgcatgagttgtcttttattcaaaacaccataatgattttattttattttatgaagaatcttggaacatgtcaaagaaatccattaccgagtttcgtacaacataacattccccatttcacggatcgcatttcctaataacagtgtttagggagccctaattaattaattacattttagtcaaatagattatgtcttttaaaccggtaagcttgtgttacatggccggtaatggtaccataccgtacttagagagtagtatattatatcaccttaatccagttcagaatgtttaattaaccttgatcatatactattagagaaaaacctttgtcccccaatcatttatatgttacagtgtacatctccagtgatagttacggctaatatatatatagagtaatatgtcatatctacatttctcagttacgattattttttgtatctaattcgatgtttcttcaatacgttatcctatcaaaaaactttttaaactaaatatgacatattactttaaatataattaagaaaatacatgctttgggattagtcaattgccaaaaaaggattgaccaaacactttggaatcatgtatgtcatttcatatgaaaaggatattgaagtgatcacaccactagttaataatgaaatcgtcaattctataatcttttgcacatgtttcatcatatatgaaaaacagctaaactaattcattaaccccaaaaatctgttaaattaattctatgcatgatgtgtgatatattaccagattaaactctagtagttaaactctagtagttaacttgtaaagtatagctctccgcttagtctcttaaacaccatgatgcactcgttgtacaaccgacattttttcttttaagtataatttaacattttattaaaaaaaaataaaaaagatatatcgccagattgccaaaaaatataaagtattcattgtcagaatttttgtaatatatgcatgtttactttggcctattaatgatttaatcaagtttcttattacggtattatattaatctcgggattcttagtgcccctttggactttcaaggaggtatatgcaggggaaggtctaaatgttggagaggcatggcaactcataattgaatagtaggttttgccatttttggtacaactaataatattctccaaacaactttttcccattaatagaaatcttccaatataattactttttaattagtttacataccaacatcgttattatattagtcaattaattatttcaagcaaggaataagacagaaatctgtttaattaatctggaacctaaaaaatcaaactgaggttctagtgcaccaaggggcaaacgtcttgcgaaatgggtgaaacatccaaaatcttttggaatcaattccctgacaatttgtttatttactcatatataaaattattattatgatattttcatggaaattgtgattccagtatagctcgatattatatgcacacgtaaataattgtttattcatttgaacaaactatattttattaaaaagaaagaaacaaacaaacagaagtagccaatcaaatggttacataacttacatatgagctcaccttcaacatctgcgttttatatgttcaatacgacaccctcttgtgttacacaacttacactcccaaaatatgctacatcaactttctctatcaatttatatttcacagcagtgtctttatcaaattttaaattcgaatatcttggagtttttcgggacttccaagatgtgagggttatgacatgttgaaatcgagtggaaaataagctaaaagaaatatagtctaatagtgagctagaggttttgagttttgacgatctaattggacaatattcgtgtgtaaatgataaacagaaaaaaaaaaaaatcatttaaccaaaacctcaaaggaacaccgaccaaaccttttgattttgtcaaagacgatccgtgaaatttggcatttataatgataatcttctataattccgttaagcaccgtctggtgtccctttggggtaaatctacttgacaatttgcaacgaaattagtaaaaaaaaaaagaaattgccaaaacagaagaataacgttgtccgaaaaaaataattatgaaaataatcttccttttcttattacatataaaaaaaattgtgagtcatccaccaaacaacatcaattatttcccaaaaagttatctatagataaaatttccacaaaaaaaaaagaagtaaaacaaataatagaaaaacatatatattctaacatttgggaagatcagcgggtggaggaagcaatgactggtcagggccgtgaccattgtcaacgacgaatgccatctttaatccccaagttgtatgtaactccaagtgacaatgcatgaaccataccccttcatatgtgtaaccaaataaacaaattaattacccccaaaatcaatactttagaaagttggaccgaataataaacactaaaaaacaattcgtaaattgaaaaagccaaaaactaaattataacaactttttttatgcattaaagaaaagaagaaaaaattcctaataaaaaaaaaattctaggcattatgttaaattgtatttaattacctggattgtcggcgatgaatcttatggcagtccaaccaccggctggaactccaacggtgtttctctctaccggatccaccaagttaaacgctttcggatctttttccgggttaaaattccccaaacctctacccacttcgaagaagttaaacccgtgaagatgaaacggatggttatcggacaagatcattgctgtattctgcagaacaatttgcaccgtcgcgttgtatggaagcctgtaaagctttgtccctttcatcgtcgcagcattaacgccgagctttactggtgcggtatagtcatacggattggaaggtttcgccgggaagtcgtcggtaaatacgccggaaatgttaaagaaatgagcctggagtaaagcggttttaggcatggtaaacgttacgttgtttattccggccactaagcgaacaccgttgttgcaactctggcaagggtttgcaccaagacctaccgtgaagaacaaggaatgttccacggttgttggaaccctagctggatactcgagggagtttaagctcctgagtgatctagtgaatttggttgcaacccatgttgcgttttgaggtggaagtgatgcgagaacggtttttttggaggtggaaacggtggaagtgtgaccgatatagtggagggtggcagtggctgtgacgttgtcgtatgggatgtgagcgtccgtaaatgttgtggcggcgaccatgtaatttgaaccagcgtttgcgtttgctgttaagagaacgttagtagtctgtcccggggctatgaatactgtgtcagttttatacggtttggtgtaaacagcatcaacttccacaacggttaatacgtgaccagcaattttaaagaagagctcttcgtttaacgccgcgttgatgatccttaacatgtatgtctttcctgctctcactggtaaaccgtaactacctacaagtgaaaggaccaatattatcaaaagagaaacggaacattttgtattagtatatgatcatccttgtgtcataattttgatggtataaaagtataatatagaagaaataattacttaattaaaagtggttatgaatttaggattattggtaaatgattactttgggaaggacaattagagatggagcctgaatgaccattgatggtatgtgcatccgaagcactaggagctgttcctattcttgaagcctcgtttatgagttcttccacgtccgatttccaccattcacctatatattatcaagaataattgtaattgctgagataatcctttaaagaaaggtatgtttggattttgggtagtagctcactaaggacaatggttttctctttgtagggcttagggaaagggtatgggacaccgagcttaggcaagatgacaatggcgccgtgcaccgtagcacgaagccacaagatgtgagcatgccaccatagggttcctcgttgacccgtcaatgtaaaattgtggagataattctgtcccggttggataggacattgtgttatgtaagccggtccatctgcccaacctgtcctcaattgtctaatcccgtgcctataccgttattgttagttttagttgttgggtctaacattgttaaagttaatcaaagaaagagactgatttcactaatatcttaaaatgggtttgtttgaagttgctcaccagtggatggagacgttgtacttcacgtgattcacaactttgatcaaaatagtgtcgccttctcttgcaacaatggtgggtcccggaaattgtccattgacggtgactataggcttcgacgagcacagcttcgtggtgttcgtcatcaccacctagtgcacacatttcaatcatgcgctcaatacatactgcatgatcttacttattcatgcatgtatcaatattatgcgatgacaactattagataagatcatctaagcgtacgtagagacatttttttttgcatgcagaactataggttataaaaaagtactatacgttttaagcgcaaaatctgctcatataccggagacaaatataatatgatttgtctttttttccattgttggtaatcgaacttcgcaaaatacaattgtgtgcgaatacacaccttacatatataaacatatgtatatataggaattagacttacattgaatttgtaatgtcggattatggagtgaacggtggtcggcgacagaagaacgaacacaaagaacgttaggacgcatatacaaaaccgtcttggaatctccattaatctcaaagtatttgtgtcttgatgtttgtgatggttttaactagtgtgtgtggacaatgaaaagaaagctagctgtggtattgtagcaaattgatgagccgtcggttttacttcttaggttgaaggaagagtcctgaaatgtaagatcgttgaaggcaacttaccggaagaagaaaaaagaagatgaaagacttgcttctacttaatatgattcgagcaaggtagagagattaaatatattaatagcaaaatatttcgacagtaaaattgaagatcaagaaacgagattttacaggtcaaaagggcttaggtgatctggtggctcaaccgtatttaggattaagtaattaacctcatcctccatctaactaaactcacccacatttgctcttttatacatctatttattttttggtctatttaactatatgtgtatgtgtgctaaacttgtctaatttatcaacttttgtttggtgtgtaaactaaccacgtttatataaataacgtctatgaccttgattatttttgtacctttgcctacacgttttttttttcttctttttcaaacagactcataagcttaattgtaaacgcaaatgtcaaacgcaatgaaaacatccaatttggttggcgtttgcgtttgaaactagtagaagaagagttgtttaattagaagaaaaaaaaagaatatgattgactacaaaaaatataattcctttgaactttgaagggtaaagctaaaagctacttcttggttgttatataacagctcatctaatccaattattgaattcgtttcaaaagaaacataattttgttattcgaaatttattaatttaattaggcttggttagacattaagttctacttaagttcctaacaaagcccacaaagtccaaacaacaactgtaaacattttggattgatgatagaaataataaggcccaaaacgtttataggcccaatattacctaaacggcaagttttagtagagcttttctgtgttagcacttatagagatcgaaattctcttcattttctcaggctccaatgtcgctggacttagctcgttgatcatcgtacaaaaagcttgctcgtagctatcagctccccggagaagaagatggtgcggaaacagtttcaacaggctaaaactggtgagatgtttttctaccatccttttacttgttttcccgatcgaatctcctctttcttctatctttttccccgcattgggatgaaatttatagggatagatccataaaatttatgtcctatattcgcttttatctccgtatatcgtgggtttcgtcaaaggtttcggcttttacttgttggtgtgatcttaagttagcggtctcacataaggtgttcgatgaaatgcctgaacgaaatcttttgagctcatttttgactcggttggtaattgttttggtaattttaggaatagaggcattgaagtcaatggatgctaacaactacttgaagaaggttggattagggcgtgacgatatgttcttttggaaacaagtgggaaaagcattgctatgcacttacacaatctttggtatggcttggatttacaatgaaacgtctcctttaggttggtggacgctgaagccaagaccaaaggaagagagagaattggctcatttgtatgagcggcgtgagtttccttatcctggtgatacagaggctatggaggattttgttgcaaaggggggaatgattggtactgcaattggaccgaaaggaattgttgagtccgaaggtgaggctgataattaccagaaggaaatggagaagaagaagtttgataaagaggctcagaaactgtggttgagaatgaggaatgaggttattactgaacttcaagagaaagggcataatcttgaataaggaagtgcaatagggttttgataaataaaaaagctgtgtgtaatttagggtgtgtatcagttagactaaggattcaaccactcgtacaagtgtttctgtctacgtatagctgaaagtactatactggttgatgttcttgctcttggggaagtagctcttgtcctttattggtggcttgattcatgttttggcttaaaccctttggaatataacttgatgctttttgcccccattaaagttacccaataccttgggtttgaaactattgacttttcaagtctagtagtgatcagagccaatacttataacaaaatcactattgtattgaactctttaagagcattaatacacataaaaagtagaaaaggaaaaagaagagagaacaacatggtcatatgattttagttcatatatctatagaacagtgggagaaataagtaacacacaagggtaattgctaattacaacacagtttgaatatagtccatcatgaactgaacaatcagagatcagactaattcatcagcctacttttaccggacttgcttgtcatatggctgtttaatggcgtcaagtagaatctaaccataccatttctgaggttgtcaggcgagtaagtaccaagcttgtcatcactctggagaagatgattccgtttgccttcaacgccatgaaacattccgtcttcacacaagcttcttcttccagtctcaacaccagttatagagccatgaaatagaccatcacaagagcttcttccaccttcaaagccattaacaatagaagcaccacgtaacataccatcacaagactttctcgcactaacgctgtaacttcttatgagtttctcactgacatcaccattggtttctcctttagccactctcctaagcttcaacaaagactcagcaagagaaccctccatagtatttcctccaagtttcaaactttgctcggttttcatttcgttcttcgccacatcagttttcctctgaatcaatccccaaaagttccatcctttagaccagttctttccgctcttcttcaacccaaaaccatcctgcttcttcacctcaccagcagcaacacaaccaacacctttagaacctaactccaagctctccggtttgtaattcttaatagaataccaattcgaatccctaagttccctctcagtaacaagcaacttcgctccatgaaacaaaccaacagtttcaggtgataccttagcattagaaatagctttcaattcatcaacttcaagcaaaccatgtctcgatgatcgatcaaagcttcttctccttcgtgaatccaagtagtaatccctcgtttgagctgtcccacctggattgttcttctcatcttcctctaccttctcaccggttatcttctccggcgaggctttaacgtcttcagtcacagaggacaaaggtatcagctttggatatgtctttccaatcaaacatccatcccatgaagctctaggctcgtcgaaagagactcgacctgcgtcaagagacaacctaggatctacatcacatgaacgacgaccaagactgttcccggaatctggaatttttcgatgatgtttgagtgaaaacttcctgagtgttctgctaaaaaccgaatctttgccgttgttcttcagttgttgatttctcgattccagatctattaactccttcatcgtcttctgctctccatcttcgatttcttcttcaacgagcttcttaccctcatcatcttcttcttcttcatcctctatcaaatccggtacaatggggaatcgaatcgagctctttagcagctcatcatcatcatcgtcgtcgtgattagacctaacatcacacgatctgcgtcgtggctggtccaaaacagaagcggatgcgtcacgaacagagtaggagcgaacacggcggagctcagtggaagctgagacagaggaagatagagcttcgatggtagagagacgttcacggagacaggtggcacagaaaccagtggtgggtttggaagaaggatgacggtgacagacggcggagtgacgacggcgacgacgctgatgggtttggtgggtcatagctcacagggggtggtttgagttcagtgaatggaagaagaagagagtgaagttgaagaatctgtcagtcacattttcaggatctcgagaagaagaagagaaagagagtcaagagtggcgttgtcaacactacactaaccctttccctttccttaaaccttttctctcgttttattatttcttcattttaatgcgtattatatttatttctgtactttcttatagttaatgaaaaatacagaaatgagttaatgaaaatagagagaaaataatgttatgttttttgtacaaaatatcaaagaaaaaatggtataattgtgtcacatgagagtggcagagagaatcaaaaggaagaagtgtacaacacatcccataatgggtctgacctctggtatttgtaggacgaacataaaagactcttaattagtgaaaatattaaaattaaatggatagacctaaaagattgaaaatggtgaaaacacgtgtgccccatttgttttcttttaccttgggtggtaatatttggctgcttccgtcatttctttggattcccttcgaatcgagaaatagcttcaatgtcaacttttatttattcttctttatttggtttggatatattagagttctgattagtggagtgatttttaccaagaggttgtttagtgcaacaagatgtaacatttgaacaacacgctttactttttgatgcaacgacataaactagtttttgaattaagtgggtttgttcaaatgttacatcatttgttacctgaagtgtgttatcattcaaaacaatatttcattgttatcgtgaaaacagagaaaccactctttacaatggttttaatagattttaactatgacatttacctaaaataaaggagatttattttctctaaacgtttgtggacagcaatggctgacgagtgacattgagattcggagttacgacaagttcccaaagagtatgtgttcttttattaaattgaaaagaaaaaaaaaaccatagcaggtcccaaaaatacacagtagtaattgtttttgtctcaatgtgattgtaccggttttgttttctttctggtaaacaagattggaattttccgacgactttgtccaccacagacagaagcaaagtttagttttacagtgctcaatcgaaacgttaaagaaagcaactgctggcaaataaaaattttaatatggtaaaaagtaattaattattttgggctcaagattgtaatttggagcccaataatgttagttgggcccaaaaggaaacaaataagccttttaggattttggccttttcttgtgcaactgtaataacgaatttgccactcggaactttgccgtcgtcatcgtcttcttcgttcatcttctaccggcgcaaagaatacaaattaaatatcgctgagaaatgtgtccgtgagccttgaattccatgggaattgagtatttcaggttattgaagctagcttccttgtcgaaataaagggcatgttccaagttttgtatatcgtatacatcctttctgctctctttatattgggagatcgatgagatcgaccctaaccgagtcgatttggtttgggtcgatctcagatatctcccaatactttacaacatacatacaactggagaaagaaatcaactttttgtttgtcatagcaggtcagtctcattgcttatgtagtttacttttcggtgtcttactattatgcaccgtttagatgattctgtggcaaagtagtttgtacaaaagactcatctttcatcttaaaaccgtttagacggacctcattttacttgttggtggagatcatgcatacaacttgcagctttaaatacaaccatcactgttccttgtcaagagaaaatcttgcgtttgtctcctctttctgattctctactggatagaataaaagaatcaattaaacatttccttgttcatgtatagaaggtgcaacctaaaggcttcttctacattagatcctctagcgcagaggtatggattccgctgctcatatcactccttgagttgtaactgctttctcgatgagtataggatttgcatatagttcgattaagttttagttttggattaattttgactctgttacttagagaagagaggagatttcaaagacatgttattagttctcttttcttattctccgtcatccttagactataaaggttttaacatcaatgagtcgttttctactctcgagtcttcttgtgtggaaaagtcaaaagtatacaaaatactcagaataccatcatttgttcattttcattgactatgaaaatagaataacagcaaaacttgcaagaccaatcaagctctttgaatcggtctacaacacattaaagaacatataatttatatttctattgtatgtacagataataatggatcattatgcttatattatatgcacaaatgtatctggcgtttaacaaaaggaataagaaacatacatgacttcaacaaactttatttcttggaatttggacatctgacataatattcacttctttcctataaccatgtctatagacacatgccaatgaggagcaaaaccccaacgcctctccgcttctcaaatggaaagcatcagagagatgattctgagtatagttggactgatgtaggtactggggagaaggccaggaatgtctccgtcctcggtgcgatcagaagggcagctaagaaagtctttgttattattttcttaggacaacggaagttaaagccaacagaatgtagatctgatcctggagagagcagcacgcacgacagagaatctacatgtaagcaaattggtgtttgattgaatctttcctaaaacagcctttcttgaatatcaggagcatgctttgaatctcttaagctctggtgatgtatgccgaccattaagacaaccaaactttgttacaaacctgagggtctttgatggatgatgcgatatatttctgtacatccatgctctctgtatatctgtgacaatcttttttctttttcttgaatatgtgcagtatcaggctggactggttattcatcaccaagctcctttggaaggtcaacagaaagaaaggtttcaggtcaatatcgtttttctggttcaagatttcaaagtcctgggaaagattcttcttctagcaaaagttggcatcaaggcccggtaatattttcttttggggagcttcaaagggcaaccgcaaatttttcttcggttcatcaaattggggaaggcggttttggaactgtttttaagggaaaacttgatgatggaactattgttgctatcaagcgtgcgagaaaggtagtagttgaaatccttttcttggaaaatatgtggaaaacagattgaactagtttcttaagaattattcggagaagacattatcgataactcaaaattctgtggcagaacaactatggcaaaagctggttgctagagttcaagaatgaaatatacacattgtcaaagattgagcatatgaatttggtaaagctgtatggatttcttgaacatggagatgaaaaggttattgttgttgaatatgttgccaatggaaacctacgagaacatctagatggtaagttgcaagaggtacttccttcttcttttacgtgtatatagagaaaaatccagtctctaattttagagcatagagaactttcccaaaaaataaaatatctaaatgaattctcaactattgatcctctatataaaaacacaggtttaaggggtaaccgccttgaaatggcagaacgtcttgagattgcaattgatgtggctcatgcattgacctatttgcacacatatactggtaatcttgtcatattgttgtcggtgttgcattatagcttattgtgccaagatttaacgcattagggattttataatgcagatagtccaataatccacagagacattaaagcatcaaatatcctcatcacgaataagcttagagccaaagtggcggactttggctttgctcgtttagtgtcggaagatcttggggctactcatatatcgactcaggtcaaaggatctgcaggctatgtggatccagattacctcaggacgtttcaactaactgacaagagcgacgtttactcttttggtgttttgctcgtagagattctcactggaagacgtcccattgagttaaagagaccacgaaaagacagactcacggttaaatgggtaagttactttctcttttccctttcaccagaagctcgagattatctcaacgactaaatcaggagaaactcgtttcatcttgggcaggcattgaggagactcaaagacgatgaagctgttctcataatggacccatttctcaagagaaaccgagccgccattgaagtggctgagaagatgctgagacttgcgagcgaatgtgttaccccgacgagagctacacgtccagctatgaaaggcattgcggaaaagctatgggctataaggagagagatgaaggagacgatgatatgttcatctgcatctaattcttcttgttcttcaacaacacatagcttcattggtcgtgattcagacagatatgcattgccgaggattgaagataacgagaatagcattgagtaactctctccttgatgatatcaatctgtgaaacatgctgctgcttctcatttgaagaattttttttacttagatgaatacaaatacatgtcacttaaatttcttttgttcttgtataaatacaaatacaaattacttctgttgagtttcagagaatattcttcaaatgagaaaagatggatagtagtcttaacatatgtaatgtagaaggccaaagtagaaacgatatttgaatcccataaatatcaaatcacaaccattccccagttggcagtcattacacatcaaatccagagaagatgacattgacgatgaaagatcactaacaacaacaatccacaaaaaaaaaggatacaacacaaacacaaaacccttctttttgtattatatataaatttacaaaagagactctttcctgtctctcaagcgaatttaggcttcggcaaggctgagccaccaaggccgctgctgctgctgccaccgcctcctcctgcgtggactggtccaagcttctggatccagtgtttcagacctttccttgggtccttacagatcttgctcgaagacagattcaggttcccttcacgttccagtgatatcgcaaactgttcaagcactttcactatctgccagaactcgggtctcttatctggtgcaaccgaccaacactgctctatcagagctttcatggctactggacaatctcccgggatagctggcctaatgttctgaaccaaagatcaacatttttcatatctcaaatggttgaatcaactgaacaataaaagacctaaaatatacttgtgccggaagatttttgtctgttaaattctaaggctttaaccgtaaccattagacagttcttgtggcataaactctacggaagattacaataatgaaatagtaaggagacgcacagaatattttaccttatgtacgactgcgaaagcagcttgaataggattcatgtcctcatatgggattgctccagctaccatttcccataaaacgagtccaaagctgtatacatcggccttacgtccatgtggtttccgttttatcatttcaggtgccatccacctatatgttccggggtcatcagccaacatgtcacagtactcctcctcgcacgctatgccaaagtcagcgatcttcaaatggaattcttcgtcgatcaatacattttctggcttaagatcccgatgaattatgcgtcgtgagtgaatatattccatccctctagcaatatctatagcaaactctataagctttttcaaaggaagagacctattctcaggcttgtgcagaaaagatcttaaagatccttcaggtaaatactgcgtgaggacacaatatacaggcggatctttgtacgctccaacaaactgtttttagcacataaataagagaagagaagttaacaaaaaccgtaaatcattccatctagactgacataacgattaaccaagagaacataacgagagaggagaaatcacctttataacatttggatgggtcaatcgagacaaaagggtcacttccttggtaaactgtttctctaaacgagctcccaagcatccattatcgtcatcatcaggtacagtgataagcttcacggcaacagctttatcttcatacttaccatgatatagccggctgtataaaccatgagcaaacttaagcccaaagaacagctttgacatatcaacacggaactcttcagaagcttccacagcactcactctacgaccagtattatcaaaaagcttagaccatccagtgtccttcttgctcttgaccctctcttgaattctcaaagtgccaagatctctgataggacctgaaggagaccgcaagttaaatgatctcttgtcaaaggagtttttatgagataacttaggcttcattcccttttccgattccactcttcttggatgtggagtagaaaatctcttacgctcagacctcgcttccttaaacacatcgggaacagccatctgaggcgaaggagaaacagatctctgcttatgagtaaccgggtttgtctgtatttccgaatcaacaacatatacatcagcagcttccaaactcgaagtatctcccgtagtctgtgagttactcgaaaccaacttaggatccgatgatgatgccgacgacgaagaagatgatctctgaggtatagcttttaatccagaaaacttatcttggtttatcataaaaggaagagaagctaactttgaagaattcaaacgataagaaaccgtttgagaaaacttagccctcctaatccacgaagtagcctcttcatccatctctaagctcgaaaacaaactaaacaacctttttatcaaagactaaacaaccaaaactctcaatatctccaaagtacctaagcaaacccgtgaatacgaatgagatgacttgctgcaatctccaacgatctcatttccacgaagatacaaaatcttttcaaatccatcgaagccccatttctcaccttcaaccattaatccacaaaaactacaaatcataaaagaagaaaactttcctacgaatactactaagctcgaaatttctccaaacgttcccaccaaaatcaccggaaaatcctgaattacatacctcttcctacaaaatcaagcaacaatactcagaaaatcgaatccatagaagctattgaaaacgataatgagggttaaaagatcgatctgaatcaacaaatttaggaaactagttttcgatatttgtttacctgaatcacaacaaaaaactatgaagcgtcgtcgtgtgttaaaaggaagagaagaggaaagccaagtgaatcggaaatcaagaagatccggcgacttgaagccggaggaagatggaatcgaaggagaaatttgagagctaaaccataagacgtttttggattctcaaagacctttttgacgaatccagacctcttacgcctttttagatggattttttttttctttttttttcacagataaaatgtggaaaataaataaattcttttggaatatttagaaaaatacgttaaaacgacagcgtattaatctgtctgtcagcatctctgatatgctctaattattctgtctgaaagagaaatttaatttaggttcccttttttagtcaaataaattctaaaggccatagacttcggcccattaataataaaactggcccaaattactttatgatataggccatgatgattgcttgatagtaaccagaaacgaaagaggcctcaacgttgacaagcttcactaatcctatgagaaaaactcttctgttttttttttaaagaacataattcacacaaattaaccattctaaacaagaactttaaactacataaaaccattcctatctcttattctcaacattggggaagtgcttaaacaattgttacaaaacaacttttgaataaatacatgctagttttttttttctttgtcaacaactttattagattgactcaaaacaagcccatgctaggtttttatatcaattaaattcttgtttttttttcaaaaagaaattaaacattgtttttttttttttttgttaattaaaacatgctagttgcatgaagttataagttctgtgatgacactgttttaaattatgtattagatcatatgcatctatatttttttctattttatttgtaaaagagaaaattataaatgctactggccaaaaatacgtgtgtgtgtggagaaaacaaaatggccaaaaaataaatgataggagaggaatagaagagaaagaaagaaagatttaagaggtgagtccaaaagattggtaaaacacaaatgcttaacaacagagttaatttttggggacaccacacacatgacacatcactttgtctccagacctatgtctgtcctacgcctttggacatacccttttctcttttatccgatcatcgtatcctacacacattatctcatgattactaatcttgtcttcctttttttttcggtttaaagcaataagcgatatgtacacatcgcatacattaatattttacaccactagctattttaagtttctttattgaacatgtgtacctagctagctagttcatatgatcatatcagtggaagactggaagatatactaaattatacacaaatatactttctgttcagcaaatgttttttgagtcaactattacatttaattaatggtttaaaatagcgagctaagagtggagttaaaatggatgcgacaaaaggaaaatatttgaaaatttgacaacatttttaagatatatttacaagaagtaccaacctctggtcatcattgtattcttctaaatcgcagaatacaaaggttagtacaaaagaatctatcaaataatgggggtactggatttgtcaactatatcacttggaaagcttatgcatggggtataaccaagtacgaaagtataactttattcttaggtcaaacttgcacaaaatattagggttaagaaagtcacctgaatgatttcacgggaactatatatggttaatgaatacccaccctataaaaaaaaacaagagtgacacagaaaggatacaccatttatagacaaactagaactggcttaattttttcgtagcttgcacaatttcatatatatttttaagaaagtcttatggaagatatgtacattaagaggtcatgcgtttctgatttatttgtgacaacctcagttgaaatcattttgccttgttgagcgtttgtgattctggcttcagttttgattctggatatacttccagtgaagttaatatgatttgtaataacaaactagacaacaaatggctagatgtcgaaacttgaaacaagaaatatcccactcctcaattataatttcataattaaataatcaagtttgatacttgtcacatcaaaactctttttcctcattggcctgtttctctcaaatcttcaataaattctctatatatatatgagaaactttgaacctcatttttcatatatatcactgttcttcttctatattggagttcatctcttttgtttctaaagaaagagagagagagagagagagaagagaagatgttgccaggcatactattatgctcacttaatcccaggaatcacaggtaaatattccttttcaccccagttggaatatcacttgtgactaatataatttgttcttttgtttaaagtattgatgtgtttaaagtgttttcttaacatggggtttaatgataaattttggatttataaaaaggggacaagaattttctatatgatttggtttggattaggcaagatccatgactttatgggatcactttctcgtccaatcaaaagagagattcctaaaaaatagatacttgaataattaccacttaataatggctatttttttagaagagagaatacaaaggataaattatagtcttaaacatatttaaaactacataatccatttttgtttctcattttttttctttctaaattgtttctcattaaacgcatgtaaaaacaatatacctattgtaaaactaacctatgggctaattaaaaaaagaaaaagatattggtatttaaataaaaataaaaataaaagaggacgaccatgtgtgcaataagaaagttgtagaaagacccaaaaactttccccgagggcccaaaatcgaggttaagcttttttacacgtcacatcgattacaatttttttaaaagtcaggggtcaaaacataaaactaaaaagggttaattcggtaattatgattcagttcttattgctcttcttctccccacactgagtcactgactctatcactctcagagattaggatagaaataatcagaaatctccgtctattgtcgtcgtcggccggagattaattattccggtgacgtttagttggtttttcttcattgtgcagcaaaaagaaaaagagtgagcgagagagcttagaaactgagcccaaagacattgactactggtactctgttcaattcaatcgagatcctccgagattcgctctcaaatctgagaataacaatcaccattcccgcaggtaataaagcttctattactttccggaggtttgactcgttgttgactttcaacaatttctggtaacttgaacggcgttttgcagtaagagcggcggcgatttttgcaagaagaagaagagaggagaaatggcgaacaaggtttctaacttctcggatctgattcaacgagttacggcgtcttgtttgttgcatccactctccgccggccggcaagatctcgctgtgaatcgccgggaagagtacgatactgaagaagaggagaatgaggaggaaggtgagattcagtacgaagacgcattggagaaggagaatggtaaagatgagacaattagggctaagaacggaaggaacggtgtgagtgttgagacggtgcaggagatggagatggtgatggacgaagttttcacggcggctgctgctatgaagagagcttacgttgcgcttcaggaagctcattcgccgtgggatccggagaagatgcacgatgctgatatggcgatggtggctgagctgagaaggattggttcattgagggaaagattcaggaggatgagaggtaccggaagtggtggtcgaaggaaaaacgacgccggaagaggaatgctgagagaggccgtggcgccttatgaggcggttgtgaaggagctgaagaaagaagtgaaagtgaaagatactgagattgagaatctgaaggagaaagtcaaagtggcttctatggccaacggtaacggaggcaagaaacaccgattgctttcaagccggaaagttaactgtaccacacagattgctgtgtctccggtgccggagttatttgagatgacaatgattcaggtgaaagaagcatcaaagtctttcacagggattctattgtcactaatgcgagctgcacattgggacattgcagcggctgttcgatccattgaagccgcttcagcttcatccgacggaatgtctgcttcttcgtttgcatcctcggttcagtcatctgtcccgaaccagcacgcgaagtttgctcttgagtcttacatctgtaggaaaatcttccaaggatttgatcacgaaacgttttacatggatggaagcttatcttctcttatcaacccggatcagtaccgtcgtgactgctttgcgcagttcaaagatatgaaagcaatggatcctatggagttgctagggatcttaccaacttgccattttggtaaattctgctcgaagaagtacctttcgatcattcaccaaaaaatggaagagtcgttgttcggggactcggaacagcgggagttggttgtagccggtaaccacccaagaagtcagttctatggagagttcttggggctagctaaagcagtctggctgcttcatctcctggcattctcgctcgacccatccccgagtcactttgaagcaaacagaggagccgagtttcactctcagtacatggagagtgtcgtgaggttttcggatggccgtgttcctgcgggtcaagttgttggatttcctgtttgtccaggattcaagcttagccatcaagggaaaggatcaatcatcaaatccagagtttacttggttccaagggcttaaaaaggtttctttgagttcactgtttcttaggaatacattatgtcctcgtgtgttgtttaagactttaagacaatctagcttcggaaaaatcttgaaataaagagaccgttcgtataaactgttcttgcaaagaatttttttttggataaaatgtttctatactaatctaaataacaaagctcacataacatagaaagtatatatgttttaattctaacaattcaaagttttatagaagggattatgtaataaggtatggttttcgactagggatctgagaatcaatcgtacaagacttctcttagaaacacttttttcacctgtcacagagtgaagatgaaacagagagaaaaatgttaaaaaaagaagagcaatccaaaattaatcatcatcgaaaagtaaatgagaatgagagaagaatctaatttacttgttctaatgtgaggaacataatggcattccaggttcctagccgtgtaaaattcgggagaaatcctttgtagaatgccataatcccctttaaatagaccaaaaacagaacattcatgattgcatcaaaagagagagattggttaaatgtgaactagaaaagaatactaacctcggtcttcatcgttttgatgaagcaatcgactgtgtttcggtaagtagagtctcccatcattctagatttcacctggaacaacatataaagaagaaccatggccgtttagggcaaataccaaagtatcaaccattttgtttccttcggtaacaggttaatactaatttctccttccgtagagcattactatctaataatgctgcatttaccaaagtcaaatcaccaagcaagaggtcagaaacataaaatgtggaagacacaaacatgtgagacgctacaccgatgtcactttcaaagtagagctatgtccattctaataccttgtcctttaaagagatattctgtgataaatacctactctttgccacaaaccaataaatagaactcagtcagtactaagtctcttttgttcgttctcaaaaagaacaatgatttaggcacttagcactttcgttttcagatctatcacttctcactgaaatttattgtagatatacgcactaccacacatgatgagacgaaaaccaaataatcttgttgttgatttatgtaaaagacgaaaatgaatgcttaccacatcaattggagaaccgatgcagacagcgaagaagcctgcagctaaaccagctagtagatgagttaaaacactgtctctgaagaacggaattttcataattgtctgcatatgtatggaagtataagaacaaacaaagactaaacaaccaccagtagaagccaaaaaaactcctacacaacaaaatacttgagaaagaaatatcacctcctttatttgatcataactagctaactctgcagcatttacaatagcattccgggcaatattgggaccaagtccagtccatagcgcactaactccttcctattttataaatcaaaaggctataacactctgctaacaaagtattttaatatttttgatattgttatttgaagattagtttactaaccagcttcacaatggtgaaataagcgtctacagctcctgcataacgcctaggaaccccagccggtaactttccttctgattgaagccgaactttaacaagatcagttggattagctacaataatagctatagctcctgttgtgtcacacacaataaaataattccctttataatctcaatcattcactcaagttacttccaagagactatcaaaattaagaactgagctcaccagttaacaaagctgcaagaatcttttgatataaaggaatatcgccaataaagtcacttccaaccaaaagtgtcttcacctattcagatatagcaaaataaacaatccatcagatataactttataagagagtataaaacacacacaaaaaaaagcaccagagaaggaaaataatgtgagactcacaggctcatataacccaatccttaagccaccatagatacattggcgatgaagtcctgcaataacacctttccaaagacctgaaataccttcttctctagctatggtagctagagtaccaattgatcctctatacttgggcaaattctcaccatctccagtgggaatctttctttgaagctgaagtctaactttggctgtgtccaacggtatagtacataactacaacatcactcataaaccatgaattagaatttgactaaagactaatacaacaaacacataacacacgaaaactcaaatttcgtaaacactaaatctatagagtctatgtaagctcatttcaataagtatcacaaaaaatcacaagtaatggactttaaagtcgtagactagaccatcatagattagcttctaaagctcaatttcgaagattcagtagaataacggtaaatctaagatagcatttctctggattgttcaccagtgacagtgattgatcgaatttaagaatattgacagactcaaatgaaaaatgaacaaaaacccaaaagaggaataataatctcatctcgcactaaagagagatacctcagcaaaacaagcagcgaaagcgctgcaaatgaaggtttcaaggaacgaaatctcgatccttggtttgaaatccgccattgttatgctataggaacaagataagcgaaatctggagaagcaccgattaggcaaaatgcaaaaacaaaaaaaggctaaaatttgagaagttgctccagtttctctctaacagcgatgatgattgatgtaatcttaaaatgggtttctcaatgattatagtttttaggagtagtaatgaagaaaagtgagatcgagatttaataatggcgtaacgaattcagaacaagtacagagtctctctcaatcttttgtgtgttactattttcactataaaagtttctctctgtttttgttgtaactaaacacgtcattagatagaccctcttcctccactggaaggttatgtacacaaactgtttttcgcacacacaaggttatttactggatggtgttgctagggatacgtataaagactattcacgtgtacatttcaatatacaacaaaggcactagatgaaccagagaaatggtgaatggagcttataggagttttagctgaaccaaagtgagtgattctataaacaccaggtgatgcggtttcagggattctccattcgatagttgctgtgctctgcgtgctgagtttaaacggtcttgaccacttaaaccggaggcaaaagtcatcatcatcataaacaggtacccatgtctctcttccttcgagccacctctcaacaagcgcgaaagttccttccgtcatcagatcgtttctcgggttagctgaccggaattgaaccctcactatgtcagctcccttcctgaatttggataaccgaggaacatccgatgtaacatctccgaatgcagttccaattggtgtcatatccgcaacaacaggtgttagtaagcttatttgcttgtgaagtaagtcaggtggttggggacccgggtcagtggtttgagcagatagaagatcatttgctagtttcttgaattcttgaatgtatccgcttagcgtgtgaggtccatacaaagtcgatgcaccctgagggaaagaataaacagagttggtttaagagcaggaaatcaagaaagatcctacaagctcttccttcttatctaagcctctgacctcatatctctgaacttggtattcctcaaatgtggcaatatactgcgaatacgaattggttagcccggctattaccacgctgaattctcttccattgctgccttctttaagcactgttttcacggcatcacgtagtcgcctccctgccattgttgtgaattcttgcaagcagaacaatagagaaaggaaattactaatgttctacatcagtttagaaatgattttttttgttctgggggagaccggaatacctccggggacgcagagaatcactagctggccaatgcggaggatctgaactggtaatatcgacggctgaaaatggattaagaaacagtttttccatcacaaatagctaagtgggattcaatttttatccatcacagtacaagattatgctctcaccgcccagtcgtatggttgtttcatttcaccggtatcaagcaatatgggtttaggtcgttggcatcgtacttgttcctcagttggattcttgagaaggttccttacaagcctccagaaaggatttcccttacacaaagtcacaacataaagtatagtactaaacatctttcattaccaagttagaaggagaatttgggttttacctgatcatctccttgtttaaagtcaaatgctccaggtccatcagttgttcctgcagcgaaaccaaaacccattgcagctggacatgttttcaccacttcggaacctccattttgtccattaatcgtcacttcaagctgagagaaatcaacatatgcatgacgatagtcaacttttccttgtatctcctcagaggctttagtgaaaagatccgcagccttcttgaactgcctctctccaataatgcgggtactctcaaattcatcagggtagctgaaacatttagtcatgccaagttatacatctaacaagcttgactctctaaataccatattgtactaagagagaacataattttctgtgattggtttccgcattgctgaaagtaaaagtgtgcagttaggaataagacgtaccctggtccacggccgtagcattgctcattctttccaccacaagtactttggttgaattcacaaggaaggcctgtgtctatacagaaggctcccaacacattcggactaacatcaccgcagttagtttgacagaaggcagagacaaatctaggtttgtcagcgtgtctaaatctacttctgacccgtctagcaacgcttgacatccttgtaacggttttaccgccggtagacagtaacgaggatgccatttccatcaaatcttgatctgcaataaaagcaacaaaaagttagttttacaataacaagccattactaaaactcttggagctatggttatttacgctcaccataaggatcactgattatgcttgagactcttctaggagattcaacatcaactgatctacaaccgttttctcgttcaaaccagtcttccatgatacgtgctgcagtgcctttattgtccccgctgattcaaggcatttgtacggctcatcgaagtgccatgagttgcaaaccaattgaaactacccactggaccccattgatcatcaacgaatttgacaagtgtcatctctttatctacatcatattcatatttactacgttcatgtgccggattgttaaggtaagcactgggactacggttcacaccagcatccaagagctcccctgcaagctcagctccaaaagaaatgtctttagagaaagcaacatataaaatgaatcataaaaaaagtgtcccacaagctaaatcactcacctttgttgattaaaatggacccgggacgaagattttcatgagcttgtataatactttgctctataccgtccacaagagcattgaaagattgatgaacaaacccgagagatgtaactaagtacaaaatgtattggagataaccccctggaccagcatgagtatgagttccactaattgcaacattttcctccgtataaagctcaccgtacctctgtttcaatctttcaatcactttgatggtcacaagctgtgaggccataccagcatcaagattaacaaaagcaatccttttcttgtatggctcagccacgatgaacgcacgagctctgagcctgaagtgaacaccagatgctacttgttccatgttagcataacccatcatgttaacatcagctgcaggtcctgtgatgtcatagcttccaagacccatcaaataatcggaatctgagaatatacaagtgagcctcaacagaaatagcaagaacaatgtgcagtgcatagacatagaccacctcgtcatcttcacactcaatatggagtaatcaactctttctcatttctagtccttcctagagaataatacaaacgtaagcaacataaacaaacacacatatttcatgaatctaaaattattaaacccaaaatattatccaacctgaagaagaagtaacgcaatccttaatgattttagctgatgaacacactaaccatttgctggagctgatagaaactaattgatgtgaacgatgtgaagcaaaacaaaagaagatgagagaaactcaaatagacaaatactcaataaagtttcgtttttttttctggtaacaacgataatagtatgtaagtaagagtaaagtgtgaggaaagttcttatttttaaggttgcggagaaagaaagctacccaatttcagctgttttagcgtatctgtccttctcaattcggttttcacttcttattcgatttctaattttcaaagtttggatttttggggtaaagttagttaaaatgcatacataacgggggtagaatgtaatttataaaattgtattgggtctgtttgtgaataaaccaaaacttgtggttcttctctgtctcaacctcagtcgccgatcttcaacagtggctgaaacaatagagagagagcgatacaatggcgatgacacttatgaacagagcaatctctagaaccgaaactgttggtgctttcagtctctcgcttagtctcttaagaaatttctctgcggcgccgtcggcggcatctactccggcgagtgaaaaccctagctccgattcgaataaacctaaacgaagaaagaagaaaaacttaatcgaagtcgctcagttcttacctaattggggaatcggataccatatggctaaagctcactggaatggaatctcttatgaaatcactaagatcaatctctataaggttcttcgtcttcttctctttcatgtctggattgaaaagtttccatttttcgtaagctgagataatgtttttattacctaatcatttggggtttgattatctgacttgggtatttgtttgattttggattcaaatgcaggatggtagacatggaaaagcttggggaattgttcacaaagatggtgactttttttgtcatcatttgcttcgtattgctaagtttttacgcccattgatgtcaaagttggagctttttgtcatgtctatggagtatagggtgaaattattaggagtagccatatctgaaactagataatcaccattgcattggtgttaaggtttatgcagctttcatgagagtaacgtacatacatggtctcaaatgcaggattgcgagctgcggaagctccaaagaagataagcggagttcacaaacgttgttggaagtatatcccaaacctgtcaaagactactcctgcaacaaccactgctgatgttcaagctgcctgatctgtttacttccattgttgtgggtacttcttgatctatctgtttgcggtttctttttattgggaagaagatacagttgttgtgacttgatagtttctttgaattcgtcgatagctttgtaggaaatgatccataatctacggatgatgaccgagtattcgtttttcttgttaagactttacacttcttgagttatgattttgatgagccagcatccctaagcctagtgtttagctactataaagtttgaacttgttttgtaggagatctgctggttttaaacatgtaataaatgacctcaactacgattggcaggttttagtttctatcaaaatcccaaattttcaatattgaaaagtctcctcttcagcacagcatctttatttctttgttcaaataatacatcttttgcagtaaaaatcaacttgaatacttctcctgatattgtatagtgcctgtttatcgaatcatcaatgttatgcaatggaagatagtcttgttggaccagttttacatttcttccaaccgtagcgtaaaaatcttgtttgtatccctttttccacagactccaaaaccatcgtttagattcacctttaatgaaagcagtttttggttgaaccaatcttagtcaagtaacaggaatccgcatatgaaccaatctaatatgatatatatatacaagtccgtgctttaatggatatcttcatgtaagcaaagatcttcaaattaccaagtacatgagatgggttttattcaataactttgaggttaacagagaaccaattttagaatctttttctttctttcaggactcagttcagtagactgttttgatttgtaaaaaaaagaaagaaaacagactctcttgaatttgaccaatcaatctccattattctttggtttagaagggccctattctttcaaatccatgaagcccatccctctttaactttatattttggccctgtttatgcttatccaaggaattttctgtttcccttctgtcaatttgtcaatcaatatacggctatcaattttttggtagcgagaaacaatttgatcgaataatatatgaattgtcttgaaagtgtggaaatatgatacatcgaatacattcaaaaaacaacaggtctcagttaaagaaggttgctgttttatagaccaaaatgacattataagctacacacttttgacccaaaaaaagaaaaacaaaagctacactgttccttgataaccaaacaaaaaatgatttaagaaaattatgaaattagcaaaaactttttatatgttttgtcaacaatcatgttaatgtttatacataggaccgaaaataaaataaatgtattgttaatgtagctgtaactatatggtaactatattggaccctattttagaaggtgtatatacatttttatattattactacttttatacaaatacagtaagtagtataatctagtaaactcaaatatgaaaggagaatttcaaagagcttgttggtgaaataaacagactacagttttttttttgtcataaacagactacagtattttattttattttgtcaaacaaacagactacagtatttataatcgaaaaaataggtacattgatactgttaagttactcagcttatatatgtagatacaaaagaaaaccatatgtaacttcaaatttaatagaaaacaattaagaaaaaaactactactgttcttaagtactgtttaaaaatgaaaatagcatttcaaatttggggttcttttatttgttttctttggaacaataattattaaagaaacggtgagtttccttccagccaacattgttacatcctgacacagccactgacattgacagtgatttttatgtttagtttcatcaatacccttaaacttctatacattttcattttgacacctcatgtttatatacttttcaacaaaacccaacactattgatatatatgttcactgaatcactgttcagagttcacaccaacccacttttcaaaatcagtttaagctgacttcattaggatatattatcttgtataaataattaatatctaaacactccaggtaatgtactaagtgtagaatgaaactttatagaagcaaatctaatttgtagaaacaaagtactttgttttttcacggtatgagtaaagtactaaaaaatttagttgttaggaaaaataaaatctaacttattaaagaaatcaagaaaagtactaaaataaacgctttttcgtcctattaatgttataacttaagcaacgtgggtacacttcattagttcattttcactaaatctataacttctttttcttcaatttttgttcttaattaataattaaaatgttaggaactgtaattaaattgtgatagtaaatagattagcttaagggacttcaataagaaatatttttaattaatacagtatgaaatacaaaaaaaaagtacaatcgatatatatatatatatatgaaaaattaagtggaaattcaatgtagtagaatcatgagttaagaatccgtaccacgggatctaacaatgttaaaaagcacccaccttgttttgaaatatcttccaaacttgagggagacaaaaaaaaaaaaaaaacaagtaaaaacatttgtcttaaaaaaaagaagaaaaaaagaagaagaagataataataaataaaaaagaacagaacagaagctgctcttttgtccaaagcttcttcctttctctttctccaacatttcttctctgcaagttaaaaacttactaaaataaaaaattcaataaacccttgaagacaaaattagcttttttgttttttttttattttaattcttttttggttatttttttttatgattttgttttttgttttcctcgtaaaacccatgagtgacccctttggttcctctttgctttaatcttcaagaaagaaagaaaaaaatgccttcttttgcttttggatctcatcaccatttggcgaatcctacagactcgccgccgtactccgtcgaaattagcatcgacggtgactcctccgactgggattctttgtctcaggtcgatttagagtccggcggtgtaccggcgccggagaaacagctacattccggtggtaagaagaggagaactaggaggagaaagaggaggaagaagaagaagaagaagaaaggtggaagagattgcaggatctgtcatcttcctttagagactaacaaagaagctgaagatgaagatgaagaagaagaagatgattctgatgatgatgaagatgaagaagatgaagaagaagaagaagaagaagaagaagaagaatattatggtttgcctttgcaattaggttgctcttgtaaaggtgatttgggtgttgctcatagtaagtgtgctgagacttggtttaagatcaaaggaaacatgtaagtttctcttcaagactacttttgttttttttctgcaaaattctacagattctgtgagaaccaaagtagtaaagaatgaaactttataaggaaaaaatgtatttcctttttatgtactttgagtcttttttcttgtctgaattctagagatccatatcattacttcttagaaagattgtctgctgaagctggaatctacagtttttgttttgtggccatcaattgttgtctacttgtgtctcatgttcttatgttcctgcacatttttggatatttattgtttgtagtctcaattaaagccagtttctgtgatttgcctcaaaacattcagtttcaaaggcttgattttgcagctgcattgagagaatcttgcagtcccttttgctgagaaagtttgatttttaccaatcaagattgtactcatagctctgtttagcttctgtttctgtgtctttgcattttcctagcttcttatatgtttacaagatgaagcaagtcccctaagatttttactgactagcatttatcatattgttgtatgaatctgagcaggacatgtgagatatgcggcgcaatggctctaaacgtggctggtgaacaatctaatccggagagcactgcttctacacattcacaagcagctgcgggacaatctctaactcagacagagccacgaggaatctggcatggtcgccctgttatgaacttcttacttgctgctatggtcttcgccttcgttgtttcttggctttttcacttcaaagtcctcaagtgaaacgttttccatctctctctctctctctctctctctttcgcccacccgcacgagctcactcttctcctgttcttgagccgcttgcaatcgctgaatcaatccctcctgttgcttgattattcacacgttttgtagctgtaaaaacttggtagtgtttagattgttgtaacttgtgagatttacattttgtataatattgttctctgctccggcttcgtgaaatctctgtgtggtcaggagggtcttagctcttttggtttcagacacatggctttgaaaactggtaatagataaaatactggacaatagttgtgtagaatctgtttttgtacttcaaatgaagaaaattagtttgaacaaatctcatataaggatcttggacttaaatgagaaagatccttcttttcttgattcaaatgtgatttgaatcatctcttcaaattggaaaccacaaatttaagataatgcttaaagaagacagagacaatgaggctttctcagaatccaatcacaaaacgaagaaggcggaagagagaagaaacctatacacttgaagttttcagtttctgttgttatgtttcttggcttccaaggaagttccatcttttagggtttcacaggcgtctttatccattccaaggctgaagagagcagcggcctgaagatagaaagccgttggccattcaggagacactacttgcgcctgcattgcatcaccaagagcctcttgaggcatattgctcatcagataacacaaacacctccttgcaaaaactgttggcgataccattgtgccatcttcgatgaactgcagatacaataagacggattgagtcgagttccaggggaattatgtttctgggtttcaagaaagtaacccactttctgtttcttacctgcgtgtaacattcaacagcagtgacaaagtctttgcctttgaacgcagcatctccttgtttcttggagtttagagtctcctgaatctggtcggtccacacttggaacgagagctgtgttgcaaataaaacaggaacctcaggtaagactaaagaagctctagacttgaaggtcattgacctcatagaagatgaagaagcttcttgttcatgtacatacctcatttgctacaccctcgtcatctttgtatccaaccttttcgagaatttcatgtattgctgtgagatcatgtcgtgaacaagcgtcaccaagaggggtaagcgaagttgtttcctttggagaagcagctccatgtggaatccccattaaaacatgagacggaatctgaagaaaacaacagagatgtagaataagacgaggagctagaatacttgaatggttgatacatgaaaggaaggtgatttagtgagtgcatacatcagtttctttctgaagaggagcgagtgaggacacgagagatttcacatttggcctttcacgagcttcatactgcaaacaacgggaagctaaacgaaccaaatcggttccatcatcgtttgagaaatggccatctagacacgagtccatcagcatcaggaaattcttcccacgaatcagatcaagcgcctgcagaacaatggtagagcatacagaactttatcaacattttctgggataaggagaagaagctaaaagatcaagaacttcctcccaagagaagttgagccatgtttggtgcacttacatggcttggtggtatgtgtttgccgctgagaagatctagcaacagcgttccgaagctgtagaccacactctccggaatcactctcccttaagagattaataaacgcacatccatatatcagatcaatatcataactttgtcaaacagcaaacacataacttgacgccattgcatctcaaatcagtaactgacctgttcttaggtattcaggaggtgtgaaagccaaatttgtactgtaactcttcccatccctactattcttcataagaccaaagcaagataatctcgggttaccatcctgtaatcaagttttccagaaaaacattataagaatcccagaacagtaacttatacgaaaagtgaaacataaatccaatcaagagcaagaaagagataagagagttaatagtaagctcgagatggacctggtcaaacaagatcctgtaagcattaagatcgtggtacaaggcgcgacctttgctgctacaatactcaagtgcttgtgcaagatacaaagccactctcaacctcatagaccacttcattggctgactatcccctacatatcatcacaaattattaagttccaccaatcatttgcatttaaagtgttaatcttttgttcaacaagatagaaccaaaaacagaaattaccaacaaaatctcctaaacaatgtgttagaactaaaaactaaaaggcgtagagaatcaaaccaaaaaagtaaacagttgccaatctcttaaagatgatgagaagccttacagtgaaagagatgcttcgagagagtttcaaaaggcataaactcagcaacgagcaatctctcgtctccttcacaacagaatccaatcaaattcgccaacctctcattcctcaactgccccacagcttttgcttcttcctaaagatcaatcaaaccaaacagtaaacaccaccaaatgcaacaggggttttaaattgaactgtacgagaacccatcaacggaaatgagtaaaggaatcaaatttatgagagttcgtacaagaaattgacgagtatcaggccaagcggatctattgaatcgtttaacagcgatccatcggtcatcttcaagtctgcctttatacacaacattaggagctttaacaccatgttcggagacaatactgtctgtagagaatccacaagtagcagctcgtagttggtcgaaactaaactccgtaaacgacggcaaatcgtccgttccgttatctatcagaacaaaaaacaaaaaactcaaactttgttagcagagagagtgtgaaaggtagagactttaagtgaagaagaagttgttatcacctagatcagaagcttcgttgtgagttgatttgagatgggtcggccaccaacagagagagagcttagagcaacgaggtcccattttggggttttgaaagatttaaggaagattgaaagatttttcttagctaaacccgaaaagcaaaaacccttttttttttctggtgagtcactttctaaagagaagccaagagagaaagagaaaaaaaaagaagttttttttgttctcgaggagaaaggaatctgcggaaaaaaatgaaaggagaaaaatttatatatagcgcacgtagtggggaagacacagacacagtcacagtggtgaatcattgaaaaacgttaaacttctttcttcaacaataataagtgtttttacttgttgtggatccaatgtttctctttctctctcgctttttcactttgtttttttttttcattaaatatctaacgtttatacattctgataacgttaaaacagtatttttgttcaattagtagtacattcaaatctcactttccaaatgaccaaaactatatagataataattacaaaattaatatgtatattttaacaatatttttttcttatttacgatggacacttctaacttctgtagtatttagaagaacaataaaccatacaattatgtacgatatcatatccgcaatcggttaagaaaacattttggaaagcttgcaaaatcagttgtatgaaaattttaagaatgttttagaatggtgtaggaatgtttataatttttattttttaattggtctttttgaaagataacagaaaaatagtgttttagagtaactttaaaataacaccaaatagacaaccttgactaactctgaaacatccggttaagatatgaaaggtaaaaataaaataataatgcgaaattactacattaggggtaaaatcgtaaactgagtggtcaaagggtcaaagctatgtgtgcatgcgtgtgggtgtgaatattaaaaacaaagtggcagtggtagtaatagtttaggagaagttgcatttagtgttctctccatttaatctaatctagtttttctttgttaaagcatatctaatctagtttttcttcacatatttaactcatattgccaaaagattttgcctaaactacagatattattcaacaaagcgataactttgatttgataaaagactgttatacagtttcacttttttatgtactttatattatatgagcatttgaagttttgaacccataagcgaagaactttccagctaaaatgacgcagaccggtgacccaatatagcgaaagaggtccatgaagcattttatatgcgagtcaaaagcttttgcggagtatcatatacgtattacaccgcaaagctcataaagttaaaatctttacgaagctttctctatgatatatcgaaccaacttttgatttgtttaaataattatttatttataagaacagttattaatgttggttggtggagacaaagaggatcttggtgataaatatggtaaagaaagtagtaatagaagatgacttcacgcgtgtgccaaggagaagtttgttgtcctttgggggacacattttagcctaatttaagatgctcttaagtgaccaagccaggaccactacaactgtaaataatggaagatagtaatcatattcttctagacaatggagcgttattttgaaggttgcatgtttttaaaactcccttcgactcttggctcaagaaaatgttcatgccaataacgaaattttggcaaccgatattaaatatacgcaataaaactaatagttagcaatcataagctt

SEQ ID NO: 927 - DNA, 35896 bp, Arabidopsis thaliana
tgaaacaaaatctttcaataagcaaattgctctatatcttttatttcttatgatggaaagatgaatccttagtttttacatatttagaaggtacttactagaagttgagtagtgctccggttatttcaaaaaacattactcaacctataaggccatctccaagggaactgcaaaactttaaaatagcgtgggaatgttaactttttctctccaaccaaactgtataatttacactattatagtgtgattccttttttttcaacagtatatcactatatttggtgtgtcactgtagacaacggcaaaagatagaatattattattttttatttttgtataattatatattaaaaagcctatatagttacagtagattaaaaaaattttatattgttatttaataatctaaataagttttgtaatgaaaattaatgtagcaaaactattttggtatttttgaattttaattgtatgaattattaattactcggcttttctgaaattaatacacactttggttggaaatacataatagaattcaattagccatttattatttgtaagtttatattaattaatgaattaaaaaactattaaataataaagacagattttagttacataatataataatagagaataataattttagtgtaatatttagtgttatggttagagaagaaaaaaaaattagtgttaaagttgcactaaatatagtgatatttcaacacaaaaatagtgttatggttggagatgccctaagacgcgataattgctatgagttttggaatttcaaaagtcaatgttgtacatcgaatttggtggatttagagactacatagagttatgtttttttcgtaaatcttatacagatacctgtgttttagagggtttgtgacaaaagaccaactacaagatacttttttacacacgcaaaaagggtatttgacagaaaagaaaccgaatagtgtatatgatattttataattacacctcacctttaagggcttttaccaaaaaaaatgtttgtaaattagataaatggatagtattggtccacccaatgtcgagttttaagagaacacattacttgttcttaaccacattcaaactatctgctttgcaacgaacacatgcagccacgtagaaatggattataatgtgattacaataattcagtagtcttgtttacaccaaaaaacaaaaattaatgagagaatgtgaaaggtgttttataagaacatacatatgcaatcctaccaaaaaaaaaagaagaacatacatatgcaaatacatgtaataacggagtttgaaggatttctatgtaaaaagtcatctaaatagatgttcgtattacattggccaagtgaagaactttttttttttttggtaagactggccaagtgaataactaattgttggaacttggaaccatcattttaacaaatattgataattcatactgtattattgcaaaaaaaattattggtaatataaacaaattgctctaaaacagacatttatgttgcattacatgttttttttttattttgcattacatgttaacaaatgcaagagatcattttcagaaaacataatcatttaaacaaagacaatatcgtttggtgaaatcttggataatcttcttaataatgtgattcgatatttacatatattttagcatatggcaaaattggatattgatgggtctaccatgttgcttgttgtgagttcaaagtgcataaagctataaaatccactctgttcctcactgtctctgtgaccgaaaaaacaacaacttcacgtgaacgattgcaacattttttattgttttcttataccttagaatctttttgactttacaagactaaattttaagaagatggaactaatcaaatctcaaattttatgcaagactaagacttatctacaatttacatggaatgtttttttcaaaaaacaaactttgtgtgatcagctgggccaggttcaaaaacactgttcctgtgaatccaattcatcatgacaaatgatcacatggcaacataaaaaaaagcccctttaatttttccgagtcaggctttcaagtttcagaaaccaaagatcttcacagcttgaaagtagtagactaacattatatatggagagataagctataaaaaaatattcacacttaagagttgggaagatcattagactaactactttaaagagatcttctagctgctttcttatttcctgcaactgttttatcttaggcttaacactaatattatgatcacatacctgcaagtaaaaaatttgggtttgaagtaaaaatacaaacttcagacccgcccaacaggcgagaaccgcggttgatacccgacggtgttgccattagggtttgaatcttggtccgggagtaacacggtttttcccctaactttatgttcatcacaagagcttttctgctcaaggatgttctctgacattttcctactctctgcaagtgccatgcatatagagaacgcttgtagttgtgaaagggatgaattatatgcaactgaatatatcccttctttgatcggtttaaagctcaagaacggatgctcctccgcttgttctccctggaaaaacgtagaaatgtgatgatgaaaccttttggttttgatttggcagagagcaaaaaaaaggacatttgatttaggactaagtatagaatctgcaccagaaagaagagttcgaatctgtttgaagagggtggtgagtttgatgttgccgacttcttgtaggagaggttgtgctgatttgtaagaattctgagattacagcccatgtcccaacctccacaatcgcaagatccacctgttctccatcgctgtatcaaagacgatggccctcctttctgaggcatactatgaacaccgctttgaagtatgaccgtagcactaatgtcttggtcaaaaaacttgtctttgatgtgatcttcaagctctccactagttgcattgtgatcctgaaccgtgtttagtggagcccttctgtgaaacaatcttggcatcttcacgatgatcgcagctagctcgtttttcaactgcagatcagacttttccgtgctctctcgatcaagttctacagagaagagaacaaactctctgatggaaccagatggcaaagagctcgagacccgcatctgagcaacaacattagagatgagaccatgtgtttggccgctgcctctttggtttaaccacccactgtttctcttatggtctttaatagagaagaaagtataaacactagtacattcaccctcttccgagcttcccattttcttttgggtggccgcaataatgtctgtttctttgttcactgcaaatgtaaagagtggctgattgttcttaactgtaacccgcagaacagctcgaaccatggatgatcctagcttctttccatgagctgaatcattgacatttactgatttgcaacctgtgatacccaatttaagtcgttgaaggccttgacctttcggcccctccacagaattgccagagttagctgctcttggcttcaatagaggctctagcaaccttcttaaatggcttgtcgtggttgtatcttttttactgggtttgttgcaatttgagccgtcaacatcagataatagagccacattttgtgaatctatctttgtggagttagtcattgagtctagctgggttgtgggaacagtacctccttcactgttagttttgcttgccttacccatattgaagctaagccgctgaaaaggagatatacttctccccttttcagatgtcactttatgcgtctttgaatcttgtctctggcaaggctcatacatacaatgtttcacagataacaaagatgatgctctgtcttctgagattttacctttggaagatttattccttgcttttgttaagagtgacacgcactgagatagttcaactgaaacctttttctggtcagcatcagtggagccaagtttactctctgccaagcagccatcagcattacatggcaagggacaagaatgttgagtacagtaatctccttcaacaccgtgaacaacccggacttttctatttgaactcctcttgcaggtcttagcctccccatgctgctttcgaccaagttctccatcatgttcatttcggtttctttcgtgcaagttcttttcactcttcctatgtctgctaacatcagcctttgactttacctccatgttcaagccagcctcaggattcaatccatgtgacaaagttccatttttagagcaaatcttccctttcagatccttctcctcacacacatctaatccttgtgcattagtacttggaccaaactgctcttctggtacgctgaaacatctacgatctttgtgtttctttctccgagtacatttgatttcttcacactcctttacaacagaatttggcatcacactggactgccgtgagctacgatgtttcaatcgacgatccgaactacggttctgcactttacttggaccagcagatgatgactcgcctctaggcggaggagccaacaaagcatctgcttgggaaaccatagggaatctactcttcattgaaaccctgttatgactatgctgccacttctccaaacggccccaatcaagaacaccaacactcaagagcttttcctgaggtgtagtttcagctctctccaagaaaaccggtaacttggacatatacttaacaagctcatgactctcgagacgttgtttcacaggagtttccatagattgtagtagtagctagtcacagaaccaatggattcacatcaatctaacttatatgacttcctggattctgaaaaattgaagaaacaccaaaatcaatcacatcaaaaagtgtattgaaagcactttctgaaaagttcttttctacaatgatcacggtatcaaagagaagaaagaatacaaaaaaaaacaaaaaaagtggtcctcaaggacgcagaaagaaatgcaggaagaagaagataataatgattgatatcaaaacatctttcgataatgctaaaaatacatatcatggacccgaagaaacagctgaatgatgcgtccgtgcatttatgaacaagtatcacaaacaataagaaacgacaaaaacaaatttcagatttgattcaaaacttttgacggatccaagaaaaaaaggagaaatcaaaaatttcggaaattaaccaaaatcgtaagctcggagaagaaagagacgacggtatatacataaatcgctaagaatttgttcttaaaatcaacgaagcaaaaatgatcaagctccgatttgaatcgaattcgaaacataaaatttaatctaggtttagttagattgtacatatataagcaaaacgaaagcgtgataaaacctagaagaacggcattgaagtggtttatcagcttaacgaaacggcaatgtttcaaccaaacccaaagcgaagaaactttcccgagaatcgtgggaaaagaaaagagtaaaattacctcaaacagcgaagagaaaatgcagaaccgacacaaccactcggcgacggagaagacgaagatacagagagtgagaaacagagattcaaaaatactaaggagagtgaatcagcaaaagtgaagatccaaaaaaaaaaaacagagaagtgatcgattcacataaaagctacagagagagagattgtgaccctgggagagaagatgatcggacggtggagaatgaaggaaagggttaaatcatgcggttgagattatcgaggaaggggcgcgggaatggtttatgtcagggtggtccccacatgtatatattcacatgtttacgtgtgctcattagcataagatttccaccataaactgacaaaattatactccaaaaacaatttaattccactttttccttaaaaagattagcatttattagatatacagtataatgtcaacacaatgtgaatgatttaatcacatgattaacatcacagaaaataaatcacatgttttgctttgttttacggcctttactgtagacctttgacaaaaaaaaatgtttattttagataactacaatgatttgaatatattacaaatatcacaaattatatcgagacgatttctaaaataaaaatatatttacatactgtcagtggttcttacgattatttcacgacttgactactagctatagaaaaatagttctgatgtatgaaatttataacaatatataatgtacagtatattctctggttctagatgtatcttatatatacgagagctgcaccaaaaataaatgcaatcgtgtggtcaattttaatttaccctaatgtagtttggtaagaaaactatatgatatgtttgtgtgtatagattaatagtataaagtttgtatgttggtgggtcgatcgtggggttgatttcatagattattatgggtccactgacgcagctcaagatcagagactgtagtttccaagaaagcttataatgatcaaattttgtaatgtgcaagtagcttgtagtattaatttggatataaaaatctactgtatctaaccacaatacgtgatatatctattgttaattacttacttatagtagcaatggagttggctataattatatagcacggagtctcacaaatacatggagtctttaatgtcactatcttttgttctctacgaaaactggtttatgtctcacaagaattaatagtaaaatgtctattactagttgttgcttttaaaatcaaattattcgattcagtcagtcatatttggatagacataagctattttctcggtgaagtttgaaatttgggaacaaagattaaatatttgtagttggcagctcataacaatatacatgagtattggtactaagagatcattatacattgtcactgatgagtgatgatggaagattgaaatgcagctagctacttttcgaataagatgaaatcaccattcctagggacaccataaaagaaagaagaaagtcctttatgtggatattcatcataagcaaaacaaagcaactaacaaaagatgaatttaaaagtaagatcgaaatatataataaattaaaaacacaaaagaggaatcactttttcttttagttgcaaagtgataactactattttcccatccaccgacgaggaattacttcattagtttggttttataggatgaattatttcttacagagtcgtctaaattagacgctaaatcaaatgatgaatttcattagaacactaaattaagctaagaaaggcatgtcacgtgtgagcacgattacttttttctttttctttttctgtgttaatgtatgcacgagtattagttacctaacatttcaatagatatttcaatttttagatatgtatgtaaataacaattttgtgcactattttttttcttccactcaacatttaaagtgagatggggtttaaactttaaagcgcaatgaaaaggaaaagataccatatcttaaatgttcaaaaggtcacttaagcttgtcgcagaaagtccatttggcaaatttaataaatatcactatccgatttttctaatgtactatttgaataattaaaaactaatcagaaattactattttaatgtacgcacggtgttcatagttgcttgtcttagacaggcttagccactcccagtcacgacgactttacttaagataacaaagcaaagatatatatgctatatgttttcgtctacaacgtaactcacatataaatatactaaaaatttaaattcaaatggttatataacagcaatattaacaaaaaatagaaactactagactgtaatatatatgtaaaataaatacatatacatattttatatatattaaggaataattatccaagaacaatacgattatacaaatcaaacaaaaaattatgaagatataacatatatacgttttgaaaatatgaaaaaaaaaaaaaactgaagtgaccagctctaggatgggctttaaaatttctctaaaaataattagggctcacaggatggctaaaagcccaagaacagaactgactttggatctctttgccaaaaaccaccaatatcttgtatgtattaaagacaacatgcaatggatggatcatgataaattgtggtaccaaagcattcttggcgttgagccgttgacacaaaatgaagaagacgctcccaactaagatatgatcatatatattttattttgtcttaaagacagaatgtgctgcagtctgctttatgcaaaaggtcccagctaaacaaagaaatttgagcctttctgaaatgaagaggcccatgatgaattaggagaagaaggcccacttagaaacttgttgcagagtacgttaaaagttaaaacatacgagaaaaatagctttagagtttgatgataggtttacaaaaaaaaagaaaagaaaaaaaagagagtttgatgataattgtcttcttcatcttttctttttctggttttcatcatctttctctactcttcttcttgtaacttgattttaaattaattagtgaactacatctaactattataaatttaaaaaccctttaaccaaatacacccaaaaaaaaaacgaaactatatgggtcatagtgtcagcgaggtcacgagactatagtgagaaaataatagtaagaatttttattttatttttttgtgtcatcaaacgccatttgtaaactatatatacatatattgaatttgggtgtattcgataggaagactatatacctttgcttcttctatacatttttaatgaacttttgtaaacacatctctaactacaaagttgagataagaaaattatatatgaaattctgagagaaaaaaaaaacaaattggagcccaaaagtagtaaattgtatactcagctttcaccattagccagcagaataaaacaaaagcaaaaaaaattaagcaaacgatagaaaatatcaaatattcctcctcctcacattcacacacacatgaacctcaagaacaatccataaaataaccaagaaaactacaaaccctagatctttaatttgaatcacaagcatggatcaatccatacatatatataaagcattgatattatcatcaacaagcacaacctgagggaggaacatagttagttttccggtcatcggaggtattccggaaagtttggcttccgaacaacatgaaaccaacggcatgaccggccagagcgacgagaaacacaccggcgttaaacgacatgacggcgagcatgactagataggcgaggccgatacggagggtatacacggcggtttggattaacccggcggcacgattagccgaatctccggtggagccacggaggagagaggaatgagcaagccattcggtgaggacggcgagaaagaagacaaagataagacaaagagcatacatgccggagcttgttccgggccaaccggagaagagaacctccgtgttcttgccccaaaagaaggtcatgtgcatcatcatcttcatgtggtgatgtcctcctccttcgttcatggatccattgttcatcatggatgatggtgatgatgatgatgatgatgatggtcgaggcattccatgcatgtgatcatgatccatggtttctttgttcttggctcttgtgttttggttgggaggagaggaaaattgcaagaaattggttgcttggtatttaatggcatttatttgagattcttatttaaaatgaaatttcggtttctgtggagataagagtatcgatgttaacgtagtacagtacaacttgttttttgacttgtcaaaccttctgtcgtactcgtacataaaaggtaatatttagaaagtaaaaagagagaattatgtccacttaatatctaaattttagttagtaatttttgttcaaaatcccttaattaattactatattaagttcttagtttacactttacactctttttcatcggcttcttgatttacaatcagctactccattcatggaattctctaaatcaattttggtttgtataggattgagaatcaataaatgttaaaattttacacatgcgattcacgttgattttattatcatttcatttacaagtttaatgtatgtttttggttatttttttcatgaataaattaagattttgaatgaagacagcaaatcgggtaatgtaggacacataaaattgaataaggcgatacagtttaagtattatatgtgcaagaaaacacagtcagaacaaatgcggttagtgttgaattagagatcaagaataatgcttgaatggtgagaaaataatgagatatgagtataatattttatcaaattttaaaaaatgtttttaacatatcaattttttttgttttggatataaatggtttagttaagttgttgtttttttaaaatgtatttctgaaataaaacgcaccaaaagacacctcattttatgcttcttctttgtaaggtgcatttcttattttctcttcattgcgatttgcgaagatccgcatgtgattcatttattattaaaacataatgttgatgtgttattataaggttggtttgttgaatgataacattaataatgaaccgctaaaatacggccttttacatgttcttcattcaaggcttagtttacaaaaagttttataatatttatcgattggactattgtttccgtgttgaaaaatctaacggctacatagtagttttatttgtcatatcaaatactgaagcatgtcaatatgtcatcactgtccataattcttgtttcttggattttcttaataaattatttgtttcctttcacaaacagtattgtttcatagacaaattgtatgttctgtcagttagcatgaaaaattgtatgttagtctacaaaataaatctaatagattcaaacattatagtttactaaaaaaaaagataaagaaaaacataggagctttgccaattattgaagcagagatatctgattgattgattagtttaaaacttaactacgattgaataaaggaacaacacaaaagatatcgatgacgaccagataccacaagaaaagaaaagatcaagaaagaaagaagaagatatttgatgtgaggtcataaaagagacgtattattatatggactttccaaaaatacatcgtaaacattacgttgacgaaactcattcaggcgaacgattacgtctgacaccgttcgagggtttattggcatttatttactttatccatgataaaatctaaattgagtaaattgaattttggcctgtgaggttaataatgattaagaaggtaattgtatgttgttgttttttttttactatggaacggataacaaaaaaaatattgggcttgtttaaagaaattgtcaatgactctggattctttttttctcagtccatggcataaaaataccagtgttattaaaaaaattgagcccataacaaagctgtgttttttttgaacacgcccataacaaaactttctaattaccattttacgaccatattaataacaaatattaggatttttttttttaatttgcttttaacagtcaagctagaaaccagacgaaatcacagtctttagtcaaaaacaatataaaaaaaaagattctagattttttcagctttggataatttactttttcaattttaagacttaaaaggaacagatctttggacataatctcaacaaaatatctttgaagtacacttttaaactctaataaaatcacaattatcgcattattgttgtaaaaatgtacattgtactacacaccaaactccaacccaaaaacaaaacccttataaatacacacacacaagtatacacaacaacaaaatcttcacattgcacgtaaaaaatatctttatacaatgaacggcatgagtggatcttctccggcggctccggctccttcaccatcatcgttcttccaacatcgccaccgtcacggtggtatgatgcatatgactttcttttggggaaaaaccacggaggttctattcgacggatggccagggaccagtctgaaaatgtattgggtctgtctcgccgtcatttttgttatttccgctttctccgagtgtctatcgcggtgcggtttcatgaaatccggtccggctagcttgggaggcgggctattacagactgcggtttacaccgtgagggctgctttgtcttatttggtcatgctggctgtgatgtcgttcaatggaggagtcttcgtggctgcgatggctggttttggattagggtttatgatttttggaagtagggcttttagggccactagcagtaacagtcacaccgaggttcaatcacattgttgatttttgtcttagatcgtttttattttccttgtttcccgttgaaataatgattaggaaaataaaaaaattcacgtttttggattttagattgagtaagaatgtaagattggaagttctttaacctcattttattttattttgttttgatctctaatatataattgtgttggtcaaatttctaagaattgtataatagaattttttttttttgaatatacaactttccttcgaacggtagtatatacggtatagttaaaaatcatagcttagagaaatttgttcttttgaaactagtggttgaatatatttgtattgctaacaagagatttgaacaaggtaatgacatcgtaaatgaaaaaatgtataacttcctatcgcccatctcgtaatagtttgttatgaaattcccaagaactttcaaacgtttcataaatcaaggcttcctaaaacaataacgaccaatctaaatgttcgttccgatctaaattctctcttattgataactaaacgtatattttcgttccaaaacggacgtatttatagataacttctctcattagttagggatcacaaacatcacataatcgaaatatctcatattgaaaaaactaaagaggaaagaagatgaggcttttgtgtagaaccaaaaggaaaaggaagaaaaaaaatgttagattcgtggatctcgaagtcatacggctcatacccatacataaattgttttttgtactccatactcttaaaaatgtattccataccgtttccacattcatttacccacattcaaaacgtttagttgctgtccaactttacgatataaaacgtggagttccaacgactttcaaatgtttgcgtgtaaaacatcatataagaccttttataacaatcttacaagctaatttaccaaataatattaatataataataatcttacaaggttgcgttgttacagaaattggaatttttcgcagcaaattgatgccttatatctttttaatcgtcaagtttcctcagaaattacgaaatcagatttgcttttttgaattcagaagctggtttagcttacgtccttacctcaaaaactttcaaaatttaaccggtattgattatatatatatatgaatcaacattacattgttcttaactatctttgagtatacataatgttttaacaagagaaggaaatgcacatagggaaaattttgattttaagtgagtgtctctaaccttaattatgatgacatgcttaagatgtagtatacaatatacttttttttgtcgactacaggcaatgatatttatacatacaataagattataaagccatgactcaaataacaattggttccattaggtagaccgatattttatagtttcatcatactctagttcatacatgcagaaaaaaaaattatttgcacaattttattaattattatgacactgtagcatgaagatacgtgttgaaacaaaaccccataattcgtcggtgtaagtaatatgaaaagagaaaaaaagaacaaaaataaagagaaagggaagtcacatgaggagagtggagcaatgtacaccaccgtcaatggctctcaactaataccagtaatgacaaaacgtgagtgcacatgaaccttataaagtgagagtacgaagaataagtcaaaaacattgtcgcactgtacgagaagaagtcggcggatttatgaccacccacgaggccacgagcttatcatatatttttcacatttacattcatctaaacgccgttctaacaaaatatttaaatttaaaatggtttttttttttccttttattcacaaaactgtaattgtacttagttctttccgatttaatcgctacaaataaaatattttctaacatatacatcaatataccaaactaatagttattcttaaaaccatgactataaaactctgtacgcgtaatttggaaacaagagcataggaagtagatagacgtaacaatcaaataaaggctttttattacactggcgagatgcataatgcttttattacaaggaatcttacataaaaacaaccaaccccttattacatacaataggcatgggatatatgaacattttattgttcttttatcacaggaattattgattttatcacaataataaaagaaaaaatcaccaaattttaaaatctatgtatttccaattaaaaaataatggtttttgaaagcattttatttttattttgacccactagaagatattcaatccgaaaagtccctaccttttgaaaacctataactgcagcaaccaggagcatgtgccaatgttttatcagtacgtccattcctgtggcaaatccgccggtggttcttggtggctctctgccgacatctccatttcgtacggtgatccactttgtacccgagataatgaagtatttttgttacttttgatctttttgttgttcatggacaccaacaatgcatctatatagtaaagcatttcaagcatcatatatcgaaatacattcaatcttactctgtaataatacttaaacctctataaacccaatttttttaactcctaactcttaaaacttatttgttaactcatccaaacaaaattgtattattcctttaatcgtttttcaaatagttagcctattttttaaattaaattttcttcattttttttgtttgtcaatcatcccttatttatctaattcttgtaaatcataactttactttaaagaataagaaacacaagaaattaaattaggaaagagataggtggggttggtaccatgaaaaggagggatatcagaagagaatgtagaaggaacacccaatttgtcaaagtgaactttcaaggcttcaactactcttgctggtattattactgttgaacatcctgcaaccaatttatttccatacacaaaagtcaaaaccaaaaccaaaactacatctaaccaaacttaaaccggttaggcaatttcagagtaacaactcataaaactgtttggttgaaacatcagtttcatcgaacgacaacaaatctgaatacaaacagtacaataaatagtaaattgtcaccaccaccaccacccaccaatatccaagccacgtcaaaacatatgatgataaaacaagaatgatttctaaaaaaaatggtggttgatatttagtagacaaactcaccgactcctagattgggtaacggttaagacttgaaaatgaaattgtcagaaaatctttaatcttgagagttgttaagtataatcctttgtgttgaaagaacatcatcaacaaacctggtaagtgctacatgtgggtgtgagaattttaagtttctatctaatacgggactcgaatataatactatatttagaaagaaacaaagttaacactatgtggtttggtttatagccttgggtaattgtcaatgatcgaacggtaacaaataaagaatcacaaaatgaataaatatctaggttatctaagattataatccacctattgaatgaaactagtggggtcttataagaaaataaatgatttagattgatttttgaacctaaatagtttatttttgttgatagtgaaagggagacaaatggggaccaactagttgagggaagattctaatttaggagggtgtatctgtcaaaccaatagccacacaatagattaattggtgacaaggaatctttggaatcttactcagtcaaacaaagtaataatgtacgcaagattcttactataatataatttttgtcctaaataattgagttttgagcttttactcaatcagctaaacttaacccaacctgaccttaacccaactaataaccattcacattattttatgtcacaactctttaagattcttctaacacttaagtgtcagttaaatcgaaaaaaacaaaaacagatttgactaaagattatcacaacagaaagaatggaatctgtgcaaaatcaaaaattcgattccaacactatgctaatgtatggcaaggtaatgaaatcttatccttctcgtagaccccataaagatttaccaacactaatttaaacataatcttatgtcgattgtcgaactacttatcgaaaacaaactctaattctaacatattcagtggtttaattgttatcttaaagaaacaattatgaaattatctaggaaatatcttaatactatacaagattcgaactttgtcaacccccaaaaaaaacaaagtggaatctcaaagtattttgattaaatgttagatgacgtcatcctatttttatttaaaatgttttgtcctttatcatacgtaaccttcatgaaaaccactagattattttttttggaaaacccaaaaacaaaaattgataacggaatgaagagaaaaagtgtaatgatgataaactaatttgcataactactataggctctaacctgatttcttgcgtgactccacaacggtaccatgaccacgcggtaagaacactccggtaccacccgacccggttcttgaacccgacccgtcaacaaacaccgccttaacgcctgacctaggtctctggttctggtggaggtggtggtagtttcttgctttgtgccccaaaacgtcagcgttgcgttgcctctctttctctttctcctttttaatcttctggaactgtttagaaaaatcaattcttaaaataataaaacaacggtggaaacaaaccctagattaaatctgaaccgttgataatataaccgacggaattttttaaaaagaagattctgagtaaaataataaatgagaaaacatgatgagctcacgtttgcttgaatggatcggatctggtcatcgattagagcttgttttgattgaaaagggatcgttactggttttgtatcaatctttgtcatgattttctccaccggtaccgttgccggagttagtggcggcgatggttcacgggaagggcctattggactgcttaatcctgaagcaaatggtgaccagagagtcgattgcggcgagccagagccactaccacaagactgaatcaaaaaagaataaagattgataagaattttagattgagagaaaaaaaagagagaatcgaatcttgcaagagagttggtggtaccttttgatgcttttcatcgtcttgaagcatatagttagtcatctggcgagtcaactcggtgatgtactcgtcttcttcgtcttcgttttttgcctttggtgaatccggttcgtcggatacgaagtcgggtcggagagagcttgtggttggagtgaagaaagttggttcagaaaaggaggtaaaaggatttgaaatgaaatctatgtcgtgtagttcagtagattccatttgattgttcttgtctagaagaaaaagataagacagagacagaataaacccaagaaaaacagaacaaatcaagaacagagtgaaacagagcaaatccggaacagagagaaaaacagagcaaatccgaaacagagaaaagagagaagagagagatagagagaagtttgggttagtggtgaagagtttaaagatttataaagaagaagaccgtacagatggacagatttagctgaaggcgttacgacaatatcacctgccaattgttgtgagtttgcgactcacgagagagattaaggattcaggattaaggaaacctatacatatgtttttttctttttttcattattaaaaggtatacatgtataaatatgttatctttccttcttttctttttttccttttatgatgaatgaatgcattttatttatgacaaacctttttttggtgatttttgtttaataaaatctctaaaagcaatgtattcaacaaattgatttttcttctatttatagtttgaataattattagtatttgacaattctagatagtaataatgttattagtcatgacctataaataaacttttttgtaattttaaaatttgtcttctttattttttattttttttcccaaacaaaactatcattatttttccaaacaaacttgccatcaaataaatttttatggtaaacaaatattttatgataaacaaatctgctaaggtaattccgactaatttcacatgtaaacaatttttttcattaaaaaatttctgcaagcccacaacgaagttgaacattcggacagaagcccagaaatccaaatgaccatcgtattccagtgaaagtaaataattgacgaaggaaattttaaaaataaatgtggaatataacttctaatataagtaatgtgttatgtaatgccgtcaaactctggtagctaaaacataaaatatgattcttctactaacttttcattaatgaagatctgctaaccataaccagatcgtgatcaaattaagattccattatataccaaccattacaaatactagtgatacacagtataatatgttggtttatgtgatttatttggttttagtgcggattaagtcaacaaatgcaacttaggatgagtgatttggagacaaaacatatatgtttcttcttttcatgcgatgttttgaagtaacaaatgttagagggaaagattggttcacctattaagatctgaccaaccatgcgtatgcaactatgcataccttttttcttggaataacggtataaatactataaatagtccctaccactaattgcatttcgcattcacattctaatgaggaaaaaattgtattgattagtattttgaatctacaacgtttaagtcgccattaattgtttttattacaagaaagtaggtcttatatccctttatagcaaagcctttatctaacaaccatttaccatatggggggcttttgagtatgggataatcaaacctctaatgttgacattttttatggatgaaatcaagaaactaatctttattagaataagcttttagggatagaaaaatacatgaatttgtaacaaaagagatacgagactctctgcgaagttataaattatgtattatctatctctgttttactttttattttatcttatgtgattgctaatcaaaaatgtcgttgtagtatagtggtaagtattcccgcctgtcacgcgggtgacccgggttcgatccccggcaacggcgtctattttttttctttcttttttggtgtaaatgttaaattttatactattttcttttttcatgttgcatacaatttattaatcaacctagtggaaggataaaacgataaacagaaattaaacaaaaggaatacaaccaaagtaaactgcaagtaaaaaaggagcggaggaagaaggagcagggaacgaaagcaggcgatcacggagagagcgatcaatagacttgcggatgacaggtatcgagcaagaagccacagagaagatgcgcgagttgcgttccttccaaatagcagagattgacgcctgaaggatgagcttagtgatagtagcgttaggcggccgaggttgagaggcaatgactggtctggactggatccaactcgcaacatcacgaagagagcttggcggatttacgaagaacttactagcaaaagaagaccaaaccgccatggagaagctgcattcaaagaatagatggtcacggcgtctatttttagtattgttttccctttcaactatgatcgtcgtcgttttaaataaccctacaacatcaatcgtcttgacgtttttcttcgcttgagacggcacgcagtctatatctctcgaattgtaaatcaatagttattttctcttaaaccctaatttaattttatagataaatcgagtttagttaaataaatttaaaaaaacgatttgagtctctctctcaagtcaaccaccagcgccgtcatatttctcggcagcgacatcacggaggcgcgtgactatactacgataattcaatagagagcatgtgcatgtgacttagagaacacgacaataatcttaaatctaatctaatcaagtctcttggtcaaactttttttcaagattcaatcgaccgatgacaattaattacttcttcttatttctcttaaagatgtaactttttgggtttcaagattcgatctatcacttcccatggctagagaaaacccattgatgagcttctcctttagtttcagatatctctgtcactttgctctactcctctctctcctctcctttgtctcttttctcttcagacacaacacatcactctgttcttgtctttacgatcacaacacctacgttaacacattcgatcatcagcaaaacaatgaaaccatcgatcttcttcgattctcttctgcttggaaccatctcactttcccttctaaacccaagaagactctcaagatcgctgtggtggtcaagaaatggccgaggaaatcgcaagctggtgggctcgagcgacacgcgcttacattgcatctcgctctagccaatcgtggccacgagcttcatgttttcaccgctgcttctccatcgttccctgaatatcaactgaaaaatctgatgttccatctctctgagccaaccgctgctggatatcttgatcaagcttctgtctcgcaacagcttcaggtaaacagaaaattcaaatggttgctgcgattgaccgcgtttgctggttttgacgctgctattttgcgttttctccggttggcgtttaagtgcatctgcggaaaatttgttttaattagtttagtttagattaacttaagaaatggcgaaattctacacatatttaatttagattaacttaagattaaaattatgttggttttattaatatacacactttaatatttttcaacttttttttttgcaacacaaaagttgattttgttaattagtatttataaatcataaattttaaaatgttataattaaatatatcaaattactgttataattattaaaaagtatttattattgaaataatcaaataataataattattaatatatttacaatctttataaaattattattttaggaacagaggaattactaaattttggttaccaaaagttttagtcaaccgctgactaacggctttgactaggcaaaggctcataattagtcaatggtcagtgtctggattttagttgaagaaacggaatttaactaacgcaattttcctccggaaatcgcagacgcagaacgctagtggaagaccgtttgacgtaattcacacagagagcgttgggcttctccacacaagagccaagaatctccgtaacgtggtcgcgtcttggcatggaatcgcttacgaaacttttcactctgacatcatccaagaactccttcgtcaagcagacatcgccgccgccaccgctgctggaaccgaagaagaacagccaccgccttcatcgccagctctgacggagcgagcgaagcgagtcgtcgaggaagtcaaattcttccaacgttacgctcaccacgtggcaactagcgatcactgcggtgacgtactcaagaggatttacatgattccggaggaacgtgtccatatcattctaaacggcgtcgacgagaacgttttcaaaccggacgtttcaaaacgtgagagctttagagagaaatttggcgttagaagcggcaagaacaagaaatctcctctggttttgggaattgcagggaggttagtgagagataaaggtcatcctttgatgttctcagctttgaagcgagtgtttgaagaaaacaaggaggcacgtgaaaacgttgtcgttttggtagctggagatggtccatggggaaacagatataaagacctcgggtctactaatgtgattgttcttggaccgttggatcaagaaaagctagcgggattctacaacgcgatcgatgtgtttgtgaatccgacccttcgagctcaagggctggatcacactctcttggaagccatggtttcaggaaaaccggtcttagctactaggctagcgagtatcactgggtcagtggttgtcggtccacatttgggatatactttctcaccaaatgttgagtctcttaccgaggcgattttgcgggttgttagcgatggaacagaggaattacagaggaaaggcaaggaagcgcgtgaacggtcgttgaggcttttcacggcgactaaaatggctgattcatatgaaaggttttttctttgcatttcggatcagaggttttgtacgttacaagcttaaaacatttgagctataacactaatatagttaaaactaatcaaggacttgattgtttgatttcatcacgtttctgcgtttggtaaaaaaggctaatgatttcatcactttgttggcacgagacagagaaaaacagagtaaatattgttacagttgattataacaagtactagagaaatctatttaagacactactactaggagaattcttcgatattattacttaacctagaaatctcctaataactttttttttctgcataaacttatttatacaaagtcttggttaagtagatattagtacttggcttgagcttcaggtgttcctggagagatttacaaagaaactaaaggaagtggttctttagtaataaagagaaccttgccaccagtttcctcttgaaacatcttgcgggttctgtccattagcgtcgtcttctccgcttcttctacggtcatttttaacctgaaagatgttttttctaatcagtcaagtcctctgtttttggaagtgattagcaaaacattacataagttaagaagactcactggagggtaagtttggttggtggtggatcgagcgtatacgtcttgaccaccgtagtaaagagaagagcttagatgacatggctcaactctgtcttcttgagcatttaaagattctctacgttgagctgtgtaaacaaaaacatcttcgttagacaaaaggatcattcttgattcaagaaaaacagagtgttttgagactaagtgaataaagaagaagaagaaagttgcataaaccaaagtgttttctcactgaccttgtgagccatgtttggagtttgaaccatctcttgcagaaccctgaaagacaaattaagaaatcaaagattaagcctcaagaatcaatcagatcactcaagaacataaaacttcaaaaaagcaaagtattaaaaccttggagggatgagggaacatggtggagaagatgccggaggatgaagatggtggcgaaggatctttggaaccgaagagttcggctgtaaaagaagaagaagtagaagaagatgagccaactcgtcctttaccctccatttagtaacttctaaaaactcacactctaatctgattctctttgattcttcttccgtaagagagttagaatagttctgtaagttgtttgtaatgacaataagatttcaatggggctatatatacatattgctaaaagggatgttatggagatagtggagacatcatcatcatgatcatcatttatcaatgatcatcctcatcatcatccatcaagagaaagaagcttattatgggtatgttctctcttcttgatgctcaaaagactattgcttctttttccatttttcaaaagttctttaattagatttattttattttcattgttagagaaatttagaagcttcgctatcgcttttctttgccattcttattggttagtgtttattcgtttttaacttgtaacgatttatttcagtttttccactatatttgatagtgtaaacctaaagacaaatttggattctttctctattccggatatagacacaaactgtgagattcttcaatgacttcaatgttcaatgtctctgttgtgataacaaaaagagataacttaagaggataagtccggcgccggatctcaggtcgggctaatgatatttcgccacgtgtcattccgaggataagttgccgacctttcttgatcacatagagccaaagtggaaaagagaaccgaagaatgaacttgagcttctttaaatcgcacgcatgcatgttcatgtgatccgttttttggatctaaaatttgttacatttatttttttttaataatattaaaaagtaatatgccaaaatatatatactattatattggttgaaatatactatatgactttatatctctaattaattttgttaggaaaagaacattttatcaaagacgagaagatgaggtccacaaaattctcccacttgctgaattctattcgttttcttcttctttatcgcttcaaggatcacaaatcaatcattcattttttttttagaaaaaatataatgaacaaatatcttgaaaccttttaacaatgaaaataaagtattgatgtaatttgttttaggttcatgtatattaaatttttagtgatcgtctttgattgatcaacgcagattaaagcctatggcagaaagaagcgtccgttaagaaaaacaggtaatataaagttgatcaaaaatgtttattgataggttgcatgattcggataaaccaaaatgtcttatcttaaaccgaaaaacagttataaactatataactttttatttggttcagttgattataatttttctataatttagtattacgcaataattacatcaaaaatcagaattcacttactgtatatatatgtgaaagaaatgaggaaaactagtgtgaacgcatgaacagtttatctggttattttctcaaaagaactaaaaatagtgaaataactggatgtcttactcgcaaagtatcacgtgatgatgatacacgttatttacacgttgttcggaagaagagattccattcgggggaataaaactcaaaactatatctcatcatataataatatcaaattggagaccaaaaattctagctgccttgaaaaattggtacatatatggtccctttgcgtatatttcaaaagcatcatagaagtatcaatataattatcgacatttatgcatgtatttacccaaatctatatacacaagcaagtattgacatttgtaagtttatattttcgtagagtgtcaatacccaaaagcatgcaatgactgagaactgttgtccattttagataagagatagattctcatgtgagagattcttctcactggtccctattttacttccgaacagaagtcaattacatttatgtatgtgtatgtgtatgggtatgtgtacatgtatgatgatatatatgtatgtgtaaagtaatatatgccttttgtttttgactttttgatacatttttcagggtgagtaaataaatcaaaaacattaacgtttaaccctttctacaaatactcaatatttgtgtcaatagtatttcaaagtgagagctatatcatagtgttaacttttatgcgatcaagatatttatgtgtttacggtagaataattaacttctgctcactacaaattatatttgatatattgtttcaaaaacttgacgtctacacaagaatcctatccaaccgaagtacatgttttgacgcttttctagttcaaaaaatcatgtaaaacctcctctaacttcaagcaaacactaatactatatattaatgtcatactttgttcatggtgcacaaaaatatgatattgaatctctggatttactactacgccaccaaccacttgtcctgagatcaatataaaaactttgacatgttaatcacatttccattataatatatttgtaaaaaaaaagtattcgagccaagtatatatgaatcaatgaaagatactatagtttgatgcttgattgggattaggataacacattatgcgatatgcgttagggataagttcttaatatatagtactatttagttaagacgtcgaagaagaaaggaatgttatctttcgttttggtaaacaaaagaatgatatcttaatgaatagattggaaaatattctcttagcttttaatatgcagattttgtttgacgacaactttagatgtcgattaggctcccaattatttaaacatgtttatttccgtttatgcggaacaagaattgtcaaagactttttctttttaccttgctagcagcatatcttcttttgagttttatatggactttgaccattaattttagagtaaattatctagagtgtcgcatatgggaagaacaatactcatgacacattaacatggggtttcaatatgattaaaaagaagaagaagtcatttttgatacgaacgaaagttcatctactagcaaattgcacatcatgtaaatttacaaagaaagcccttcaaaattggagaggccagaagacatgaactttgagttttcttaagcatcaaagaatgtgatccacttctgacaaatatgaagcatcggaacaaaaggaatataaaagaagactctcaacaagtcttattgtgatgtaagtgtaacagttaacatagcacattctgaatcttgattagatcaaagtcaaagacttccccactttatattcctcccagccgcacaatcacacaagttcacaaaatggaaaaaaaaacttcaaatttgaatctcagcatctgaaaaatatctctttattagaatgttttgactctgtttttgagacttaagcataagtctgggaatctgaaagtggttttgtttcttcatttcctcattcaaccgcattgggatgtctgaattacgttcagacatatacaaattcaaaaatcacatgaactctacctataccaaatctaaggtcagagacattatttgggcctgtgcacaataaagcccagtcaacaaaagtcatgggccagagaaaacagacaaagcccatttagtctcttcactctgcagtcaaacagagcaccttcataaggcatgacatttagtttgcagtgaaatccgtgtgcaaaaagatactcgcaccttatttatatatagtaaaagaagctgaaacatcatagagcaatcaaataacgtaaacacaaaatgaagaaacgttacaacgacaataaagatttatttgtgatgactgacgacgatgatgaattgctcatgcctcatcaacaaccattatgtaaacaacaatgggacttctcacgttatgggtaccgtcagaccaaattagatttgcagacgaagggacttccgagtcaacgtcgctgcctgtaacagtgacactaaaagattgcttctcgttcactgtcttaaaatacagaacactaggcgtgaccttgatgctaagcttagatccgtgacctgcgactacctttgatttgtatgtagagtttggcgtgccgacgttggtcaacgttctgttgaaagtcacagagaaggtactatcggttcctgacaatttggccgacattgaaggatagttaaggtttctaggcaagattttgtttttcttggagcacttgacggtatcacccgagatgattttaagggtcttcgaagtgtagttcatgccgcagagaaaggcgatgtggtcagctttgtccaattcatagacaagtccaggatttaaagcggccatcgggtcgacatgtccagctccataagcaaactcggtcgatgcgatgccacgtcccttagcttttacaggccaagctgcaaagattagttaagataacagtcaacaaaggttacttgtagcacaagaaagtaaaaattgcattcagtattgcttaccagttgtcatgatggcagattgaatcatggaaggagaccatctagggtaaaacgtcttgacatacgcagccacccctgcaacatgaggacaagccattgaagttccagagaaaacagagtacttcacacgtctggtgtcatcttcggacggttcaccattaggtgaaaatgcagcaaggatctccactcctggtgctgttatatccggctgcaattcatccaccattgtctctcagaccggagtaataaacagaaccgagagcataaatgttatgtatatttttaccttgagaatatcaacagcgatggtgtttggaccacgagaagagaaggaagcgataacaggagatgtcctattgaagattgtttccgtttttagaacagccgcttgtggagaactgagaaaacaacacacataaattttaggataaagatggagaatctgaagcagatgtataaagcgtagagactagagaagatgattgtttactcttgggactcaatgtaagagacgagagacttaaagtcttttgcttttaaaccagaggcaggtaaatggtgagtgaatgcaacgtcgggtctaggggatttatcaatgattgcaatagctccaactgatttagctatcttgtaaccactcggaccaccacacactaaaatctttcccttcacacggcttttgtttagacacgctggcgcacaaagtctgcaaaaacaattgagctcattacattgattaattgacactgtcatcatcacaattaagatactgtttagtagggagaaatttttacgctgccgttttggcgtcacaagcagatgaagctgcagattttccatacactagagggtacttttttcctttcatatcgaaagcattcactgacctcccctgttacgtcaaaggaacagaggattcattgtaaggaagagaaagattaccagaaaagagtgttacttgatactcacggcaagtgtcttgccgtttccgagaacaactttggtgataaacccacggttcgtggtgctggctgcaacggtaaagatccatggcgctacatgcgagactgtggtgggctttggaccgctgttacccgcagaacttacagtgagaatccctttggccatagcgtgaaaagctccgatcgctatcgggtcatcttcgaatatggatgggaattgaaacccaatagagatggtgatgaggtctacaccgtctgcaatcgcgtcatcgaacgaagacagtagagcttccgagctacaccctgaatcggtgcagactttgtaagcggcgattctagaggccggaacaccacctcttacggttccattgccgattccaaagaaacttgtgtctttgactgcatttccagctgctgtggaagccgtgtgtgtaccgtggccactagtgtcccttgtaccttcgcttgtgtagtctcttgccccaatcaacttgctgaaagattaaaacaacagattttacgtcaaaagccaagctattttctaagtatatctctagctttgagtcaaagcctttgaccgacgatactaatctttagagagcaattatataattaagagtaaattacttgttgcaggtgaagtttttgccaccggaacaaacacctttccatttcttaggaggaggaccaaagcctttgtcggagaagctcttggattccggccaaatcccagtgtcgatgacgccgatgatagtatcactttctatggccaagtttctctttgtattctttccttccttcacccccatgaagtcccaagacgtcgtcgtatggagttgtaatatcttgtttgggaacacagacacaactccctctatttctaaagaaaccacaaaaggctttgagtgtttaaaacctataaaattatttcaacataattgtgtcaaaatcgaataacactcaccggcaattaatgtacgttctgactcagtgagcctggctgcgaagccgttgaaactcctcttgtaacttctcaccaagcgaccttcgatcgaactgaaaaataaaatcacttatcaaaacttcataacaaataaatttaactgactataactaatcatgattagagaaatgaacaaattaaatcacacctttctcctgtgacctgttgaagaatactcatgtgatcggacgttggtatgtagtccgcgcgagacgaaagtgaacccatgtagactatatacaccttcatggatcatcatatatcatcatcaactcatcatcattatcatcacatgttaatgtatacagaaatagatacggattaaacacttaatgtgcaaattagaagttcgtttaattttcaaaaacaaaataaaatgagaagtctagttagtatgcatgaacgtttataatacctgtgtatcttcatctatgattgctgagactgaactcaataacaaaacaaggagccatgagtataggcaagtggacgcagctagattcgccatttgttttgtaaaatgtagtaattgttttattttctatgatgatatacgtgcaaattaagatctctttatatagaagagatcatacatgcaccgtgttcagagttgtctcaaacgatttgcagccctattttaaaaattattaagagtatatatttttaatatatgttattttgtcgtcctccgcgaaagcccagcgataaacaatccgtaacacttgaaactaagatagacggttctgcctgcaatatattttaagacttatgattagtgaatgatacaaacaatataattttttggaataaaaccccatatctagaatataagataaatataaggcatatttgtatgtatttatacataattatatgccctaatttatatgtatataagtatttttttaaaaaaattgaatggagattctgtttgacatctccaccacatactaaaaatcaaaatttatttcattgtctctaattttgtgtcgttattgttataaattaaatcaaaatttaccatgattttagggtaattttaatcaaatcttaccctaacattcaataaatgaattatagcataaaatcgttttaaattggtacagccggtcacaaggctttaggaaaagtgggaatcccatttatacagtttttttaagttcgtggtgaatcattggactattttatggggtacgtatttgattagtactatatggagtattttaaagtgattagtcgattagatgcttattccttttatatatttcagttggtccatgaaacaacatcgacgccataaacaataagcaagaatattgcaaagagaaagatgtaacacatttattaaaataaataaactagacccagactctcacatacaataaagcataaacaacattatattccactatatagtatatttttgtgattaaaataaattaaagttactgagaaaattgtcataacccacatgttaaaaaactcttttaatatataaaaagtaagtgccgtcaaaaagaaaaaaaacaaaaaaaaagtaagaccattatgcaaatatttttgaattaaatatacaaatcctcacacatgtatatcagaagaaactcattaatgcatgcatgcaaatgcgtatacagaaggctaaatgcatatatgtaagataaagttttcttttattattagaaaaaatatggtaaaatttggtctgaaatctggaagggtacatagttgtaatcgagaaacataattccatgaaaagttatggtatctgaggttttagcattgtttatgcatcatgtgagaatgtggagctgtattagttttcactcccatcacatcagagtcgcttctgtgttatgaaaattttaactagagttgatatcgtatcttcataataaaatttaaagaagttgataataacgaataattattagagatacattagcaaaatatatacgaagttaatttattaaggcagtttaattagcagataatgtcataatgatatggtcatacattttcagacaaacaaaaaaatagctgatatggtgaatggacgttaaaccctttttcattttatttttttttttttattttttttatttatggtgaggttacatatacggtccacatgaaagtcactcatgtattcacaccttgtttttacgagtactacttgatcgttatttggtgaatatttagcgtgatctgtccacaaggatccaggttaacgagggatagagtcaacgacaaaggtttaagtttccggagaaagacgatccaaaatgtaggtacagtctgttttctctgacagttaccaaatttccataacgtaattactattttggattaaccatatttttttttttgttgccaattttgattctcaattagttgtctaccaaacaatcctcaaatccacaaggaggtacattttgcctacaaacagtgagattcttcaacgttctgcgccggatctcaggtcattcaacttataggttgccagagactgagtataagttgccgacctttcttgatcacgtagagccaaagtgcaaacgagagaacagaagaagttaagcttctttaaatcggattccttttagttttgaaatagcttcctttaatttctttaatggaaaaaagtaatgtgccaaaataaatatactattgtattgtttaaactttatatctgtaattatatttattttttatgaaaagagaacagaagaagttaagcttctttaaatcggattcccttttagatttgagatagtttccctttatatatttaattgatagaaaaagtaatacaccaaaataaatatgctattatattggttaattaatatatgacgctttttatctgtaattaatttttataggaaaagaaacgtttgatcaaaagacgagaatatgaggtacctataaattatccacttgctgaagtgtttacttttctacatttttatcgtcaaggctcacaaaatcagtcactaatcttttcagtaaacaacatacttgttagttttttttttttttttttttttttttgttaagaacatactttttagttttcaggaaaaaatatcttcaaacctttaacaataaaaatctgatattaatgtaatttgttttagtttcatcttacatgtatatttatttgaacatcttaacccaacttaaagcctatatgagtatatgacagaacaaaacgtaaatgtcagaaagaaacaaaaatagtaagaaagataataaacatgcattgtgaaagaacacgtgaatacacgtagtttacaaactttacacgttgttaggaagagagattccattcgggggaataaaactcaaaactacatctcatcttatattattaattatatcaaattggaggcatatctttcaaaaacactttatcaaaaagaaaaaaatataaacatcgtaaagataccaaatatagctaaaaaatattttatgcatgtgtttactcatcaaatcttcgggtatatatattatgtttatacacacaaacaagtattgacatttgttaatataagcatgtataatgagtgagaagtgagaactgttgtctatttcagataggagatacagtctaacttaaatatacttatctttcaaaatagtcaaaaactttttttttttctgagcaaagacaaaatagtctacacaaatcacattttcatgattttaaatctcatatatgtgatgagcctaatagttgatcaaaaagaaaaaaagaaaagtgatgagcctaatcctacgaatcagagtattagaaattagaatacgtgacaagtgacataagaaaataaatatgcatatacattatattatatgttgttgtaaactatttaaaatatgttgttaaatattaattattgacataaataatgatgtttgtgtacctcgaagacaataaattttggaaaaccaattgcaaatactaaaaaccatggacattttgtaagatccagaaacagaaagaaagcttacattttcatccatctcattccttgttgcaagttatggtttgataacttgtctccgctcttggttcataaacatttttattttggtcatagaattcagattatcaagaacaaaaaaaaaatgtcctaaaagtagcttacactatttagactttctccatggaccatgtttattacatttaagttatataatgacaactatatctgcctcatttagctcatagcataaacaattatggggcttcttacattatgagtgccatcggaccaaattagatttgccgacacaggttgttttgttccgatactatcgcttgaaacagtgaccatgaaagactgcttctcattcatcgacttcatagacaaaacacgcggcgacactttgatggagagtttagagccaggaaacttgactacctttgcattgtacgtagatttttgcataccaacgttagtgacagttctctggaaagttatgttgaacggttttgttcccgacactttagccgacattgttgggtagttgaggtttcttggtaatgtcttggaaatttctttcgtgcaagtgctgttgtctccggagatgattcttaagtgatcactcgtgtagtttaaaccacagagaaagttgatgtggtctgctttggtcaattcataaacgagtccaggattaatagcatctatcgggtccacatggccagatccatatgcaaactcagttgatacaaagccagaaccagaagcattcattggccaagctacaaaattaggagatcatcaatgggtctcttgcggcacaagtgagtttgtttctcttggtaatttcaatctaagtttttcttaccagttgtcatgatggctgattggatcatggaaggagaccattgaggatgaaaagtcttgacataggcggccacgcctgcaacgtgtggacaagccattgaagttccagacagaacagagtattttacacgtctagtgtcaaactcgctttcagtcggtgaactgtcaggtgaataggcagcaaggatctccactcctggtgctgttatatccggctgcaatatgaatccacgattttctctcagagctaaaatcaaaagagactaataacaagcactaagataccttcagaatatctgaaacgatggagcttggaccccgagaagagaaagaggcaacaagaggagctctctgattagagatctcctcacttttgagaacagtggcttttggatttctgcatatacaaacagagaaaaaacaataaagatggataatttgaagtatgcagcatataaaacataaagaaaatcattactttgtggaattcatgtaagagacgagagacttgtagtcatcattggataagaaagagacagggaaagagcgaataaaagcgcggtctggttcagggttctttacaatcgatccaacagctcccaatttttgagcttctattaaacctttcgtagaatcacacagcacaatcttccctttcacaagttttccatccagacactttggctcgcataacctgcaaaatagcacaaagtagaaatggaaaacagttgccgcaataagcatagtactgtttcttggaaaagaagttacctagccttatccacactacatgtactcaaagcagcagattttccgtaaaccaaaggataattggttccattcatatcgtacgtattcactgatcgtccctgtttcattaaaaagagagagagccaaattggttaaaacgacaaagatgctaacgccatgatgacaaagataagactctttcttgatacgcacgataaggatcttgccgtctccaagaacaactttagccataaacgcacgattcgtaacactagccgcaacactaaacacccatggtgcggtactcgtgacagtgctgatttttggtccattgttaccggctgcgttaacagttagtactcctacagccatagcgtgaaacgctccaatcgcaatcg

SEQ ID NO: 928 - DNA, 75803 bp, Arabidopsis thaliana
gatcttcctcgaacggtggaatgttatcaagaacgatggagatagatatgacatccacaccgtcagcgattgcgtcgtcaaacgcagacatcattgcttctccgtcgcatccttcattgtcgcagactttgtaaacggcgattcgagcggctggaacgccacctctcgcggttccatttccaagtccatagaagtttgagtttgcgactgcgtttccggcagcgattgacgctgtgtgtgtgccgtgtccactgtagtctctcgctgtttgatttgctttagatttggctgtgtagtctcttgccccaatgaccttgctgcaaaattagagaaattgttgttacccaagattaaaagtactcttaaactgttggacaaaattcccaagttagggtaagaagtgtacttacttgttgcaggtgaagtttttcccgccagcacaagttcccttccatttcttaggaggagggccaaagccttggtcggaaaagctgtcggattcgggatagattccactgtcgatgaccccgataatggtatcactctcaatgctacgggttcgcttagttttgatgccttctttgagacccataaagttccaagacgacgtcgtttgcagtttcagttttctacttgggaacacagacacaactctctccattcctaagaaaaaacattacataacatttagtgatgtggtgcacaaaaaaagaaaagagatacgattttgcaaaattttgtgaatatatatctaacactgaaaaagtttttcttttaaactcctttaatttttctttctactataattctgtattcttttaaagatttttaaccagctagaaaactcgatataatgttaccggctaatctttttcgttcggattctgtgagtcgtgctgcaaacccgttgaaactctttttgtagcttctcaccaagcgattttcgatcaaactagaatattattaaaactttttagagttatgattttaaaccatatataagatataataagaggaaaaaatcatttttaataaaacctctctccggtgatttcttgaagaatactcatgtgatcggacattggtgtgtactcttctcgagaaggaagtgatcccaagtacacgatatataccttcatggattttcatcaccatcattattatcatgtatgatacatatggatgggctcatagtgagaaacaagatgaccatgataacaaattacaataattgtttcaaacaatattttattgtaaaacctgttgatctccatgatcatccttgtccgcggagactgaactcagagacaagacgaggaggcttgagaagaggaaaatgaatgtggttcctttcgccatgtcgaataaattaaattaaattcactctgattttgtttctttataaattttgggggaaatgaaatatatatatatatatatatgagatatgtcctggattaaatatagtcaatcaaccccctctgattgtgtaatctaacaaaatctattattactatatctcaatagaaagtaaaatatcttgcattaatgtattacctatggttaattaatgcttatatattagatatagattcgatttttggtagagtgaaaaagatttattgccaattaacggaggtaatttatcagagattttcaatgggcagatagaattattcgtcgtaaattcggttgttagtgataaaattattaaccgagagctttgtgtaagtaaaattatgattattcaactttctatctttagtatagatagatattcaaaaaggttaaactgtatgaagattaataatgatatctcatacttgtccaggacaacaccaacatccctcgtctctgcattcgcctcgagtaaccaattttcttttacaaaacacagtgcagcctctatcccctccgcgttcacacggattgaatttgaaaccttggcaactttccccgatgtcaaaactaggacaacaccaacatccctcgtctctgcattcgcctcgagtaaacaactttcttgtacaaaacacagtgcagcctctatcccctccgcgttcacacggattgaatttgaattgtttgcaaacttctccgttgtcaaaacctatttaataataatcaatatgtacattaagaaatattatagaaaaaaatatgtttttaagtaaagtgtggacactataataataagccaataccaggactgctagcggatgtagactggcaatgaacataagatatgataaagagaagagtgaaagtatacacgactaattttttttttgtgatagccattttatgatagacttggacctttgttttttacacttaggataagtatatatatatatagataaagtgtgattttgtggtcaaagatatatgaaaaggaaaaaatcttccaatttcttttcttagatttatagtaaaaaaactaaacaaagaaaaggttttcttacctaacattaattagtgattttttaaaaacttcaatttgcgataggttttacagagtataatggttgtaacgtgttgaaattctattaaaacaaaaaaatactttgtttaaaagaattagttcatacgccatatgttgcacacaaaatattgttttgtgaaaaagaatgtcatttcaagaatattggtcgtcaaacaaccactttaattgcttttgatacttttcagtgagtatttggtgaacttaacaagaaacaaagcaaaggacaatatcaaagatattgaatattacaatgtttgatgatgacggtaaacagatataaactgaagtgcccttatcaataggcaccatcaatataaataacaatagggcttctcacattatgtgtgccatcagaccatattagatttgcagatgaaggcagttttggatcgctatcgctacctgtgacagtcaccgtgaaagacttcttttcactcaccgtcttaaaagacagaacactaggtgtgaccttgacgttgagctttgatccttgatttaagaccacctttgatttgtatgttgagttgggcgttccaacattagtgacagttctgttgaaagtcactgtgagtgagctttcagatcttcgcaattgagctgacattgaaggatagttgaggtttcttggtaaggttttgttttctttagtgcaagtaattgtttcaccagctatgagtgcaagggtatccgcagtgtaattcaagccgcagagaaaagcaatgtgatctgctttgtccatttcatagacgagtccaggatttgtcgcagctattggatcgacatgaccagctccataagttgctcgtttacccatttctctacaaaatatctaaagttaattctctaatttctatggagatcaacatgaaggatatatatatatatatagaaatagatcatgtatgcaccctgtaaaagttcttctaattctattttttctttagaaagttaattacaattcattataaagttataatacaagatattataatctaatgatatcattaactaaaattaaagttaagttgaccaaaaaaataataataataattaaaataaaaagttaaaaactagtactacaattcattaatctaatgatatccttgtatttgtacaagtttagagaaacatatttacttttttctttcttggaaaacttttacttggaaaaaatatttacttggccaaaaagaataacctcatactggctttcccccttcattgatattttgcactcacttttgagaaaatctaactatatttttcaaaaagaaaaataaaagtttacagaaaatcttgtaaaacataaataataatcaatttcttaacacttatcaaatccagattcgctttaaaaaatgtttagtatcttgtgaaccctgcaatggactttgatctcaagatgcgattatgattttcctgtattcaggttatagaaaaaattatttcaatattattgctggcagaaacctttgcatttgaacaaaatatgattaaaaaaacaaagcatctcgattatccaattagcgtatctcaagacatcaacgtacatagaggaagccgagacatcacagagcaataagataactaaaacatagaatgaagaaacattacaacaataaaaaattatttatgacgatggtgtgaattgatgatgactcttcagtaatcactagtataaacaacaatgggacttctcacgttatgggtaccgtcagaccagatcagatttgcagacgaaggcacttcagagtcgagattgctgccggtaacagtaaccgtaaaagattgcttctcgttcacagtcttaaaagacagaacactaggtgtgatcttaacgtcgagcttagatccgtgacccgccactacctttgatgtgtatgtagagtttggcgtgccaacattagtcaaggttctgttgaacgttacagtgaaggtggtaccagatcctgacaatttggcagacattgaaggatagttgaggtttcttggtaggattttttttgcttcggagcaagtgacggtttcaccagagatgactttcaggacttgcgaagtgtagttcatgccgcagagaaaggcgatgtggtctgatttgtctaattcatagacaagtccaggatttgaagcggctatcgggtcgacatgtccagatccataagcaaactctgtcgatgcgatgccagttccagtagcattaacaggccaagctgcaaatattggttaagaaaccaaataagaacagagcgacaaaggttacttgtgggacaagaaagtaaatattggatatattttttcgcttaccggttgtcatgatggcagattgaatcatggaaggagaccatttagggttgaacgttttgacataagcagccactcctgcaacgtgcggacaagacattgaagttccggaaagaacagagtacttcacatgtctggtgtcatcttgagacggttcaccagcaggtgaatatgcagcaagaatctccactcccggtgctgttatatctggctgcaattcatccaccactgtctctcagaccaaataaattataaacagaatcaatatgaaaattgttttgtataattaccttgagaatatcaaccgcaatggtgtttggaccgcgagaagagaaggaagcaataacaggagatgtccgattaaagattgcttcagtttttagaacaatcgcttgtggagagctgagaagacaaacacaaatctatttcagaataaagatggataaatctaaagctgatgtataaagcatagagaagatgattgttaatttactcagtggactcaaggtaagagacaagagactcaaagtcttctgttagtaaaccagcggcaggtaaagggtgaatgaaggctacgtctggtttaggggttctataaatgagtccaacagctccaactgattcaactatcttcaaaccacccggaccaccacacactaagatctttcccttcacacgggatttgtctacacacgatagctcacaaagcctgaagaataattgatctcattacattagaaatttgatttttaaaaaaaacaatctaggtcaccgttaaaattaagattttatttggtagggaggaagttaccctgcggattctgcgtcgcaagcagaggaagcggcagattttccgtacactagagggtaatcctttcctttcatttcgtaagcattcactgacttcccctgttatggaaaaggaacagaggattcattggtaactaaagagagaaagattactatatgacagaaatgggagtgttacttgatacttacgacaagtgtcttgccatttccgagaacaactttggtgacaaacccacggttagtggtactggctgcaacagttaagatccacggcgctacgcccgatactgagattggttttggaccgctgttaccggcggaattcacagtgagaacccctttggccatagcgtgaaaagccccgatcgcaatcgggtcattttggaacatggacgcagttttatctccgatagagatggtgatgaggtctactccatcagcaatcgcgtcatcgaatgcagacagtagagcttccgaactacaccctgtcggggtgcagactttgtaagcggctactctagaggctggaacaccacctcttacggttccattgccgattccaaagaagcttgcgtccacaactgcgtttccagccgccgtggacgcagtgtgtgtaccgtgtccgtccatgtccctagtaccttcgcttgtgtagtctcttgccccaatcaacttgctgaaatattattataaacagatcaacaacattagctttcctttttcacaacttatgttaacctcgaccaacagtactactctttttttatcagaataaaaaacaacaattttttttttttttggtagaaaacaatattaatctttaaattaagttaaagagtaattacttgttgcatgtgaagtttttgccgccggaacaaacacctttccatttctgaggaggaggaccaaagcctttgtccgaaaagctctgagattccggcgtgatcccactgtcgataactccaataattgtatcactttcgacggtagggttcctcttcgtctttattccttcctttaaccccatgaagtcccaagacgtcgtcgtttgaagttgtaacttcttgtttgggaatacagaaacaactcccaccatttctaagaatacacaaaagagtttaattgtttaacatttagaattaatttcaacataagtatgtctcgatcgaagaacactcactggcaactctttctcgttccgactcagtgagcctggccgcaaaaccgttgaaactcctcttgtaacttctcaccagacgaccttcgatcgaactagaaaatatatatcacgtattaaaatcttcgtaacggtatttaaatttaattataactaaaaccataattagagagatgaattaatcaaaacacacctttctccggtgacctcttgaagaatattcatgtggtcggacgttggtgtgtagtccgctcgggacgaaagtgagcccatgtagactatatacaccttcatggatcagatatcataatcaagatcaccatgtatatataacggatgatcacatggagaagcaacagttcatcataataaattaataatgatatgaatcatcgacaatttttatacctgtttatcatctgtgacagctgaaactgaactcaagaacaaaacaagtagacatgagaggaggctagaggaagctgctagcgtcgccatttgcttgaaagaaaattactgtaatgtttagtgtctattatgatgaacatgaaaagatctttatataggagagatcatacatgcaccgtgtcaaaagaaaaaagaaaaaaatctaatgcaactcctcggattttgtctttaattgatactttaaattgttataaataagatcaaattagatcttactctaattttaataaaatctgtatcaattaaatgataacactctttacagttttaggaatcatatctatctagggatctatttactcacagttaatatgaactcaattaaagaaaaagcaaacttttggattagtttccgatttttttagttaataataaagaaggaagaaaatcacaaattatacaattgaattgtgttctttgacgtacaattgaattatttttcttgttgaatatactaaatattgaataagaaggaaagaaaacgaataggtgactatttattatttgccacgtagtacaattatattagaagttaatttattagcagtttaattagctgatttggtgaatggacgttacacatcgttcacatgaaagttgtataaccagtcaatgtatttagcctttctttaaggactaataacgattgctattactaggtctatccagttaatgtatttagtaccttgtttaaagaataatagtgaaccaataaatgattacttgggttgtggacaattaattataaataaattatcttatttcagttacgttttatttaatttgttgacattattttccataatattacgtttcatgccaccacaataactttgccagtttcgactccgtttagtattctaccaaataagatatattgtttgatatcttgcactttttattaacaagtgtatgtgttaaattcctcacaaattgcagttgtatgagctataatgtctaactctttgattatacattaaggatattaatattttataaaattgtaggatattaagaatattatataattagtgtttaaactttcatgctactacaaaataatatcaatattaagatattttaaatatagttccatacatatatatatttcataagagtataatataggaatatttggagtatagaaataaatcatacgtacatatattctagagtactgttaactgattataaatttattggaattaaatatgtttaaagattctcaatagcaaaagaaaggaagaagatagtgatagacgttcattgtttgggtaattttttcgttttcgagaactaacgaaccatgtgatatgtgtaagcactaagcagagtcgtgcgtgcccacctttataaacaagaaacattcgtctacggcacagttttttttttttttttttgtgatgtcttattttgaaattgatatattaaagtaaagtggtgaacatctcacagtttgacacttataccatatacctaacttctatggaaaatttaaaaaaaaatgtagagcgttatatgaatatttttttaaaataaaaaatgttctatgaatataagaaatagaccaaattttcaattctttgggattccaaagttctagaagcctagaaccttgtgtgtacgcatgataggcagaagattttcccccgaaagctctttaccttaacatgtcctaaaatgctcatctcctatcagtagactttccaaacagcattttgattgtttgttagtttcgggccttctggcgtaagatcgtatactccactagaatccgttcgtccttaagaaaaaggcgagaaacttaactataacaaagatcatgaaaattaacaaagagttatatacatatatatcaaatgtatgtataattattcattaaggttatatatagatatatgtatttctataccattagttaattatgtaggtcttcatattttcaaagttgactaatttatttttaaatttttggtcgagagaagttgacgaaactataactgtaatgtttccttctccataatattacattgtttactttttttttcagttcgtgacatgtgttatgttgaatacaataagaggaacatgtccaatgagataacacaacagttgaatcatcttattcaatgtccttagacatcaacaaacattcatactataaccaaaattgaataatttataacatcaacaataatggtttatgatgaagatggttgtgagaagtcaccagtataaacaacaatggggcttctcacattatgagttccatcagaccaaattagatttgcagacgaaggcagttctgaatggagctcactggccgaaacagtcacagtgaaagactgcttctcgttcatcgacttcatagatagaacactaggtgagaccttgacgttgagcttagatccgtgatttaagacaacttttgatttgtatgtagagtttggggtaccaacgttggtgacggttctgttgaaagtgacgatgaaggagatattagatccggataatttagccgacattgatggatagttgaggtttctaggtgagattttttcactgcaagtgacggcttcaccagagatgagtttcacggtagtcttattgtagttcatgccgcagaggaaggcaaagtaatctgttttggttatctcatagacgagtccaggattagtagcagctattgggtctacatgacctgctccataagcaaactcggttgatgcatagccagattgagaagcattcatcgaccaagctgtgagatcgacaaagaacagagcatgaacaaaagttgatggttttcttgcgagacaagaaagtatgttttattacttatggtaatttttctttacctgttgtcataatagcagatttgatcatggaaggggaccattgaggatgaaacgtcttgacgtaggcggctacgcctgcagcatgtggacaagacattgaagttccggattcaacagagtatttcacataagcggtgtcataaaacggtgatgccctaagtgaatttgcagccaaaatttccaatcctggtgctgttatatccggctgcattttcattcaccactttctcagatagaaaaaaaagagagattaatctaagcaataagcataaccagtatatatcatatataccttgagaatatcagcaacaatgatgtttggaccgcgagaagagaaggatagaattttaggagctgtctgataaaagattgactcactttttaaaacagccgcttctggggacctaaaggttcaagctcaagaaaaatgaggataaagagaaacatatacacaacaaagcgtataattcaacagagagaagatgactgtttacttttcggacttaaagtaagagaggacagactcaaagtcatctttttgtaagccagatacaggtaaaccgttgatttgggcccagtctgaaccatcttcaaaaatggctgcaacggctctctttgtataggctacgtagggaagaaatctattgcacaccaaaatctttcccttcaccagggatgcgtcaagacactctggcgtgcaatccctgaaagaatatagaaaaacctcatcatcaccaatcagaaatctaaaagtatttctaggtcatacgcttagtgtttcttgtgtaagaagttactcggcgcatttcgcttgcgagagagacaaagcagcagattttccatacaccagggggaacttctttccttttagatcaaaaccattcactgatttcccctattagaaaaaagaaaaagagaagagccacaaattaaagatactacgataacaggaaatgagagtgttacttgatacttacgacaagtgtcttgccgtcaccgagaaccactttgctgacaaactcacggttcgctgtgctggctgcaacagttaacagccacggtgctaagctcgtgattgaggccgtatccggaccagtgttaccagcagcgttcacagtgaggatccctttggacatagcgtgaaaagctccaattgcgatcgggtctttctcgaacgggtacacattaatatcacctatagagatggtgatgatgtcaacaccatcggaaatggcatcatcgaacgcagaaagtattgcatcatctctacattccccggcgcagactctgtaaacagcgattctagaggctggaactgcacctctcaccgttccatttccgatcccaaagaagctggtattcgcgactgcgttgccagccgcaatggacgccgtgtgtgtaccgtggccagtagagtccctagcatctcctggtgagtagtgtcttgccccaatcagcttgctgtaaaaatgactaatatatatcaatctctgcccccaaaaagtaagcaagacttttcattcaacccccgaagtctaagcttttgacacgtaacgtcttaccttagactatacgtaagcttgtgaaaaaagaaactaaaaatattttcatgttgtcataggatatatatatgttttcctttcatttgcatttggcatctacgattaacaataagttttgcttaaaatgtttaaattgtgagctcattggaaacatgtcagctatatagaaaacttatgtaaacgcacacaatgaaggtttgatcaacttctaacatctatataagttttaaattaaagagcggagaaacagatttacttattgcaggtgaagttcttgccgccagcacaaatgcccttccatttctttggaggaggaccaaagcctttgtcagaaaagctttcggattccggccagattccaccgtcaaagactccgataattgtatcactctccacagaaggattccgcttcgtaccttttccttcctttagtcccatgaagtcccaagacgccgacgtttggagttttaatttcttgtttggaaacacagaaacaactccctccatatctaacaatataacaggaagggttttaggcttcaccgatcgagtcaatttctttttgtttcatgtttacatgttaaaaaaatcaaagaggttctaaatcatttaaataaaaaagagtttcatgcacattttcatgaaattagttttgaagatgcaaatgcaaacacttgcttccgtttgtgtatgatatttacgttgaaaactaacataaatatggcttcagatgatatatggatcacttgaaaagatacacactaaaagtaaatacaagcaagtttgttcatcgttaaagactatttatgtgtggaagaacactcaccggctactcgttctcgttctgactcggtgagtcgggccacaaacccgttaaaactcctcttgtaacttctcaccaaacgaccttcgatcgaactagaataattgtatatctcattgttaaaaatactcataatttaaagtaataatgatgagaagatgaataaatcaaatcacacctctctctggcgacctcttgaagaatattcatgtgatgcgacattggtgtgtagtccgctcgagaaggaagtgaacccatgtagacgatatacaccttaatttaacgagaatcatcttttatcaacaacgaatgatctagaaaacaagagattttgatcattgaatataatagtaaacctgtttatcttgatgaccatgtgtgactgctaagactgaattcaagaacaacaagacaataagaaatgagtggaagctagagaaagctcctcgttttgccatctcaattgattggtttataatttctgtggggatcaagatggaaaggctgtttatatattagatagtacatggaccaagtaaagaaaataatctaattttctgtttctccgcttaatgttgtttcttttgcccaaacggttttcaaaaaagttgtttttatgtactcataatcatatacaacgggagaattttattttttttcgatgtggtaagtcaccatatttttggaatctataacgatagtaacatgttgtcagttccaataaaaaatatctcaaagagtacaacaaaccgacactaatgtgtgacttaggattggtatttgtggcatgggaagggtcgtcaggattgagagaggagtggtccaatagtttggggcctaaacgtgcttacgacttttggaacaatttggaggcagaagcaaccaacagcttcgtcttggataatgtgcctagacgatcttggtttagagaatgtgattgatatttgagagtgatgcaagtgttctgtttcgggcagttaatgatgaagcaagcctggcccatctctgcagagcctttacacgagatatcataggaaaagacaaagacaacgaaccagcacatgtgtgctgatttcattgcgaaaatagcactttcttttgtgtattatgccgttttagataagtgtatttccgatttgcttccaccaattattgagatgaatagtcacacacttttgtattctgtctaataaagtagagaaattttcaagggattcggcaccaaaccaaatcattattagaatagaatgttacaaagctttgataagttctttgcatataagtaactagtaacgcggacgccacaagaactttgatgttgcagttaaaaactaacagctagtaaagaagtacatgacttttccttagagctattcaatagttcttcttgaacccaatgcagatttatccttttgattcacacaagtcgaataagattcaacagcgttatccttttcattcttcaagtgtgaagatagttagcagccatcatcagctctagagtcagttcaggctcaatatgaaactctgtctctttgcctctgtcaaaagatggaacatatgcataacagtagttaaagactatacaactataaaaagagagaaagataggagtggaggagcggtaaaagaagaatccaattctagaaaacagtaacactttcaatacattggttcatagagataaactaatgagactaaacgcaggacagtgcaatgaggtaaagagttgcaatgtaactatatccccaaaggatgcgtatgcgttcattcttatcgactgatccactaaagtgaaacttggatagttacaaacagcgatgcgattctgaagaaaactaacagagactactacaatgccatgttctagagatcaatgtagagcaagaggtgaaaagcgagttagataatggaacctggagtattgaagagaccagtagaagtactggcaaatcttctctagtattgtggtgcttatatcagggaaagtcactacgccatctttcgattccgagaaaccacctaccataccaaataacaacagaattactaaatttagcatctacataatgaaattgagaatgatcttatgaatttggacttgcttctttattcaaattacgtaattgaatttccgattgagcataatctctcgctaaatttctctcaaattgaggccaattcacaactaaatcagattaagtatcacagaatccatcaaatccaagtaagatgactagatcagaatcttgattacgatcaccaactctacaacaaaagaggagaagaaacctggagaagtgagcatgcttcggatagtctgagaaaccatagcggcttctctgtcgatgacgaactcgaaaccttccatgcttatcaacttcaccgtctctctcatcttcgtcgtcgtcgtcggcttaagctttcctctctttctctctaccgcggcgtggtttcttaactcgcaaagaccgactaagttattggttgatcccaaactattatgggctcaatttcaaacgaggcccattatgaattatgatgtctacataatcttgttattagcccactaaaatcaccctattcggtcctttttagctgaaatttattccaatccttttttttatccgtttttaattgaaattcaaaagaactattttgagaaatgactaatttgtaaataatgcggttcagtataaattatgaaatttttgataattcaaaagaaccaaattctgacattttcaaagttatagaaaacaaacttaaagacgaaagaaaccttggaacatttatcaaaatcataaccagagctttacgggttggcgaaagatgtgattcacctaggaatcatacaaaatctttttgatcacaagtaaaacgagagatatgtattttactatttttctctaatcccaatcagttacacataaaccaaaaacttaataaggtttgagttactctttttcaaacttatcaccaaaaaagtgacgttgaaatctttagtctactagtataaatgtataatgatcaatcaaccaacagaaaacagatcatcaccaacacataattatttgatgacttggctctttataattggctggttacaatgttaacatgagagtcattaccgtatccgataataacttaagtcattatttcccataatacccttgaaacagccacttactttttgtcagctgcctaccatttacctgccacctcagcccccttttgtcattttctttaatgcggcgtcgttttattttccgtatcaacttgaaaagccagttatacaatacgaccatcatcttcatacgtataaacgtatttataagtaagaaataagaacattcaataacctctgacatttcctcaattccctgaaaaaatttcataattcaaagagtgttccttggagagaaaagtttcatcctttcaacagatctgaagagggtcaattgaaattcgttttcacgattcatccgccatttttccggggaaaaaacaaaaggtatgtactttgggactggggctaatttctttggatctgtctactttatgaagatcgcttgttgatttctgggggatatgtgtgtttataggtgagatcaaagaggaaaaatggcgcatagggtagaacaggattatgattatttgttcaagatcgtgttgattggtgattctggtgtcgggaaaacaaacatcttgtctagattcacaaggaatgagttttgtttggaatctaagtccactattggtgttgaattcgccaccagaactcttcaggtgatttctaattttgtagctttttttttcctttactttgggagaatgagcagaaaagatagtcttaaattcacaagtggtaatattcagagaaatttgaacaagtatcttgttttctgaatgcgtctgtgatcttgacatatgtcaatttcaagctatttcttcatttttaacgtgatctctatcttaggatctaagatttgtgccttttggttggctagctgcttcatgatctcatatttaggtcaacgatagttcatttgatgcagttgtgttcttatttttactcttcttacttgtaaagttgcatcctttacatatcctttttggtcagtctaaggaacatgcttatgttaggtaccatgtaagtgaaatgatcctgtggtgtcttgcgcattgaatagttttaactttttaaactattccgtgcattgttctctcatctttttgaatttggttttttattgcttagagattttaatatcaagagagaatcttagaatgtgctggccatgagtcatgaggaattgcttttgtatagatggtggagaaacccaatggacaaaaagcttcccacaacttgtccctaattatgattttttttccttatcattaaagtcaactctccatccctggagaagtcaacgcatcaaaacattaacataatcagctgatgtattgaaaaatgttgatggcttaactattactttttgtgtgttttatgtttatacaggttgaaggaaagactgttaaggcccagatatgggacactgcaggtcaagagcggtacagagctatcacaagtgcttattacagaggagcggtaggtgcacttcttgtctatgacatcactaaaagacaaacctttgacaatgttctgaggtggctacgtgaactaagagaccatgcggattccaacattgtgatcatgatggctgggaacaaagctgatctaaaccacttgagatcagttgcggaggaagatggacagactctagctgagacagaaggtctctctttcttggagacatcagctcttgaagccaccaatgtggagaaagcatttcaaaccgtgttagcagagatttaccacatcatcagcaaaaaagctttggctgctcaagaagcagcggctgctaattctgccattccggggcaaggaacaacgattaacgttgaagacacatctggagctggcaaaagaggttgctgctctacttaattgaaagtttaaactttcgttttctattgcttattcactgtctttttttctcttcaagttttgggtgatgaaatgtaacaacgatgcaagaccatgtagaatatatatctcttcatttactcttgtcgtaccatctttgatgggtttgtgttcagaaagaaagaaaaatgaagaaaaagtttgttattaaacttctcttattggtgtatctctcttgaattggtatgttccgtttagttctcgtttacaactgttctttctctttttcaactccgatttaagttgatgtgcctcttaagtcttaacgaatactcacagttttatgaaggggaataactctttctatttttgccccaaaatctctagtaattgattacgttgttgacttgttggaggtaaagagaaaaatgttggtctagttttaggtaaacgtgtgttgttttaaccaaagcctgacttcttagttcgtatggaaaaggctatatgatcttttaagacaggatataagattcaaacctagttttagctaaacgtgtgttggtttcttttgatactcttattcaaatattaatgtatatgttgtgtagttactgcatttcttttgtattgtcatcaaaatgtatgcacctcttatttgttttgtaatccatgttatgaatcacacatatgtaaactctacaatataatttcaacctcttacaaaataaaaatgagtaaaaatcaaactgaaattggctaatatgtaaactcataaaattcattttattgaatatataataagaaactgacaatgaattggcaaagaaaattaggtcataatgaatcaaacaaaagaacattactatatatatatggaaaaaaaatatttaaagatcataagtgataatgatgtgctaatagtggggacaagcaaatccatccgaaatgcaagaacacggacagagatcattataacattatgcaaagagagtagttgcattaacctattattattccactattttattttcaaaaataaaataaatacaaatatacaaataaaataaaataaccaaaggaagaaaaaaaaagaaaaaaacccactaaccttcgataaactcagccatcacagaaattcgttggaaaaaaataaatttttagggaaaaactttttagggaaaaactttttaggtccaaagatcgagagagaagagaagattttgaattttttttgttttataaagtttcgtcttaagcgatcgattttttgtgcgaaagattgaaactttttggtaagataattgtgttgtgtggttggatcgtggaggtgggtcttctttcgaatggcgcaacaagggcagggaagcatggaccctgccgctctcgatgatatcattcgtcgtttgttggattacagaaaccctaagcctggtaccaaacaggctatgctcaacgagtctgagatccgtcagctttgcatcgtctctagagagatttttcttcaacagcctaaccttcttgagctcgaagctcctatcaagatctgcggtaaatttcatctctttttcggtttttgatttatgggttgttttcgttttttgggatctgtggtcttttgtgattgtctttgtttgctcgtttagcgttgttcgtagatcagccccccaaaaaatagtattttttggtttgtttctctctcgtgtgtttgtttggtctagttggtgtggatttgtggaatagctaagagatgatagaaatgtttaatccatcatctgattgcagcagctgatctcgtaacaaagagacaagttaatggacacataaagatccttccttggattgctctatattttgggtgagacctcgtgaaaaaaggtttaaatcatcgacaacgttttcgttgaggctataatgattagctgtgaatatcttagtgattaatgtaacctaggatggatttgtttgtttatctgttttgtgtgtattcctatgttgatttgtctgttaaaattcagatggatttgtaatggttttttttttttttttttcaggtgatattcatggacaatactcagatctattgaggctgtttgagtatggaggcttcccacctacagctaactatttattcttaggagattacgtagacaggggcaagcagagtttggagactatttgtcttctgcttgcttacaaaatcaaataccctgagaacttttttcttctaagaggaaaccacgaatgtgcttctattaacagaatctatggattctatgatgaatgtaaacgtcgattcagtgtgagactctggaaagtgtttacagattcttttaactgtctccctgttgctgctgttatagacgataagatattatgtatgcacggtggcctttctcccgatttgaccaacgtggaacagattaagaacattaagcgacctactgatgttcctgactctggtttgctctgtgatctgctttggtctgatccaagcaaagatgtcaaaggttgggggatgaatgaccgtggagtctcttacacgtttggccctgacaaagtcgcggagtttctaataaagaatgatatggatctcatctgccgtgcccaccaggttcgtcgtctacacactgttcgtttctattttactaaagatgtcacggaacttctataaaaatataactgttgtgtttttctttttctaaaaggttgtagaggatggatatgagtttttcgccgatagacagcttgttacgatattttctgctcccaactactgtggtgaatttgacaatgctggtgctatgatgagtgttgatgaaagtttaatgtgctctttccaaattcttaagcctgctgatcgaaagccccggttcttatgaagtaaagaggtagttcaagtcttttatactaacttgtgatgagtgtttcaattcctgtttcagtctttcagatttccagattgctataaaaagttcatcatgcatttcttctcaaattacttagattatgacatttgttcatcttttgcttacacaacttgtttaagatttgattgagtaaaacagaaggggtttcgttttgaactttgtgaatatgagctcagagcttggatctcagattcaatcacttacaggaaaacttgtttcatttttgcatgttgcagttgaaacctcgcgggaaagaagaggaaaaaggcgatacgaaagcgggagagacatttgaagctccctgagactttgtccggaggccttgcaaaggcaaaaaaacataatttacatgttatattatcttatttgaactcttgccatttcttttctcaaaacactttatgttcttatgatcttctcctctgactctatatagacagtaaaaaaagtctgcaaattttcattctttttcaacaaccaatttcctcagtgtacatactaaattgttctgtatccatacacacatatacttgggaaatcttcggtttcatggattcttcacaactcgaagcctctttaaaaacagattctttgcttagttgttgtcgtcgctgcaaattatttgacaagtggagagtttttgcagagctaaaaagcgaatacaagttgaccaaaaaaggtcaaatccctggttccatatgaaactgtcaaactttggacgtgcatggatacaaaagcttctgtcagtttactttcctggatttagggttttaaaaccagctgtgaggtttgctgcaatgtggcaatgtcactgcaatgtgttgtatagagtcttaagtcctctgtttactttaaaacccgtattttaacttgctgctattcacaacaagaaaaatgaagtcttgtctagctacttttgctctcgcagtgttagtaacacaaggaagcatttttagtttgtgtttggcctcctctgcttctacaaactctgttcctaattggtttcatcattggccgccgtttaaatggggaccaaaatttccatattctccacctaaaccgccgccaatcgagaaatatcctccaccggtgcagtatccaccaccgatcaagaagtatccaccgccaccatacgagcatccaccggtgaagtatccaccaccgatcaagacttaccctcatccgccggtgaagtatcctccaccagaacagtatccaccgccgattaagaagtatcctccaccagaacagtatccaccgccgattaagaagtatcctccaccagaacagtattcaccgcctttcaagaagtatcctccgccagaacagtatccaccaccgatcaagaagtatcctccgccagaacattatccaccgccgataaaaaagtatcctccgcaagaacagtatccaccaccgattaaaaagtatcctccgccagaaaagtatccacccccgatcaagaagtatcctccgccagaacagtatccaccgccgatcaagaagtatcctccgccaattaagaagtatcctccgccagaagagtatccaccaccgatcaagacttatcctcatccccctgtgaagtatccaccgcctccgtacaagacttaccctcatccgccgatcaaaacttatcctcctccgaaagaatgtcctcctccgcctgaacattacccttggcctccgaaaaagaaatatcctccaccggttgagtatccgtcgccgccatataagaaatatcctccggctgatccatagtaactcaaaaccaaacaaggacgtgtttgtctataagtatatgtctagttaaaaaactgttctgttctttctgttatgttctttctttttcttatgactttctgttatgatgcatcaaataaagaataaactgttctgttttgaatttgttaaataggagagtgcaagctcaagaacaagctgtttcataaataaataaaatatattttctaaaatcaagtaaagtaaaaaaaaaatagatattgtactaaatgaataaacttgattcaacaaagttttgtacgttgttataatttcacttaaataatttagtgcgtcaaaaaaacaaaattaaaacgtaattggtcaaggaaaaaaaaacaagtctcaagggaaaaggaaaacaaaaaaaaaggaaaatttaataagcaatctggaccgttcatactttttagatctgacggctgacagagaactaccattgggcatcttttataaacagagagatttgtttgattccggtcgaactcaaaacataatttgctctcaataagacattaacaaagtcccagaggcagagagagagaatcagagagagagaagtcgagatgtttttccacatagtattggagcggaacatgcagttgcatcctcgtttctttggtcgtaacctaaaagaaaacctcgtatctaagctcatgaaagatgtcgaaggcacttgcaggttttctttctctattcacttctagtagaaaatcaccaatttcggatgctttaatcgcaaacccttttcctcaattctcaattcggattcgttttccttaagacaacttcgaaaaagttgcatattttttcgaaccctaatctccgtctagttcaatttgttaggttttagggattagagtggattaaattcgaataaagatcgttcttttaactaaattgtagtctttctctgctgcttgtgactaaagtctgatttttagcagaatttttttccaaagggatttgctttgaagcctttagctttcttaggattaagatatgacttcatccagctcacttagatgcctgattgcaaatcattcagatccagtatcttgttttgtatttgatactcaagtctaaaactttgttctttagtatagttcgcttaatccattgcttgtgacagagatttgtattttgaggcctctagctttttgtatttgctttaggtttaagatgtgaagtttcatcattgcaatgtcatattgatacttatcaatatttgctcttttcgttttgtggtatggacagtggccgacatggatttgtagtggcgataactggaatagatacaataggaaagggtttgatcagagatgggactggttttgtcacctttccagttaaataccaatgcgtcgttttcagacctttcaaaggcgagattttggaagctgttgtcactttggtcaataaggtaatgtatctatatagtcttatttttttagtcaaatgtctttagtgacaaatcaaccttatggattttcctaatattatcacagatgggattcttcgctgaagctggccctgttcagatttttgtgtctaagcatgtaagcttatgatcttccatcatgaatttgacctcgagttcatttttgattctaggtgttatgtacttactcttgttctcctctcttttatcaccacagttgattccagatgatatggagtttcaagctggagacatgcctaactataccacatcagatggatcagtgtgtttctttctctagttcttatttcccaacagtattatatgtgtttcatctatcttcaaggaactcatttttccaatgcttctcttgcaggttaagatccagaaggagtgtgaagtgagactaaagattattggaacaagagttgatgccactgcgattgtatgcaccatctcctccataactctagtcacaatccaacttatagtttttagattattcttatcaatttacacatttgttttttgattttgcagttttgtgtgggtaccatcaaagacgattttttgggagtcataaacgaccctgcagcggcataaaaagtttcaagcagatttcaattttggtcttctttctttcacagagaatgctgtcttgtgataaagttgtattatagttgaagttttggatctatttaatccgaaagattggaaccacgcttgttggatttaacttatatgcaagtttagtgaacttcgtatttgatcaaaactgttgtcattttgagaacaatatagtaccgagtagtggatcaaattctacatgtctcaatgaaaattgtataatttgaaattgaatggatgtttcattgattgttagttatattgtttcatatgttgtggaagatattgaaactcttgtttcatacgttgtggttctgtttatcaaatatttgataaatctaagaaaacatgttaaaagtcatcaattgcttctctcattcatcaactttccttataggatttggtttttggtaagacctctttgactatcgagtaaaatatctaattgtatgatatattgaccaaaatgtactaattaaattcattgaaagttttctgaattttaacacattcaatgaatttgaaaacgcttttttcaaataaatttccatatagtttcataacaatgatgagtatgcaatctattcaataacacattcgttctctcagagtcacaatcccaactttgctctttcttttagagtttcacaaaatggctaagctctctacacctctctacttaatttgtttagcattcatcttcactagagatgtgtctgcaaatgattatagacaggcaagttcaagttcctactctgttttgtgagattcccatatgaacaacacatctaataatacctctctctctctctatctctgatttacataaatgtatgcaggtgtatattgtgtatatgggaacacttcctgagattaagtactcacctccctctcaccatctcagtatactccaaaaacttgttggcactatgtaagattcaacctgtttcctccttatccttattccaaacactttacatatgtaatttttgatgaggatcaacatgtttctctgtctctggttcttttttccagtgctgcatcgcatttgttagttagaagttataaaaggagcttcaatggattcgctgccaatctatctcaagccgagagtcagaaactgcaaagtgagtatttcataaatcatcatttcttacaaaacaaatgtcagaaactttggaaaatcttccacaaaacacacaacgttttctgcaatttataaatgtgtagatatgaaagaggtagtgtcagtgtttccaagcaagagtcatgaactgacgacaacaagatcatgggactttgtcggatttggcgagaaagcgagacgagagagtgtgaaagaaagtgatgttattgtcggagtgattgacagtggaatctggccggaatctgagagctttgacgacgaaggttttggtccgcctccaaaaaaatggaaaggttcctgtaaaggtggcctaaaattcgcttgcaacaagtaaattatattctaacctcgtaagaatccaatcattcaatttcctggacatggtattgatataagggttacgtttcttgtgttacaagcaagctcatcggagctaggttttacaataaatttgccgactcagcaagagatgaggaaggccatggaacccacactgcgtcaacggctgctggtaatgcggttcaagctgctagcttctacggtttggctcaaggtactgctcgtggtggagttccctcggcgagaatagccgcatataaagtctgcttcaaccgctgcaacgatgtagatattctggctgcgtttgatgatgccattgccgatggtgttgatgttatctcgatctcaatctcagccgattacgtctccaatttattaaacgcttctgtagccattggttcttttcacgcaatgatgagaggaatcatcacggcaggttcagctgggaacaatgggcctgatcaaggttcggtggctaatgtatcgccatggatgataaccgttgcagccagcggtacggaccggcagttcattgacagagtcgttcttggtaacggaaaagcattaacggtacattttcttatctagtgacaacgtcatttcacatcctagttcagatttagtgacaaagttcaagagtcgttgatactctgtttctttatacagggtatatcagttaatacattcaatctcaatgggacaaagttcccgatcgtttacggccaaaacgtgtcgagaaattgttcccaagcccaagccgggtgagtaagaagtctcttcttcttcttaaattattctacgttcacatctgaatcttgaatcaaaacacattgatgcctctaatagttattattatggacagttattgttcaagtgggtgtgtggatagtgagctggtgaaagggaagatcgttctatgtgacgacttcctaggatatagagaagcttacttagctggagccattggagtcattgttcaaaacacattgcttccagacagcgcatttgtggttccctttcctgcctcttctctgggatttgaggactacaaatctatcaagtcatacattgaatctgcagagtatgtaagcagtaatgaatacgaacagctttgtttttcggtcttgagatgttaaaagagttaactttgcaggcctccacaagcagagatactaagaaccgaggagatagtagatagagaagctccatatgttccatctttttcttctcgcgggccaagtttcgtcattcagaacctcttgaaggtagtgcaaccggaacaaagatcattaagcttgtgttggctttatatccgaatcattgtttttggaataacatcaatgttagtttgcagcctgacgtaagtgcacctggattagagattctggctgcattttctccggtagcttctccttcaagttttttgaaccctgaggacaagagaagtgtgaggtatagtgtaatgagtggcacatcaatggcttgtcctcatgtggcaggtgtagcggcttatgtcaagtcttttcaccccgactggtctccctcggcaatcaaatccgctataatgaccaccggtataattcaaaacaacaatacattcttctgattttcttacttttggaataatacaaaaacgtattattgtcatggtatgtagctacccccatgaaccttaagaagaaccccgagcaagaatttgcatatggatcaggccaaattaacccgaccaaagcaagtgaccccggacttgtatatgaagtagaaacagaagattacctcaaaatgttatgtgcagagggttttgattcaacaacgctcacaacaacctcaggacagaacgtcacatgttcggaaagaacagaagtcaaggatctgaattacccaacaatgactacgtttgtctcttctcttgatccattcaatgtcacgtttaaaagaactgtcactaatgttggattcccaaactctacgtacaaggcaagtgttgttcctctccaaccggagcttcagattagcatagaaccagaaatactgagattcggtttcctggaggagaagaaatcttttgttgtgaccatctctggtaaagaactgaaggatggaagttttgtaagttcgtctgtggtttggtctgatgggagtcacagtgtcagaagtccaatcgttgcttactcaatccagccttaagaaaggagttatgctcattttcttttcttgtatcatcaaaaacagagagaagaagagacaaagttttgagggactaagacatacttacttgagaacaaatcaacaaagtgtatctgacactagaaacccattataatatctatttgattctctttgaatctaagaattcgattcagttcttgtaatctctgataaattgcttctttatgagggtgtgctatatctcccacaagaaactcatggatctgattgtccacttcgatagtactgcatcctggttccttctcaatccctgaatctctcatactctctctgatttctgtagattctttccatttcccagatgaagcgtaaagatttgataagagaacgtatgtcccagaatctggattctcagattcgaatagtctcttagcgattttttcaccgagttccatgtttccatggatcttacaagcactcaaaagagttcctaacatgatatgatccggctctattggaatattttctatgaatctgtaagcctcctctagtcgccccactcgaccaagaagatcgacaatacatccataatgctcaatctgaggttcaacattaaaaactctcttcatagaattaaatacttcaagccctatatccaacaaacctccatggctacatgcgtttaaaagagcaactaaagtcacctgattcggcctaaatcctctgttcaccatatcccgaaattcattgatagcttcaacgctagccccatgcattgctaatccagaaatcatcgtgttatatgatatgacatctttgtctcgcattaccctaaaaacccgccttgcctcattgatatcaccacacctggagtacatattgatcaacgcattacctacgaaattactaagctccatcctttggttctcaacaaacgaatgtacccaccgcccgagctccaacgcacctaaatccgagcatgcggataaaacacagacagctgtaaattcattagcactaacattctccatctgcatttccctaaaaagctccaacgctttgttcatctccttgtttctaaccaacccatcaatcatcgcagtccaacaaaccgtatctttaatcttaacatcttgaaaaagctctaacgcctccttaatgaaaccgcattcagaataacaattaatcatgaccgttgctgcaacatgatctctgtcaggcatttcatcgaacatcttcttagcattcaccaattccccagatttcccgtagatttccatcatttttagccctaccgatctactagacccgaaccctagtttcaaaacctgggcatgaatctctctacataccttcaaatcacaagctttcaaaactgaggtgatcacgtagttatcaggcaaaaccgaattgtgaatcatccgatgatacagcgaaactccatcagcagaacgaccagatgacacaaaaccatcgatcatagcagtgtatagatatacattagggttagatacgtaactaaacacgtcgtaggcgtagtcgacggaatcgagagtggagcaaacacggataagttcgaaaacaacgaaagcatcttggtcatggaaggtcctaatgatcttggcgtgaatcgatggaacatgggcaatgttcttgcagcttcgtaatacagagattaatgttttcctgcgtgaaagcctgagagtgtttgaatcgggatcacgccggaaagttgaaggccctccggtgatcgctgccaaggaagaaatcatttcgcgctcaattgaagattctaaaccgttacaattttcggttataattagcccaatccaagtaaaatgggcctgtaacaaaaggcccagttcgttgatgaagataaaaaaaaaaaccaaggaaaccaatttgaacattgtcgagatttagaaattcggtttagtctcacttctataaccaaactccaaaccttccaaaatcaaacttgaggaaaacgaaccgaagctttcaatgaacaacagttacaacacaacgaaccaaattgttcaataaagaaaaaagtgttagattcacttgtccccttggttctaaatagatgttttgttgtataaaaatatattcaatactcagaagtgtgcccttggttcctgattcactgtgccactgtaaccgatccatcttgcttcagcttgattaagctactctctatgtttctaagcacaggtttatagctgcaagaaatcgtaatagaaaacaattaacaagacaggatagaatctcaatggattgaagaaagttccgtgagaaacttacatgcgcataagcccattgtatgcttgtgttgcttgctggagttgagctgagagttggaggacttgagcagataatgattccgctctgctctgttctttcgcaagttcaccctgaaaaaacaaaggcagaatttaacaccacaaacactatttgtgttgaattttctattctaatacttaagagtcggtgaggaccaaaaccttgagggatagagtatcagttccatgcgacccatttgcctcaaattctgaaggccctcgtgaaaaagaaccagcttgttctgttctcaacttgtccagaacttcacggagttctacgttttgcttcagacattctttcacctatgcagttggctacaagtcaacgtaaagtccaagaaaatgtttttaagcaaatgtaaatgtgacaagcttacttgattctcccactgatttgatatgttgattgattcttgatacgaagctgagaggttcgagttttcctcaaatagcttctctatttcagatgattggttgtcaatttccatgagaagtttttgcctactactctctaatctttcaagtgcaacagccatatcatgcaactgcttctcgagtttttctttatcttcctacatgaaaaccatcgaacctaaaacttagggattccataaaacgtgaaagcttatatgctggcaagtgggaaaaatgggttataacaatttcttaccactgaaaatactttttgaccagactctgatacttctgcataataaataacacaaaaaaagtcattgatatgtatccaacaatgcacaactcagtaaaaaaaaattccgaatgactcaaaagcatttagacgtcagttagtgcatccaaacacctgatgatcgtaacagctgcaaatacagacttgctttgaaaagaagaaaaaaaaaaaaaatgtgtggcatcgcatattacctgaggccctgctggataaaactgaaattttctgttccagttcctgcttttcagacattaaagaagctactcgagtttgttcttcagctaaacgatgttgttcttgctgcctcaacactgattctttctgtgtatgttaagaaaattattatcttagatacagagactctcacgaggaacatattatctgtttcaaaatcatacgaacctgtaattctagttttaggttagccatctccttttctaatattggtagttggtctggggaaactcccattggcgacatgccagcaaatgaattacccattgcttgctgttgtatcgaattaagctctgctctaagagatgctgcatcttcctcagcctatcaacaatgggttatggtatcttttaagaaaagaaaaaaaaaaaaagaagaaagaaaatttttaatttggaaggcaaaagattgttacatactcgatattgttcctcctctgcctgattaacacgtctcttaagagtcctaacttgagctgagagatcctcctataaacaaaagctatgcctatcaaaatgcaataaaaaaggagataattttttgcaccaaaagaactaaaacaagtgtattccctactcgtaaaacaacagcagcatctttctccattgcaatttccttgagggcttttctcagagatggcactgtgttttgttcctgtcattcatcgataagagtatatgtcaagacatcttgaatcgtttaccaaatggactgtccagagattcatattgcatgtcaagcctcacaaaccaattagtacaaaaaactaaacaaactgcagccaaccaggactaaataagatcacaaataaaagtttacttgttacttaccagcacattcaaccgagtctcaagtgattcattctcaacttccttcgtttgaagctgaatcccacagacaaatacagtttaatcaacatacaaccttggatctaatatccaacaaggcaaagagatagacacagacctttgaagacaaaattttgttgcgctcctccatttctgcattcttcttctgcagttctttaagctgggaatataaagcaccaacatctgtctgtacaagttattcaaaacaaaccattattaccaggaagatcataatatcagtaaaaccaatacaaaactcccatttatgttcattcatttactcaagaaaagttgaatgagcctatcctcaggacaatatgcaaaatcaaatttgtccataaatcctagaagacatgattcgattaaggcattctcattatcaagaccgtcgcaattctaaagaatccaattagatcaccaggtacaatttttgataagcagagaaatgctacctcagaaagtcgatttccgctctcagattttctgatcactgggaaatctgaaataatgaagtagtcaatcaaaattgcaaagctagtggaaaaggagatggcaaaacattgaaattggagatgaataaaattaccggcaggattgggaatttcactaagatctggacctgaagaagctttgcttagcctttgagctgctctcttttgacgaatctcttccaactacaagatcacagaaattaataacaacaaaaaagcaccgatgtaagaaactgtcttcagatgaagataaagacggccatatcggaaatatccttacagtacggcgacctagagacgcgtggtgcgattccatggtatgattcctctcctcggaatttcgaacgtcgatttaacggtgaggaaatcgccggcgacaaaaatggaatatatctatatttgggcttataggagtgttaaataggcccatggacatatataactctctgaccttgaaagcgagcccagtttttcaatttcaaaaagaaaaaaaaaattgaataaaagttgaaaacaggatgataaaagaaaaccagtttccgacaaaaaaaaaaaaaaaaaaaaaaaaccagtttatgcaattgcaaagacatttaaaagaaaaaaaaacgagaatgttcaaaaaaatcgttaggcgatagctaggagttcgattctaaaaaagttaccaaagtttggcggttggaaacggttggaagttatcaaagcttgaatcatcattttgatttctaagtactttaaacaatgttcagtcttaatgatcgacatcttctaatatgtcacatgataaagtgtgaaccatacccgtttgatgaagagttatataaacatgttttatagattatgttggcaaaaaaaaaaaaaaaacgttttacataataagaaaaaaatgttataatattgaatcctcccaattaacctttgaagtattctataccgattgtttgccttgtttagttacaaaatacacttgaaaacaaattccttagtaaatatttggttcttttcctattcttaaagatatcagtctaacatttctaatattcctataaacatcgtcctatatataacaaaaaataaatttaaaaaggtaagattttgttatgatcaactgattctattaaatttaaaattaaattgaactcaagtctttcacatttcacggctttttaccattttcactactggtgaaaatctttgtagatctaaaccgcgattcaacacagtgactgacataacccatagtcaagctaaattaaaaacccttcgttgtcttacaccgaagagcaaaaaaggttaaaagaaaaagcccaaaagtcgatgactcaggacaaaaaacaacaaacattacgagagagacaaatacaactacgtgtctcgtcgtagatcaaccaccacaacacttacgttgtccgaactttgtctagccaacgcaagcctcgtcagcaacagcgacgcctcctcacacgctttatctggcaaatctcctcctccaaccaccacattcccggcgccgacacctgtcatttccctttccggtgatgatgatacttgaccattgacttttcctctcaaacacattcgaacgacgctacatgcagtttcgtttgaaacaacgtcccaaagaccgtcacttgcgagaataagaaaatcgtctccgttggcccggtccgtcacggttacctccggtctgctgattacatacggcttcaagtaattatctcctgaaaaaaaaaaaaaaaatccgcggcgaaacgagagttaataatcatcattattgaaagtacggaaaaactttgtacaaacattaggatagggacaagagtgttttcgtcaagtgtaatcaattaactgaccaatggctcgtgacattgcaagtactccaaggacacgtgggccatcccagtagataacacgaccacccgctgcttgaatccggtctagctcgtccggacggtctggctgttacaacaaatttaaacaagagagagagagagaatgatatagtcattgataacagtgacacgaaggattaaagaatcttaaaactcataaactttatcagatcctctatctaaaaagtaaaaagtcattaaacattcttaatcgtcgtccaggtgttgcatgcacattaaagaagattctaatttccaataaatgaaataataaataaaaaatgcattaaacaatattaataggtaagtttcgaacgcaacacgtaacgaaattctcgtttcattacagtgagtaaaccataaccgtagatctaacggataaacatttaacgatggataaacgaaacaagagagattatcaaaaaacgaacaaaaccttatgatcggaggataaagcaatggctttgccgttacgacagagaacggcacgtgagtcaccgcaattcgccacgatgattttctccggcgtaaggacagacacaaccgcagtggatcccaccgcgtcgcagtccggcctctgaagctcgcaccggcattttgccgcaccatcggcgttcaacgcaacaacctccatgtccatgcgcgtgaagctacgcgccattgacttttcccagtcagcatcagcttcaaactcttcacggactagctcgtgtagtctttctctacatttcatcgctacctaaacatcatattattaaaattaaaaaccgacgtcgtaacggtcaattaaaggataatttttataataaaacgacgtcgtacatgggaacagccatggccatcgtaaacgccgcaatagtgaaatccggtggatgaatattccgtctgatgacgggaaaaaaacggatgcacagcgacggcgtcttccatttcacgtcttcttccacagactgaagcgacgccgtatttaggataagcttcaggatcaggcaatgccacaaccgttgaactaagagactcgcataggacgacaacttccttcgccgtttcgtaaaacacggtggaggtggaggctgcgacggtggattctcttctcctccgcctctgtaagtcaccgtcgacgaagacaggttcttgttcgccggaaacaaacttaaacctccggatctccattctccttcttctcgctgcttgagacgagctccgttctcgtctcctcgttgtcgtcgttgccttcttcaccaccgtcgccgtcgtttcaatcatcatagtctcgttctcgtaacaaatctcagccatgtgatcgtcaaaactattcaacaaacacactccatcactctcccccgaaaaaaaactagtgaacgagacacaggagagagaagaagaagagaagcttaaacaagattagccatggaagctttatattagcttctttcaccagaagatataaataaatataatcatctttatatttacgggcagatgaccgagacttttgaacgggcagatcaaaactcaaaatcaaaatgaaggaatgaagaagaggagattgttgaatggcgtgacgtatcgctcctctatctggacgacgaaatcttgaccgttgattgtgtccacgtgtaaaacgtacttctcctaaatcgcgatacgaaacacttacgtgcaccaatcaaagtctaacactactcagacctaaagtgaaaaagaacctttgatgacacgcatgcgatctctaaacctctttttttttttttaagatttttaccaagttttgttgtggaaatttaccttaccattttaatttgttttactataaatacaactaattacgtcatcactttcatcacaacttactattacatatggaaatcaaccaatagtttgtttttctttcaatcatttaatataacatgagatctcttaacctcttattttatagattcttaccatattttgttgtgtaaatttattaccacttccatttgttttactataaactatcactaattacgtcatcactgctaatcaattcaatagaaaggttggaaacaaataatctttttatctgagtgaaaactaagatggtgttttaggcttttagctggtgatgacgattcatcgcgtttgtttcattgtgagcgtgacaatacggtatatatcatcgtttctaaagtttggtgtgttcaaggacaaattattatagaaaaaattgaccatctgcgactacgaaacataagagaaaaatgtgataattgtagaatatgtcactacaaatataaccttggtgcgtgaatacttcttagaaacaatttgagactgcatatgcttttttttttaattagaacaatttcttatttgctagaaaagtaagttcaaatttgtgagttatcatttcaacacttgttttgtttcgtttgttttacttgtctggtctattagttttgttctgcatttgttccatttgtttcatccctttttttatgctgcaagtgcaaacagtcagagttttcaaataaatatatttaagagattttatatgggccggggaactaatattcaaagattttaaaggatatcttacctagttttacaattgagatgatgaaaatgaatttgaaaacttattcatggttttaatcttgacaagtgtccggaatattcaatgatttataatcgtgcaatcttatgacttatcagacagttctaaactaattttacatctatttttaaaatatcaccatcttatgtttgacattacaattttcttagttgataagtagcattttgtgaatacaataaaagtgaacatcattctccaatgtttgacacaatattgggtttttgggaatttaaaataaaagcaactgaaaaacagaaatgatcatacgttctacattggacaatggacatgttaaattcgagtgaactatatattatacacttataattttcttttgtgggcaaaaattataagatattcaatcaacaattagaaataaacaaaatataacgttttcaattctaaatcaatcaggaatgacatccaatgagatacaagtacgtagatgggttttggtggaaactggggaccacttctctattactaacatttaacaacgttgacccctctctgacctgttttcttcctcgatgttcgacacgtgtttacattctctacttttatgtcttgaccaagattttttctgtgtcaacattcgtttactatgcattaagtaggatcgagagttgtaatttgggctttaactgttacttacgttacgccgatgaatcttatgtttatgtaatgtgatgatgatattttagttagttagtattaatacaaaaataattcataacctaactaaaattaaggaaagaaagagagaagctcagcttttcgcggaaaattctctgggacgtggcggcaagcaataggatgatgatttgaattatgtgagtcccacatcacagaacaaaacaaaatcaaaaggttgaaaaaaaacgaagcgcgtgtgtaacacatgacacgtgtcctctgaagctgcatagcagttgccaggtttttgaagttgacagtaggcaaatacattgtgccacgtgaaagcttcatctttctttcaaatattattattattaaaatttaacctgaaaacaaattcgtcatcgaccaacaagtcactaaccatcactttcaaatcttatgtaaaaatataaggtgaaaattagttccattaaaatctatgttacttttgttgtttgtttagtgatttcaatatatatatataaatgttggttaactatatcatttgatacttgataggaatacgaaaaaataaaattataactgaaacatggttagttactttagtaggtggttggagagctttcggtaaggagacaatatattgtcctagctagtttgattaattatctcgtctttgttttgtaactttgaattgaaatcttaccaatttgtcgttggaatttccacatcacacatgattagttatatacattaatacaaaatgcttttcttgataatgaacaatgcccgatctcatacatttttcaaactcgatgttgagttatgtgtttaatggattctcctgtttaaatttatttcaaaaccatgcgccaaactcaacatctagtttgaaaaacacaaactttaaactcaaaacacaaatatttttcctattcctaaccactagtctgtaaaagcttaatgttccaatctaaacgtaagttgtttgaaagaaagttcggcaattacgaggaaccaatgaggtgtcaccattgtccacaagacataaataaggtttaactctaaagtctagttttgaggcctaaggagacgcgtgtcggacacaagccccacgttgcggttaatggtcgttgaggtcgcagttaccaaaggagaagtttcaataattacgtggcaaatttgattccgacacgtgttctcccggggcagatttttcctcgagcctgcatggccggcagattgcgtagtctttgaacttttactatgttacgtagtcgacatttgtcaatttggtaccaacctttttttgttttttaaaacaagaatttcgacactcgtaacctatgatttaaaatgatactatatgatcaaattgtcaaattattataataagcttatggaaattggaaaaatactaatcacacaaagcctattgtactaacacaaagccattgtcaaatacacttttttttttctttttccgaatccatgacgaaccatacagttacaaacactaagctacaaatcctggttaaaataattacatatgagtctttgttctatacgctaaatgttttgagaaaatgattgctgtggtttggctaaaccgattcaaacaaagtcgttgagtatttctcctaaccagtaacctcgtacatataacaatatatatatagtatggtgaattttatatttctttcagatgcaagcaatatggcatgtgaaatttgaccgttgagtttggtgaggttgctcatctgatctaatacgccattatattatactaatttatgctaattagtttaatcaaaagattaaatattcctcaatcaatgtttaaagatgccatctttccagatcaccacgtgttaatcaaacccgacattttgcaaaacaatttcaaaacattttataatttggaattgacgactgtccggggaaaaaaggaaaaaagaggagtaattaaagggacataaaaccaaaaacaggaaaattccaatttcttctccaccaaaagtttaattgatcatgctttccgtcacgacacaaatgacacatgtcgatcactaatatatacaaattaaaagtttaatagatttatatgcttaagaagtaagaacccaaagtatgaaaggcatgcttcgtgtcgtgataagcattttgtcgaatatcttataaatcatttaaattttagtattttaatttttgtaagtgttgtttgtttaactggtatggtgaaaactggaaaactttccaatagaaatgtgtttgaaggtcacgactcacgagttcgagttttaattttagaaaaagctaaatttctccaaaaaattggtgatctcatgttattggctgtttttcttcctatagtctaaggctctaagcctgttgaatgttccattctcaataagtaaggctaatgttattcacttaatatatcagcgtattcttagtatcttaattaatgacgatgttaattagcacagtaacctaaacgacgtagttagagattcctcatttgagcccaaaacaataatacaatttcgtacactcaaatattggcccaaattccaagttttgttacataacatttgactgggccagtcattattaatctcagcccaaaacataaaaaatatttgtaccctatataataagatcgaaacggacggctgagattgcatcctatgttttgcagttttttgagtcggtcatcgaatccgaaaagcggaaaaggctttctcacgtaataaattaagcttgtagagggtagattcgtaactaagcagcgtgttttccttttttcgggttgagaatcggacccagaacagccaattttaattccgggtcgggttataaacctctatatatatggtaaagcccgcttctttgtcacccgcttcacgatttcttcttcttcgtcgtcttctctcccaatcgtccaattaagctctgctttcaatttctcctgcgaacggtaattatataactctcaatcaattagggtttcaaggaaaacccccaaactcacatcacctttgagtgaattgtatttatactctcaattaggttttctttgaatcgtatcaagatggtgttatcaacgagcgatacgagtagctcttacaactatgttatcgatgacgttatcaacaagtctcgatgcgatcttgtctacaatggagaacttgatgagagtgttcttagccaaattcaatcggttagtttgttaactcctttgtaagttagggttttaggatgattcagaggattttctgaaactgattgaaaaaactttatgtctatagatgtggaaaacgaagatgatacaagcaggagccatgagcggaacaatcgaaacatcttctgcttcgattcccaccacacctgtgatagtgcagacgactcttcagactccggatgcaattcctttacctgagaagaagatgtctccaaagaaagagagtgatggattttattatattcctcagcaagatggagcgagagatgaagctattgtcgatgtagatgagaatgaagagcctttgaacgaggatgatgatgatgaggaagatgatatcgatgatgatgatatgaacattcaacatttggtcatgtgtcaatttgataaggtaatgatgatggctatatagttttctagtggtacatatttactaacaatgatggacttgaaagttgaaacttatacttcaacctacggtgttgcaggtgaagcgttccaagaacaagtgggagtgcaaattcaatgcgggtgttatgcaaataaacggcaaaaatgttcttttctcacaggttagagactaacttctacacaataacaaaaattgtgaagatttcactttggctaattgtatcctctaaatttatgcaggcaacaggagatttcaacttctagaagatgcactgaagatttaacctcttcagaaattgcagaacgtattttggatttgttccaacaataatacttcttttgtaagggatttattgaatggaaattgagaaattttgactataaatgatcaaaatccataaacatgaagatctctcaatgcaaactctaactcaacaaaagaatgaataaagcttttcaaattttcaagatcaaaaacgtaagtaaaatcccaatcgaaagttttgtatcttatgcagcaccagcattcttgcccttcttcttttgaagtttcttcatgtagaattcgagctctttaccttctaatatgtacctgtttcaaattacacaatacaccaagatcagccttcttaactcagagaaaacactgattaaagatgtgatgatttcaatccaaaagatttttttgtttacccatcagcacgaccacattgtccgggtcttgatgcgatacatgcaagtaaccttccactgctaaactgctcttcaaggtgcgagtcaagtgctctgccttcttgtcgcatctccagcttcctttgaacatgattgctcttcttcacttcctcagtggtaacggcctctcctttcttcttgcgaccaatatcaactccatagtgttggagatacccttgcttgaatggagcagcatcaacttgaacaatagcactcttcacaagagtttgtgtacgaacaagctcattgtttgatgcattgtacgccacatccaagatcctagtcttgcgggtcacagcttcacttccccacgagaagtttccagtatcgagcctcaaagctcgccactttacattcccaccacgcacacggatcctcctcaccgtcttgttacttgacagcttagtgttagctggttgtcttccaagctcatacctttataagagataaccaaagttagtttatgtgatcatcaattttgcttcaaccagaagttatacaaagttatcaagcatgtagaaacaaccaaaattaaagaacaagacaagctcatgattcattttgattccaatctactctatgattcaatatttaagcaggggaagattaaaaagcttactttcgcttcttcctccacattttttgcttaccaccagtggcacgtctcttgtgaattgaatcacgagagatacctgcaaaacagagaatcaacaagtcatcaatacaccactattgaagaagaatttctcgacattgatgctagaaaggttatatctttgccagaaatcgaacgagaaagaaacggaattgaaaatgtacccatgatttcaaaagcgtttgattcaagcttttggttctcacgagctttagaggtttaacaaatggcggaagagtaagtggtgtctcgctataaatagtttactctgccaaacacaaacaaaaaaccctaaaacgtcaatttacaatcgtgtccttgctttaaacacaaccacacattaatggaaagaatcgattttttaaaaataatatcaggagtcaaaatctcgaagatgagagataagcgaccaaaattagcgggagaatcctcacttgtctcactccgatccgatcatggctttcgctgtctcggttcagtcacatttcgcaatcagagcgttaaaacgagaccacttcaagaacccttctcctcgtactttctgctcgtgttttaaatcgaggcctgactcgtcttaccttagtttaaaggaacgtacttgcttcgtttccaaaccgggtttagtcactactagatacagacatatattccaggtgaaaagcaattttctctgattttgatttcttctaaaaaaaattcaaaagttttgatttttccggttttggttcatggttaggtcggagctgagacgggaggagagttcgccgacagtggagaagtagctgattcgcttgcttctgatgcaccagagtcattttcttggtcttctgtgatactcccgtgcgtattgatccttctcgttaatttgaatttaactgttcctgagtaatggatttggattgcctgtgtaatgatcttgcctaatgacttaatctcttagcaatgccttatgtatcatcaattatagaagatagaaaattagttatttgcctagattgcactgatttaatagtaatttacttgaatcgtaggtttatcttcccggctttgggaggattattgtttgggtatgacattggggctacctccggtgctacgctctcacttcaggttattttaaagtatctattttcatctagttacattttagctttcagaattttaacattatgtactgtctcatatggtcttgaacagtcacctgcgcttagcggaactacatggtttaacttctcacctgttcagctaggacttgtggtatgttatttggagatcgatattttctgtagttaagccatagagttagcagaaaatgatagtttttactgcattttgttgtgtaggttagcggatccttgtatggagcccttcttggctcaatttctgtctatggcgttgctgatttccttggtaagtcttgtttttttgggttgacttctcgttcttcttaactgaatgcaagtatctcattctggttttcttcacatctttatgaaggaagaaggcgggaacttattatagctgctgttctctatctcctcgggtctctgatcactggctgtgcccctgatcttaatattctcttagttggaaggcttctctatggctttggtattggtttggtgagctccggaaacctgaatcgttatggtaatttctttgttacttttgttgttgattgttagttaatgttttatgtaaattggttttgcttgataggcaatgcatggggctcccctctatattgctgagacatgcccatctcaaatccgtggaactttgatatctctgaaagaactcttcatcgtattgggaattttggtaagtgtctgatgtcaatctcttcccagtatgatttctgcgtaaatattgatttccttcttgtgcagttgggtttttctgttggaagcttccagattgatgtagttggagggtggcgttacatgtatggatttggtacgcctgttgctttgctgatgggactaggcatgtggagtctccctgcatctcctcgctggttgctgcttagagctgtccaaggtaaaggacaattacaagaatacaaagagaaggccatgcttgccctcagcaaattacgtggcagacctccaggtgataaaatctcagagaagttggtagatgatgcctatttatctgtgaaaacggcctatgaagatgagaaatctgggggaaacttcctggaagtattccaagggcctaatttgaaagctttgacaattggtggaggtttagtcctcttccaacaggtgattcttcttcgctgtttccatttggatgaatgtgtgagcatttttgaaataatttacactctgcttcgttgtgacagataactggacagcctagtgttctttattatgcgggttcgattcttcaggtatgctcgccttaacattgaaatgaatgagattacctactaatttttactgcctttagtcggatgtttaatgagactttatgctcacttatctattcaaagactgctggattctctgctgctgctgatgcaactcgagtctctgttattattggtgttttcaaggtggccctttttatttttttgtttggatgtgtaaatatcttattttccaacaagcttccagttattcaatactaacctcttcaattgataacgctctcgtagttactgatgacatgggtagctgttgcgaaagttgatgatctcggcagacgacctttactgattggaggtgtcagcggcattgtatgaattcattttatgtctatatcttctgtttcttattttccaaagaaaagatatcatttcttatatttcttccaaattccaggcgttgtccttgtttctactgtcagcatactacaagtttctcggaggctttccccttgtcgctgttggtgcactgcttctctatgttggttgttaccaggtttgtactctagctcactgttagctgtggctacatagttttatctagcatattactaaagtctcagcgcgaacagatctcatttggacccatcagctggctaatggtgtcagagattttcccgctccgcacaagagggagagggatcagtcttgcagttcttacaaactttggctccaatgctattgtgacatttgcattttcacctttaaaggtatatttttctgttcctgcttgttcaacccttgaagttattagtaactcttatcaaaatatgcattctctgtaggaatttcttggagccgagaatcttttccttctctttgggggcatagcactggtatcactgctgtttgtaatactagtagttccagagaccaagggtctcagcttggaagaaattgaatcaaaaatcttgaagtgaaacgttgaagaacatatttgttatagttgattctggtgaaatacatgtatgaggatgtgactattctctttgtaacataatatgtttcgtaatcaatgggaaaaccaaacctttttcatgattattcgagcagtaattagatatttttggtcggggatggaaacgacaaaaaccgggaggtaagcattaaggttttcactaagcttaagtcggtatttccctctctctgttctaagttacatttatgggctgtttcatttggttaatgaaaaacgataaaacatcctcctgctcagattaacatgcctgcagagctggaccaagcataggaacgaagagttgatttggctaacatcagcactggggatcacataccttctgttcttcgacctatgtatgtaaactaccattgtctctctctctctccctcagtaaatgtatgtctttttcatggattcacattaaggtgcaaaaaggcgaagaaatggtaaagaaacgttggaaattatagcattcttccactgattttccaggtaactaggtttatggcaatgtttttgctgattttgtaggttcttggggaaagcatgtggggttaactagatgcagtctctgtacagtgtcaaaataccgatcccagaagtgtctggaggcatttaaggcaatatattatcatttccttgaaaagaaggtatgtgctcatggcttctaccgcaaacagagtagcccaagcatcagtatcatctccttccaatctgcatcgacacaccaacacaacccctttatgatgtcaaacttttacgaccaactgaaattaaaatttcttggttaaacaataagtcgttgaggttcatatggtatcaagggaatataaagaactgatgtttttatagctaatttccctgaaattatatacaaaagaaagaagtttactgaggcaatagatttgcaaacatcacatcatatatacaatcattcacactaaaacacacataaatgtagtagaaaagtactttcttgtagataaagcagattgtgttgcatgccctagcgaccaccaaataggactgtaacatcctcaaatgagaaattagctgatgaagaggttgttgtcatttgtgttactgtttcatggcttatattgggtataccaagtgcaacagtaccaaacgatatagctggaacacttacatttccttccagatattgtaatatctgtctcatactgggtctgttttctgggttgatctgtgaacagagcattcctagcttcaaaagaagcttggcctcctcaactttaaagtctattagtttgctgtcaacagtatcagttaaagcatctcttttcccgcagctcgcaacccacttaaccaaaatcacctgctcacgtggtgcatctgggtctactggtctccttccacataccacttcaaggataaaagctccaaaagcatagacatcggtacaagtagtggtgactcccattgcagtaagctctggtgccatgtagccaatggtacctactacccgtgtggcttcgagattcacaccacgatcatggaacctggctaacccaaagtctcccaactttccatttagatccgcatctaaaagaatgttgctagcttttatatctcgatgtagtacaacttgttcccattcttcatgaagatacagaagggcagaggcaactcccttgattatattgactctctgagaccaagtgaggtcttttagcttgtttttatggaacaaatagtcatcaaggcttccatttggcatgtaatcatagaccaaaagcaattcacctttccttctgcagtaaccaaggagatgaactaagttcttgtgccttagccttcccatactagcaatctctgccacatactgtttcattccttgctctgcatcatggtagactctcttaaccgcgatttgtgtaccagaaggaagtattcctttatagacttttccaaaacctcctgctccaagtaactgattctccctgaaacctttggttgctttgtaaaggatcctaaaggagtacctttgagggctatattccttttcccattgttcaagcacctctgcatacttctttttcttgtaaagatacacaattcctcccagagttagaaaagcaattgttgatatggtagcgcctagaacctcttttaatggaaaccttttaggcgatggtggtggattcgaaagtcttgaaatgtcaaggctttccgcttttccgccttgcttgaaactccatccaaggatatactggttacttttgattgagcctgtagaaccagaaaaacctacatacatcgtctcagtgaaaatttctgaaaggttgatggatcttgacaagagtggcacttttggtttaatgaagcttgaaaagtaaggcgaatcgggctttggagtttgtactggagctaacgttacgttgagtactttctctattccatcataatctatccagaccagaatacttttaccactagcaagcggcagacttatattctttccttttctagcattaaagtaactagcgtccgcagattcaactgaaactatactgttaatatcaatacccacatcgttaccacctttgtcaaatgactccgagttttgattagtgtcaagttctacagcaaagatatgggttgcagtcttgttatcatttgctctattgaaaatacctaaatttgaatttgcactgccgttagacctgagatctttggttggagataccacaaatgccattccgtgaccgtaggtagatttttgcagcgggaagattgcaaagacaaattctgttgagaaggaaaatgaactgagtgaagacgctgtgaacttgatgggaatgttgtagaaagcgtgaccggtgcccgtgtttgtattatttgttagatgcaatggaccatggtttgtatttgccattccatcgagttccagatctgcattcctaaagtcataatacacaaaatgatctccctcttgagcgaacaccaaaaaggttacatggataccaattatcaaccagaaaaccactgatcctagaactccagccatcaggaacaacgatgatcttctctccaaccttagcttgtaaatctcagattgttctgcacctttttttcttaaccatgagaattgtgttttctgacttcagaaaaccctgagttgacatttggaagacactataaaagaaaagccaagaaagattctttccttttggattggtaatagatcaatgtgcctctgtcatcatttagatgtttcttacagttttgtgggtcaattactttggtagtcttatcctcaagacaacaagtcatgggtacaattctctgtgcttttatttttttgcaactttgcttgttactttcttgctgatgacgagacagaatgtttcagctttgactgatttgttttcactagatagtagatacaccaatgtttgtgtcaagatgtagtaattaatctgcactaacactaagttgatattatgacaaagcatatggttaaatgaggttttaactagtcagggtcaaatgttttcagattggacattctatgtttaaactatgttatcctacatacgtgcacatatctcttattctgagcatttggaatagtagtttgaacaagttattttaaaacatactctaattcaagaaatgctctagttgcatgtagtttaacttctttgacttgctcaatgataatgacaatgtttgaaatgatgtatatatgtgatgtgagtaaattctgaattagcttgcttctctttcttctttgtttatgttgaagtctcctgcagatgacaatgggaccctactctgctcggcaattacttctcttatacacttaggataagatattctgacctggcacaaaaagcatagattctcaacggaagaaagcagaagacatggttgactttttgaacatttctgaatattttaattaccttatttgattgtgatctagtggttttcttattttctctgagggtgaacgcagggaaaacatctgaaatattataaccaaatagttaaatgtgaaggtggaaggattgtcagtatccattagagactagtgacattcatcactaactctcttgcacagttcgcaaacagacacacatcacaatacattcatttacatcaaaaggtacaatgattttggcataaaaagaaagaaactttcatatacaatcattcacttaaaagacacaatgttgtagcaataacaaatagctttcttgtaagtttagcagactgtgatgcaggcttcaacgaccgccaaatagtattgtaacatcttcaaaagagaaattggccgatgaggaggtggctgtcatctgtgttatcgtttcattgcttatattgggaataccaaaccctgctgtatcaaatgatatgcttggaatagtggcatttccttccagatattgtatgatgtgcctcatactaggtctactttccgggttactctgtgaacaaagcatgcctagcttcagaagcagcttggcttccttagctttaaagtctcctagtttactgtcaacaacatccatcaaagtatctcttttcccacaagtggcaacccacttaagtaaatgcatttgctcaggtggtctatcaggttctacaggccttctcccgcaaaccacctcaaggatgaaagatccaaaagcatagatatcggttttagtagtggccactcccattgctgtaagctctggtgccatgtagccaatggttcctaccacacgcgttgcttgaagattctcgccacgatcatggaatcttgcaagcccgaaatctcccaaccttccatttagatccgcatctaaaagaatgttgctagctttaatatctcgatgtagtacaacttgttcccattcttcatgaagatacagaagggcagaggctactcccttgattatatttactctctgagaccaagtaagatctttcagcttgtttttattgaacaagtagtcatcaaggcttccatttggcatgtagtcataaaccaaaagcaattcacctttccttctgcagtaaccaagaagctgcactaagttcttgtgccttaaccttcccatactagcaatctctgcggcatactgtttcatcccttgttctgcattatggtagactctcttaaccgcaatctgtgtacctgaaggaagttctcctttatagacttttccaaaacctcctgccccaagtagccgattctccctgaaaccccttattgctttgtagaggttcctaaaggagtacctttggggactgtattcattttcccaatgttcaagcacctctgcatacttcttttttttgtaaagatacaaaaatccccccaacatcaacagaaaagcaattgatgttacagtaacacatatgataataatattcttagagtctttagaccttgaggttggcggagtgggaggtggcggaggaggtggtggtggagaggatggtggtggaggtcgattaggaggatccaaaatctttgacaagtcaaggctttctgcttgtcaacctttcttgaaactccatccaaggatatattggtcacttttgactgtgcctgtggatccagagaaacctacaaacattgtcccattgaaaatttctgaaatattgatgaatcttgacaagagaggctttcttggtttgatggagcttgacaagtaaggcaatgctggttttggagttggcactggagctaccgttacatttagtagtttctctgttccattataatctatccataccagaatacttttttcactagctagccggaagcttatgttctttccctccgtaccgctaaagtaactagcattggcagagtcttctgagatgatactgttaatatcaatccccacatggttatcactatcttcaattgcttcagggcttgaattagtatcaagctctacagccaggatatggttttctgttttgttatcattttttctattgaaaagtcctaagtatgaggctgcatcaccactatacctgatgtccatgaaaggagctaccacaaacgccattccttgaccgtcacctagcaatggaaagattgcgaagacaaactctgtcgaaaaagaaagtgaactggaaggtgatgttgtgaagttcattggaattttccagaaagcatgaccggtgctcttagttgtattatttgtaagatgcaatcggccatcatcgatacttgccatgccgtcaagatgcaggtctgcttgactgaagtcatggtacacaaattcatcccggtcttgagctagcaccaaagacaacacctggacacatattatcatccagaacctcagtgatcttagaactccagccatgtagaacatcagtgatcttctctcccgccttactttgtgaatttcagattcttttccatgagaattgtattttctaactgcagagttgacctttacatggatggcacaatcaaagaatagccaagaaagattctttcatatacaacggtgttgtttaatgcgaggtttaattagtcaaggtcatatgttttcagtttggatattctatctttacatacgtgcacatatctcttattctgagcatttggaatagtggtatgaacaagttattataaaacatattctaaatcaagaaatgctctagttgcatgtagtttaacttctttgactttctcaatgatggcattgttttaatttatgtgtattctgaatgagcttacttctctttcttctttgtttatgttgaagtctcctgcagatgacaatggagtttctatgacctactctgctcggcttttacctctcttggacacgctttagataagataatttgactaggcacaaaatgcatagattctcaacggaagcaagcagaagaaatgtctttatttctgtcaattgaaaagtgacaagaaaaccacaagacaaagttttgacttttgaacatttatgaatatatgtttactaacttattggattgtgatctagtatttgttcttttttctttctctgaagataaatgcagggaaaagctgaactatattaacctaatagttaaatgtgaagggaaatgattgtcagtatccaatatcccaaaaattcctcagagtgttactgagcatatgacaaattatgagattgtccatgaatcttttcaatcaacaatactgacaagaaaactgctaaatgggaatctaggataagttgaggtttgaatagaacactcaaaacataaccagcattaactagtttgggacactcattgagtccaagatggttgcaatcttgcttcgaggagacctatgcaagagatggcgataaggcatgagcctattcaccaaaccgtaaaacagatcagccgtgaggatctcatttgttaattccagtgccttgcacaccacaaaattcccgtactcgctcctcgccaaccttatcaacatctctgtcttgcacgccaacagatccagaaccactgttgccattggtacgtcccccgcctccaaaagccgctccacgatgtagcttccatactttttaaacgagagctcgacgcagtagccacatagtttatcagcaatgttacgcgtgcaacgggagtcacgtagtttaagcacgtgttggaccacaaagttgccataagcatcgttgcttagcaaaagagcgttgttcgcgactatgtcaaggagctggtctctgtagtaaggatcgtccaagtcggttatgatttcgttgagcgcgatgcaaccgtactggtcacccgccaggaaacacgcgtatcgaagaatttgatcatacatcaactctctcttgtcctgttgaaaaactctcatcccctgtatcgtcacgtaggaggcgtacttgtcagtcatgacatggatgaagaggcgcatgatagcctcaaagaagaagacgtccatgtcatctgacattcccatgagtttctgtagggttttggagccgttcttgtttgttgtgatgaccatgaagtaatcgcagtcagacgtcattaaagacgccatccacataagcgttcccgtgtctaatactgagatgtcgtctttcaaatcttcacttccagtcatgaagttgaaaatcctttgaatatccatctccgctttacggatgtggaataaggaatagccgccacgtgaaggaggagaaggaactgtcaaaggctcctcattcaggatttcttgtatagtattgaacattgtcgacattgaaaaggaattgttgtttgccattgtattacgtcgatatacagaattactctcaaaagttagaagaagatttttgttgtgtgattttggagaatgcgagagatagtattgttgtatcgttatgatgggtatatatagagattttcgttcccttctcctgacttctcccataaggaattggaaactgtattagtaatatccgctcaacggttataatcaaatcaaatataaaatgtatatatggttagtttttttactttgttttctaactaattaatcatatccaaatattaccatatcacgattttcctttttcttcttttacgtctagatgctattgtttgatttgttcagatttggtttccttattcatatctaaatattttttttttaaaaattgtatttattttagttactgtaaaacgattttaaaactgtaattccatgagcaaattaagtgaacaaatttcattaaaaccacacaaataataaccataccacaatatactgaaaaacaaagaagagccattcctcacaaggagacccattcccaacttatttttctacgaacaaaagcaatatgaataacacatgagaccaaacaaaaacccaccactttgtagtataatagcatcatcatataactcaacagctgacaactctcgtgaactcaaaaccgtctgtgttttcttgtggttttagtttcttgggacgttaagccttagtcggaaatcttcttccatgagaggaagtccttctctgagcttcacctttggctcccaacccaacacttctttggctttactaatgtctggtttcctctgtcttggatcatctggtgtgttctccaccatctttatctctatgcttgggttaataagctgcgtttaatacaaacacaacacacattaaggaaccaaaacatgaactaaatgcaggatttatcacagcttttagagtaaaccgactctaacctccttaaccgtctcagccagttccaccattgtgaactcacctgagaaacagaggggttttagaaaaaagcaaatgaaacaaaaacaccacactctagttacaggggttaaggtaaatgttggaatggaaaggcggacctgggttaccgatgttgatagggccagtatcattgccttccataagacggataagtccatccaccatgtcggagacataacagaaactgcgggtctgtgtccccggtttctgaactgtcaatgcctcacccctacaacacatttaatggaaacacagctaagcagagatgaaacaaaacttggtttcaatgaagttgagagagctaatgactttaccggagtgcttgagcaatgaagttgctcacaacacgcccatcatcgatgttcattcgaggaccatatgtgttgaagattctagcaatgcggatttctacaaatgacaaacaggccaatgagaatcttaaaggaatcactggataaagaaaaaagtgatgcagtgagtttagggaagtagaaaactgaccaatgccatgttgtctgtggtagtcaaacatcaaggtttcggctacccgcttgccttcgtcatagcaactccgaaccccttttgataatagcaaccaggttaagtttacaaagctgtaaaaactgaaatgcaagaagattcctctataagatgagaacatttgaggtttaccaatagggttgacatttccccagtagctctctggttgagggtggatgagaggatctccatacacttcagaggttgaggttagtaaaattctgtttcgaaaagaacaaatagttacaaagccgagcattttgaaagaaggatgtgattagaaaataggaagcagaagatgtcctgaaccttgctccaacacgcttggcaagaccgagcatgttgagtgtaccaatcacattggtcttgattgtctgcataaacatattagatcagtaactaacgattctgattatatgaaggtgatatgagaatatatctatattcacacgaaccttaacagggttgtatttgtagaagataggagaggcaggacaagcaagatggtaaatccgatcaacctcgatcaacaaaggctcggtaacatctgtttaaagcccaaattccaaatagagatcacgatgatggatcttgttgacatgaacaagaagacgcttaacaacaaactgagagtctcgagaccataccgtgacgaataagttcaaacctggggtgaccgatccacttcttgaggttttcttttgagccagtgaaatagttatcagcaacaaccacctgaagaataaaacgaaaccttcaaaaatatgatcaaacttgaaaagcatgtcaattttgtatacaaacctcattcttctcattttccataagcttatcaaccaagtgagaaccaatgaagccagctcctccagagatcaagatcctcatattgggctacacaaaacaaacaagaaaaaagtaaactcatataattacataatcatccttgagtcacaacagatcaaactaataaaaccccaagatctgattctgtaaaatctatataacctacaatgatacagaagttctcacacaatgaagccagcaaaaaagggtcagatctaaatggcattcgatttcaaggattcttcattacaatgccaaagagatcaggtcatttacataagatccttgtgacacgaatgctttcccgatcgcatcttaatcaacaaaatctaatcaaagaaatttgcagaaagattttacctgacaaaacttggaattgcggagaggagaaggagaaggaggaggctttgtggtgttctgtttctcacttgtagctgccattgcttgagagagagatctcaatcctgagtacgcattaaatgtcattgaaaattgtcaagaggtaaaaaccgaaactttgctaaggacaagattgggaatttcgtttagatttttaccagaagcttcggggaatcgtagaagaagagcttgaaaccaaaatcttctgatctgatgtctgtctgatgagaagacaagacaataagagatcgtctacttatagtcctaggtgtctgaacttcaatctaacaaataacaaaatcgaagaattttttatttatttcgttctgttttgtttaaagaaaggaattacagaaataattttaagttaaagaagagacttcaaatacacgaaatgcggaaattaactaattgacgttagctactaaatcacgtcaacgtttgacctaacagatatcttacgtggcaatttgtttactttttgcagattttttttttttttttttttcacatacagctttttattttccatttacagctaaatgacgtggattaagctagacatatttatctttatactttttttatctgtaaatctgtaatcgaattttgtttgtttttttaaaaattttttgaaaattatagtatactcttccttgtattttacatctattattttagtatctattaataattgctatataacgatcgatactacgatttacataatagtaaacaagtcaacaacttctcaatcactttgtttaacaatcaatcattcaccatcaaccctcctaccatgtatcatccaccattgtctccaaactcatcatctaccatccatccaccatatttagttttcatatacatatcctagagaaaatactttgaaatgtgagtagttataataaattaattaaattattttttggaatattaaattaacaaaatggacaataataaacatccggggaaaaaacgtattaaagatctacaagatttgtgaagacataattttttttaagagatatctatcaacaaactcatttgttcaattgagtaagacttacttttggttaacaccaaccaaactagaagtatgacttacgttttatcaacactaagcacatgatttcaatttgacatctttagtcgtcggatcattgttaactatatattggctctattgacagaataaaaagcagaagctacacttcttttgtaaaatgaataattgaattcacatctttagatagtaagattgtgtaagttcttagttacttcttctaccaagaaaatgaagacctccggataagtcatcaagctaatataacccaaaggttctctcaagtttgcgaatcaaacattggaaaggaaatttggctcaaacacattcaaatgacattgaagtggacatcaccctttcgctaaataagaatctcccattttcctttccaatgaatttggcttaaacccactcacattgaagtagacatcacgcagtttccatactttcaatataaactgcatgccggtttttattggataaaccggcatgggttgtgatgacaatgactgtgcaagtacttatgaagctatagagagggaaacaatgtcattccaagcgcaatggcagaagttccagttcaaaacaaacaaactgtgaagtgtaagcagcgcaaaatcagagagcaaactattgctgatattataggtttataactttataagcaaagaagattcttaacaaatgaaatttataattttaataccagtttctcaagaacagcacttttctcaaccaaacacctttcaaaacgctctggttctcgaacgcgacaaaaagagatgtaaaccgagttataacaagttgcgtttcaaagggtttcagataggaatatgaagaacttttgattgaaactccagagatctcaaaggtgtgaagtttgacgttgatcaaaacatttcttgagactttctgacacaacggctcactttcttcttgaactcatctctcttatctcgccattctttctgcgcaagagaaaacacacaaaatccataagcatgttctgctcttaattgcaagctatgtgcgataaatcgattgaaatactcacggcagcttcaacatttgctggagactcatcgttaggaccagaaagcattgatatgatactcaacataatactctcaacctgaaagcaccataatttgtttcactacggcatgaacatctgagacatgaaataaatcacctagagatccctttatagtgtctgaactatagtaactctaatcatagaatctactactatgaagcgaacaaaaatgaacaaactcaaatcaatttgaacatactgtatgaacaggagtccaacgctcgcttgcaagctcataaccgctaggatcatcaccgggaggatgaagaatagatatgcaaacacgaccatcagaataaactgcaggacaaatataagtaaaccattcaaacgtctgtcttctattcatattcctttgaatccttccccgatcaaaaccgatagagagaaaactaaccgttaggatgccacatatccgaagtaaacctcacggttggcggactattcggatagttttgcggaaatgtcataatcgcgttaaagaatcctccttcactgcatttttacaccaagttttaaaccatatgcacaacaagcaaaatctttggtaactatcatataaagagcattgcagataagggtaatttcatctttcccaatacaatcccattgacatcaattcgatatctcactatctgaactatatataagaacaaacctaaatcaagaataaaaaaaaattccgatacaaacaaagagagaatacgaaaaccacacaattatgtgatctacaatgttcaatctcaagtaacaacaattacatatgaatcaacgaatccgaaatcaatgaagaaaaaaaaaaaaaaaactgttccacaagaatcaagaatcagaaaaaaaaaagtagctaaaaatctaaagaaagcaaaaaaggaagagagttgtttactagagagtatcaggaggtccgataatggtaacgctccattcgaatatattcttctcatcaacgagaccagcagagaatccatcaacaggatgcttacagagatctgaatcaaacaaaaatcggatttagagaagaacataacaatcacaagattgattttggtaaggagagagattccaagggcttgcctttgagttgtttctgaaggagaaggctagcttgcgaagccatggatgatgatgatagagaaatcgagagaattgaaattgagatttttttaatatgacaaggttctgattttgtgaattttcgggaatcgatgttttcattatgagaacacatggaaagagctgggatctgctacgggcatacctattttctactttactattctaaccaatagggttttgtgacttttccactttccgttaacttccgaaaattctaacaacgattgtagtttaaccggttttgatttggtttttacagattttcggttcagtttcggtttagtcagattgcaagaaaaaacaggtaccaaatcaaagatatcaaaattcactgttatgtgactagaaggttcatatatcacatgcaagacaaaatcaaaatgcgcatacttatattttttttttgaaatgataaccaattatgttgagcacctatttttttctatttgtgtaggtgttgccaaatagtttggacctatttgtctaggtgttgccaatgttatgtcgataaaaggatacctgatggttttttatttttacttttcaaaacattcatttcgtggaaccggttcaactactttaccttgttagtaacatacatataagaaaattgttttaactatactacataaacacaatatttaaaataataaaaaaattgaataagatctactaaaccggagttgaaaattatatcaaaccggtacatctactttttacatagatcgggatcattttcatcaaagaattacatttttattaatagaagtcatttagaaactatatgtctatatctatacataagtttggattcttttgataaatattgagatcaaatcaagttgccatcatgagtgatccagagtttctgtataaagggccataactaaagcacgttaatcatgttcattatattgtcgtgacccgtaaattacaaaatacaaatatataatgaaccaaaaactttcattttaatatattaaaaaaaaaaatttaatccaagttataaggatagtcttgtcgacatagtgcaaactgcaaaccaatcacaactcacaagatccacaacacgattgatcatagtctttacatataatcccaaaagtattatgtatcatcattataaaccaagtggtataaaactaataactttatttttatagatcgatatcgaaagttccgagaggatacattttaaagaaatggtttggtaatgcgagcagtataattacaaacatacataacggtaattccctgaccaggaaaacgagaccgacaaactttgctggtgaaaaaacaatatcacaagagacatacaaataaaaatatgataaatcgtggtggatttttaaaaaagatttcgtggtggttataatgacacctaaatgattatgacaaagaaaaagcttaactgaaattgaaatgaaggcagcaaaattttgccgacgtatagtatgttctcaagttatagtagtagctacacgaagttgctataaatgacattaaacttaaatcaggtttaattgctcggtttggtccggtttttattggtccacatatgaactcaatcggtggtaataggcaaacaattcaaaagataataggttctagataccaagaaagtaccaataaggtaattaacaaagatcagctactgtatatgatcactaaattttggtatttcggtttggaaacataccggaaccgaatatcggattgtcatgtaggccgaaaaacagaaaaatctgcacagaatggaaaatataagaaatatgaatgaagttgtaatgctttactctatttctacagacagtctaatttcgaagtggaaatgtcatggcataggattccaagaaatgacattttaaccagagaatcttacctggtttcttcaagctaggtaatcattacgattctccaagggagtaccaactagatgtgacaaaattgttgtattgtgcgtgttacacatccaatatatatatgatgcagcatcctatatgaaaacaattaattagctaattctctacataagaaatatgagaagacatgatatcatcatcaagcttctccttctcatgtgtcttcttctcagcagattcgtgactcgggaatgtcaagaaggtaatctcgttactcatgtgtgtatgtgtttagcttgcttgaattacaacttagagataatacaaaaaatgtgttgaaaaaattgagggcatggttctttgccctcttacatacgtttccctgtcttttgcttgtaatagtccatttcaagattggacctgcaaagatcatcgcaaaaccgaacaacgcaagagtgatgccaacatgggtaaggagatccaattttgcataaacataataacaaagagagcattactagctataagatattttttctggaattagggcgaagaaaaaaagtggcataagcacccctcgggacctaacccaacaggaaatcgtcacccaccggtcaaacactgagtcgataacagcgtaactgctgcaaccaaaagaatcttacaagacaatgcatgatatatcttttaaatgatgtaataataaggagtgaagcagtctatgagatggagagtacttaaaagttacagatccaatgtttgtttaacatatgtactctgataaactatgtcattcgatgaaataattacaatgtaagagttgttatcaaaacagagcaaaacatctgaaaaataactagttgacttgtttattcttattcaggataagtttcttattaatcagtttatattgcagtcgctttttccattttcaatttcacaaattttctgttaatttctcatacagattgtgtcttgcgacctaagaaacgaaaaaaaaaaaacctaataaacgcacaacttcagaatgctaatctccaaacatgaggcactgaaagtaaaactagagatgaagtgaaataactttggtaaacatttgacgaatactatcatagcgctttttccgcaacagagattgcagaatttggtttgccgatggatgtatcgccgcccaaatagtccaccggattcaagaagagacaagagcgtaaactgaagaatcctcctctctaggatcggaaacctccgtggttgagagtacgaccgattcacagaggcgataatgatgtacgaatcggatatccgatcggtgtcattattttatttttgccctaactcgaaattaacttttgactttttgagtatttgggatttgatttgttttatattttaattgataaaggaattaaaaaaattatgtattcatatacgaataacttatgtcaatacaaattcttgaaaataattctctttgaagtcgcagtatacttgatcaaagccaattgttttaggtacactagatttgacgaaaatttgtctgcgatgaatccgtaaatgaaaacttagtaactttacatatcttcataccaaatgaaaacttacttagtaaaaagtaacttgattcataatcaactcgatgaaatctcttttagttttatgaataattgaataatgcatgtttaatatttattttctattatacttaacaacactgttacttgtcctaatcaattaaatattgtttgttagtaatattttgaattttattttcaattatgctggtgatatcaattccgtgtcgtcggtaagttaataattggatgaggtacaccgtaccattcaacattttttcttcgtatttatatatagaatttggtttacactttaccaatctcaaaattataatttcactccaaacctaagagcttataatatggtttttgttgtttaaaaagagcttaatattattggttataagactcttcactatatgatttttacgtatgagtgcgttggcggaaagatatataaactataaagagaaggtgattaataaggtaccgatactatatattatcatatcttaaacatgttaagacacaagtatacaacataacaaagcaaaagattacaaagccatcaagacaaacaaagacaaggtaaatatcagcttagatagccgtcttattttacgtatacgaaaccatactcttcaggcaaatgatgtcgttattccccacttcacttgatgctgcaacaatacaaacgatcaagagtataaattacatcactagaaagattaagtcatcgtctcaagatcgagaaattagccaagttaaaaaaaaatattagagagaatatgagcagtactgctcaattaaaaacttacgtggcgcagttggtgctcgtggagatgggataggggatgctaacaccgcactttccaggaaggccagaggctagacttggattaaccccttttgcagcggactgtaagcatctgcatgcttgttggcggtcgggtgtggtttgagccataccgttcaactttttgactcctgcacagcacggaggtggcaccaccccaccctttgataggtagcctagacatggactcaagctacttgccactgtgccacatgttattgctgcatccactgatgcaacgatgaacactgtcaaaacaaagcatgtgaagaacctcaaagcgaaagccattgtgtttgctcttctcttttgggtgataacacaattagttgagttttgttttctacgcttgtgttttgttgttggatgtgagaaaagtgggagatgatgatgggtttatatagggatttcgtatgggggaaaaatgatgactaagtagggtttgttagtagttggttttgcatttacttcatgcattctttctagtttcttctactaacgaaaataattagtttctccagtcatatgtagttatgtttcttctactaaccaaaataattagtttctccagtcatatgtaattatgtaaacaatagtatcagttttcagaatgtacaaagaccaatacgtcaatatatatacagctatactgttaaaaaatatatattcatttatctgcagttaattaaacttgtttttttaattagcatgtttagagcgatgttatactgtagtagacaagagaaaatcgtttaaaaatttgtatcttcgttgtagatgaaatgtcagctattatgtgtactatatatgtaataccgtccaattaaatgcgatgtgcagctgatagacacgtgtatccaacactaaacatcacaattctcccatcacgtttactaattatggccattataattagcaaagttcacattttatgacttactacataattgaatgatagaggtgctatatggagtttttctcgatatttcgtataatcattaacataaatgcgtttgtcaacaacaaaaaagatttaataaataatctgaataataacaaaatttattataatcgtacgccaaaaatacgttttatagccctgcaggaagatttttacgtgaatgccacatcaattcaatgcataattttgtatacgaaccataataggacgaaaaaaacagtctttttctaactatacttgaaaccaattctagactcaagcgggaataaatacacgaaaccgaattcgtcttatgcagtacatagcatgaatgcaatataatctccataacactatcgctctataagccatatataactcatagtcacatgcagtctcatatatgtctcatagttacacatattacaaaatgtctttaacttttgtgtttcctttctacgtacgcatgtgatgatgcttctccgatgtcttagagagcttgggacgtgaaaggttgatgtatggtgttggatactatcagccaaaaaccgtcaagcaacatcgtacaagattgataaatgtctcacatgtgtagtacttaatagtcacaatttgactacacaaacctctaccgacactaatgtagcaattatatcatgttatatgctcttaaggtatagtatgtataacaacatttcattctgtaaaatatcatcatttatatcaaatttatgatatataaaatatcattatcattttaaaataacactaaaataatcagtgcaattccgtataatcttcatatgaaactgcaagaatccttggtgttccaaagattatgatgattattgtgagctttgatttatggtttccatcttgtcaaaaaatggcttttataaatggtagagctttcttagttttccttaagatatacacaacaggttacaaatataatttatttttgctaaaagaaatagttatagtaaacttgtaaaaactactacaactattttatggaaaatgtcttaaagctgtttcaacttttatacacattactgcatttactattctgaaatcaatttttaattaaggtccttgtactataaggaatcctttaaataaatataaatattaacaataaaaaaatccaaaatttcagaatgcaatggtcttacaattacaataataatgtatttgattgtactaaaaatataccttaaatactcaccaattatcttttataatataatccacaaatttctggaagaggaaaaacaagtaaatgcaagtcacatttcacatttcaaattaccaactaccaactacaaactacttccgcgtctcaaattgaaccactaattaatcactactttatatgctcatcattctttttctttcattacaattctagaataatgacttaaccaaaattcatacaaataaaacaatattttggcttccttcaccaggctaagaattttggtattgaaaatctaagtacttcataagaaactgttggaatcatttaaaatttgtgatcatatataaaaaaatttattcatctttatatttaagagtttaaaaactgcaacttttgtttttctttcactaagtcttatggccacagttaattaaaagcagatgaaaggtggtccaatggaaaaggagaatgtgattgggctagttgggagagttctgatgtctagtgttgggtacacgtgtccgtcagttacacatagcattaaatcagacggcatgtcattattcaaatctagttcacatagtacgactaatagctgataaattaatgattatacagcatatgaattatgaattcaaaaaaaaaaaaaaattgaaaatgttaaggagatgctatattttacaaaattcatcgcaatgctttctactaatttgctaagtggtcttctccagttagtcttgtcgattccaagcgatattattaaatcttgaagcatcgctcaaagcattatagcttaagataaccaaattgttattaaaaacacctagtgaaatttttaaattaaaacaattttgatatctttgtaatatctaatactactctttctgtgtctaaaaggattaattttcaaaaatttcacacatattaaaaaaaaaaaaaaattactagctaaacaattttcaataatcataaaacaatagtaacttaataatttttttttattttcaaaatagtccttcaagtttacaattcattttagtattataatcaacaaaatttgtattaaaaagttggaaaattaatctttgtggaacaaaaaaatctagaaatcattttttagaattagagagaggtttgataaaaaaaaataaaaaaaaatagagagaggtagtacatactaaacgatgtgatactactattgacaaaatcttaattctcagtttagtagaataaactagaaggaatgaatgaagtaaatgcgaatccaactactaacaaaccctacttagtcatcatattttcccatatgaaatccctatataaacccatcatcatctcccacttttttcatatccaacaacaaaaacataagctaagaaaacgaaactcaactaattttgttatcacccaaaaagaagttcaaacacaatggctttcgctttgaggttcttcacatgccttgttttaacggtgtgcatagttgcatcagtcgatgctgcaatctcatgtggcacagtggcaggtagcttggctccatgtgcaacctatctatcaaaaggtgggttggtgccaccttcatgttgtgcaggagtcaaaactttgaacagtatggctaaaaccacaccagaccgccaacaagcttgcagatgcatccagtccactgcgaagagcatttctggtctcaacccaagtctagcctctggccttcctggaaagtgcggtgttagcattccatatccaatctccatgagcactaactgcaacaagtaagtatttagttttgttttacttgatctagagaccatgaattattttttctaatgacaaaatgtgttctcttgatcgtttggattgttgcagcatcaagtgaaatggaagcttacgtcgtcgttttggcgttaagagtatggtttaccagaagtactagaataaaatacggctatatatcttagctgatattaccatgtatttgtttttgtctcaatgctttgtcttattttcatatcatatgttgtattgatgtgctaaaactatgataatagtaccttattagtcatcttctttctagatatctcctccaacgcatacgaacgtaataataatatgtgaagagttttataactattaagtaaccaataatattaagttcctagttttggagtgacattatttataaaattgatatttatacgaagaagacatgctcaatgatttttctcctttaacccaaaaaaataaatctctcatccatactgataaagtaaaagctgctgcatctgcaatagaaattttaccattatccgaaaaaataaaactttacgttgaccaacctaattaaataacaaaagtaataatcctaattaaataacaaacacctaacaacattgttttttttaatctaagaacaatgttatcaatcttcacgatttgattatgcatcgaagaaaaaaaaaaattttttttttttttttttggacaaaatcgttactaatgtcatgcaaattttatcaactctgcgtttgcgtcaagttactaatgtcatgcaaaatttcgtccaatatcgtgttgtaataccttactacgcaataacgcaaagccatctcaagttcctcgtcagcgacttaagcggttaagcccattataccgcatctgatactctcaaatcagatagcatttttcaaagtatggttgctagtgaaaaattgtcagaattgatctcctgatttggtcaacatttggagcttagcctttaggacattcaagtcatagtcattgactcaaacccgtaatgtgcgttgggctttcatcaggtccgttaaaggcccagaatcttcaacttattgaaaccatatattgctcaatttccaaaaccagcttggtttaattttaaggactccgataaccggacttacatattaaactctgctcctggtttattcttcaaataagctggttgggagagttgtcaatttgtcatgtttgatgttggatacacgtgtccctcagttatacattgcactaattggacggtaattgagatttggcataattaaatctccgatttctaaccagtaaccgccatctccatccttttaactgttaactttttaagagaaaaatatgcacagtgatgaccttgctttgaatcaaaacatatatcttaaaataaataaagatatagacgacaaaaagttaatgtacatagtaactgataaatatatagatcaatttagatatagtactcatagctaaaaacaaattaaattggtggaggatacacttagatatgttccttagtttctcattgcattgaattgaaatatgaacggtactgaaatagtccgtacacatagctagcaaactattgattatatatgtacgatatcgaagattagttatgctttgctaacgtatgtttagcaaagcatgttatcagtattactattcaaatcttctgaatcgctcaaaagtatgatatcttaaaatacgaaaatatacaaaataaaagtataaaaaataaaagtaagatacgtactattgtttacatttgactatagcaaaacattctttctcgttagtggaagaaacaagaataaagtaaatgcgtatctaacttctaacaaaccctatacttagtcaccattttttccatctaaaatccctatttaaaaccatcatcacctcccacttttctcacatccaatagcaaaacacaagcttaattagaaaacaagacttaactaaacctctacttttgtttgtaataaccaaaacaaaatagagcaaacacaatggctttggctctcaggttcttcatatgcttcgttttgacggtgtgcatagtttcatcagtagatgcagaaatctcatgtggcacagtggtaagtaacttggctccatgtgccaactacctttcaaaaggtggtgtggtaccggatctgtgttgtgaaggagttgaaaagttgaacggtgtggctcaaaccatgccgatgcctacagtccattgcaaagggcatttctggtctcaacccaagtctagcctctggtcttcctgaagagtgcggtgttagcattccctatcccatttccttgagcactaactgcgacaagtaagcttttttttaattgttgtacatatatagttagtctcctctctttttctttctaattaacttaagtactcattctaactaaacaccatgatataatttttattatttggtaaggtatacgttttgattgtttttattgttgcagcgtcgagtgaagttggagcttaattatatatatatgtataatcagattatggttttaacataagtaaaataaaatgtctatgtacgtacgctgatctcaccgtgcctttttcttgtggctttgtaatcttttggttgttctgaattgtaacttatcatgttaaagataataataacaccttaattaatcctcttttcttgtatatttttccaacgcctttgttcgcaacactcttagtgacaagttctctaacaaaagatcacggatctgagccttctgaaatggtgaaaatcaacttgtatcattttaagtttttacaaaagtggaaaatcaacttgtatcaacttgcatctataaacttccattcaccacctcatcataaaaaatggaaatcaatttgaatatattcttaacgcgtcattaacaaatagaatttgctttataaggtctcttctcccatccataaccctgacccttggtgatttcggatcggataacccacccaactccactctgatttccttgtccttgccaagcaccatatgtattacatgtttacatttgatccattctggtggaggatggttccatttgatacatgtatttcatgctccagcttgagttctcctatgttcattttgttctcttcaattgccccacttttctgcatcttcgtccaacgcacattgaaatcctttcctttgatatgactttatttctggatttccagagcttccaaatcagccaatggcactgtttctttccgagggtgaaactagttgattttcatgactttatatgcatataaacatacaagtttatttatacctataaatcgaacattcaatagtaagataagaaaaagaacaatataacacactcgataattttctgttaaatgcatagtctttgcctttttggaaccataaatatatttattcgcatacggagagcaaaaattatactaatactttaaaattgctaaattctagtcaataataagctattggcagtagccaagttgttggcagtagctacgggcgacagatgacaatagatcttaattcacaatgaagcaaaggcaacatatttcatctgttgccattttggttgtagtcacaagtttgatcatagtattcaatttgatatataactggattatatattaaataacattaattaaaatcacatttacattttatgttaaatctttttaacatcccatatacattttatagaatgtctatgtcggcctcctatagatgtatcactatatgaattaagtttattcattaccaagtttaattagtacttaaatttaattttagaagaatttttttaattaataaatgaaattgaaattcattgaaataattgacttgtttaatgagagtgatttaacctttaaattcgaccaaaatatatagttacgtttcgtttcaaaatgttcatgagtttctccacagtttgaaatactttttaaaacaactaatgattacataaaatttataatttcattaaaccttcgttacaacccattaccattactatcgaaacgagtagaagtagaaccaccagaaaagaaatcaataaacggctgctctcggccggctccatcgctagaacaatccaccggagaatcactaccaagggcaaaactggaacttcccataccatcagcattacttgcattcaaaggctgaagaggaaaaagagggagtgttttccgtccactggaattgacgttaatgtcctcaccggcataacagttatcacggagggcaaatctgtcaaatctgagtgaactcggagaaattggcattcttgtggctgctgttgttcttatgtctgaaagttgtttctgatgttgtgtgactgtccgtttctcgtagccaccacttggaatcatcacattgtttctgtgaagaagatcgtttgtgtatacacttccatgttgattcatatgatgatcacttgcttgctgtaaatagtacggactgacacaacccacttcataaccaaaaaaaagattttatttagtaatacccaattatattgataaaaatgaaaaaacaaacataaaacctgctaatccagagtacataatttgctgataaacatctcaaaatagtcccatatgatataatcctttcgcatccgattatatgtttttatgttaaaattttaaaaaacaaatttgaatctcagcgataaatggccaaaactggattatatatttatatatgtatttaatgacatgtttttgtaagttctttcatagtccagatgtaattcatacgctttattttcatttctttaatacggaaagaaaacgtcgtcaacaaaaagaacctataacgtatggactacaatttttttaagattataaaatagaacgtcgaagattagatacggataagtaagagaaaaggataagaactacgtgccgtttgagcaaggaggggggtagaagaaacgggaggttttgtggaggaggcgattgaagtaagccatgcgctcctgtttctgcttttggcgttgcctagccttatggttctggaaccagtaaaagacgtttttaccttcgatatggccgtacgcacgaagcctaccggtgatctgctgaatctgatcggcgctcggagttcgtattccttccttgtaaagattttccagtagcgtgatctgatctttcgttgggttccatcttgaactgcttgctgttcctgcgtttacttcgttttccatttatttgtgttcaaggatattttttttatggagaactagggttttaagacgatggtttgcatgtaggttatgggggttgaatgatgcatgaaattcatggggaggctctcatatttatatagcgagttagtgagggattggaacagagtcaaatgaagagagagatagtgacatgcgtgttgttttttgcgctggagactctgaaaacatcgcgtggagcggctgagatggtaaaaaagaggctacttttttatgagaagacaaatagaaaggaaaaaaaaacattttggatctattcgttttttttttaataaaagcatgttgcattggcacatacgcggaaaaaaaaaaaaagcatgttgcattttataattaatttatcaaaatgcggcaaatagaaaaagagataacacagtaatacttgtctttaacatgtaaaaatgttttttctatgtgaataatggatataactctctctttattttccagtagatacggtgtataattgttagttgtgacttgtgactttattagtttttcttattctttctggggattacggatgttttttttttgaagtgtattaatgaagaagaaccattaagttttggaaatgaaagagaggataaatacgaacgttaaatatgatagggcggcaaaagatagctggttggattgtgttctttgtaggtcatgagaagcctacatatctagtttgcttcggaaattgacatatcttatattatagtactatcatattttgtttataatatttgtatttatataacacgacaatatgaagtccagtagcttggctcttcgatttcttaacgaacaggaaaaaaattcaaaagattcgagcaaagaaacaaactcttgattatatttagtaaaccgtcaaaatagagaactctagtggcttagttctttcgcctcgtggtttcatttcctttcttaaatccaatgtcgatccaattttttcctagttgaagaggaaatggcgagttcaagtatggaccgtcattttctttcagatagaatcttattgatcatatccgtacgagatattttcgtaggtttttcgtaggtttttcagtaaaaatttaagtttctcaaatatagcagacgttagttgagcgcaaatcaccgatatgcttaacctaggcacaaaacgtttatttggaagttggaactataggtataaaataaaacataattttgaaatatagaacataatttttctaattaaaactatttaagaatgatatctatctgtaaaactacaaaatataataaatccatacaaatgaaaaatggtttcagaaagctgttttttggaactaatcgatactttaagacaaaataaaacaaatattcgttctatacttgcagatgaagcaatcgtatgtacaacgtttcagtgtcgtgtttgtggtgtttttcttccatataattgcacttttcacggtacatacgtactttagaacatttttatcacatcatttcctcatcctcttattttaatttaattttctctaaataatttgtaatgtagcatagtgaaacatactactttaattgttgaattccctcgtgtttaattgttttatatttttcaacacatatttttacatcacaatcatgggctcatggctaactacatattgactctttagtattccctctattacatcaagtttatcaagtctgatgttgtgaaattttcatacaaattaaaaaaataacttttacattttaatattattattttattagtttaataatattaactatatttttttcttatttttattggtcaacaataaaaataataatgatgttgatgtagaatatcaataattgtggaacaaaaaaaaaactcaaaacattgaacttttaagatc

SEQ ID NO: 929 - DNA, 75125 bp, Arabidopsis thaliana
aaaagggaaaataaaatattgcataactattgtacataataatacaagttttagaatgaaaaatattagataactattcgccgaaaaaatcacattgtacggatagatatatgtgcagactaacggaataagacttcataacataaccataatcatttatttacataataagtttttacttttttttagacaaaaacgcaaatcctgcattattgcgttttatcaaacattatgaatttttttgaattttttttttgtataatcataagaaaaacatcatttaaccattatagtttcgcttcaactgaaaactagacaagtcaaataaaagtcagaattaaatttgatacagtactgatttcagactaacataaggatgccattgtgcgactatcaattagttaaaattcatcgtgttacgccaccaactttagatatataaatgtgcaatatgcatatacatatatggactgtaaaaatttgtgaaaagttggcatggggaatgacaaattgtgaaagcaaaagacatgcatggcttcaaattgagccttttaggcacctacgaatctataggagcagagatttgcctcgagaaagagtgagacatataagtataacactctccaatctcttcattgattttcatgttttagtgaaatttgagccaacttgattcgttcagcagatattttacttcttgttttcgtttaattctgataagaattaatgaatatcacgatggcagttttatttatctataattttagtggtctctgtatttctattataataaaaaaattgagtgattttcttgcaaaacatttcttttaattgttctatgagtttcatctaatccatttgctctgcactattattattatcatttgtgaatctgaatttttaagctgaacgatagacgtatataccattttatacacgtataagtcgtaactgccgtaaaaggcaattttgtctcctttgtgtgttgtcgttgggtgtagaagacacttgtagccaaacttttacacgtatgtatgtaacatcacattctatgtttatacacgtattatactttttttgtacctatttgctgcattcttcgtatgctaagtttactatttttaaggattcagacaacattaacgtactgtcgtaacctgtttgcacgttcgttgcctttgctcttttatcttccgaaggtattatctaaaactctaaagtaggaatagaagaaaatcaaatactaatattataacgattaatcgatcatagcggtgaaaaaggtacaatgagacttttggaagaggtggagccggtcctaaatcctaggatgtcctagaatttatgtaatatgctttttgctaggatcaaaacatccttttacatgcatatttcttaaagagaaagactcaactttttttactacgaaaatcatagtattggtttgggattttgttttgtcaacaacacaaaaacgtgaaacacattatagtataaatttaaatttgagttacatgatagtataaatcacacaagattacatattttggttagtattgtactcatatctctaaattttatacaaatttgtaaagtcatttaatacaactctcattattttatcaaagcgtatattaaaattttgatacagtactatatgattaaaataaaaccattaatgaagatcacacaatggtctttgaagttttaatctcgttctccaggtctgatccgatataggaaaaaatcagttaacttgattttaggcttttgtgagtttttatctcccgtttaactccggttcaactgagtcttcggttcatttgaagctgactggttatcgactcaagatgtaaatgggctacggtctgttacaaggcccaaatgaaaattaaaagaaaccgagaagaaaagcccagagaggttgagtctgaagaaaagcccatcgtcttctttttaataaattagaacaacgcatcttatagacccattagatatttttcccggaacttgactatggatgggtctataagatgaaatggttatttgtttttaacatttagcagtctaaatatattattttaacaaaatattagacaataatgaaaagaaaaaaatatctgaaatacagttttgcattgtttggtttagaacagtttttttttttttttttgtgtcgcgtggctttagtgtaaattgtctcatcaaaattgtatagtcaaaatttattctaacggtattgtaggaaaacgaaaagaaacaacaaaacaattcgtgaataggaatcataaaaacacactttctgtctatatacgataatttttaaaaatcaccgataatattggaatcaaaacaagaaaggaaaacaaacagctataatgagtttgtgggcgacggttgtctaacctttggttctgtctatttattatcttatccaatcatattttatgggttcccctcgtggcttcttcaattattattcctcacaaaccttagattcaatttttaattgtttgctatatttgcctctttaaacttctttaaacattttttttttttttgcaattttattaacttatgatttatttggaataagtactaacttccgatggtttcaaaaattcaaaattcgtatgtgtaatttcatgttaaaccgctaatttatatatattaaacagttaaatatgcattttatatacactcgtatgcaatcgctaaactcattgtataaaccgttgattttggttttcaaaaattttatatcgattttgcttaaacaagtcgaatccttgcacctgcttttatacattttatatttaaagtgattattttttactatagtaaaaaatacatttttagtaagaaattaagagaaaagtttgtatcatacttactagtttatatagtaagagattgagttatatgcataaataaattgataattcaggtatttaatcatgcgaatccgcaattttattgaacaactgtctaaacacttcacataattgtaattgactaaagataagtgataataatgtgaagatttaaatatagatgtgtattgttgtggaagacacgcggaggagaatcttgggttgtatcgacaaaaaagaagagaatcttatgttgatggctatgactgttttttcactgtgtgtaagctcgaaatttcctttttaagagcgtatatattcttttcttctaataaagaaaaagttttgccccaaaaggtagttatttgaaaaaaagttcaaagcgaaacttcgaaaaggttttaatggagttacgaaaataaatgtttgaatggtatatattgtacaaagcagaaaaacagtaattgtagtaagatttatatatcattagcataatcgcatatatcttaatattagcaagtatatggagctgtcgtttgttttgtttatttcgatgggatacaaaaacagaaattctttttaattaatactaataatatttctattaatgcttttattataaaatgttgtggagttgtacaaacaaacagaaatagttataacgtggaccgctcaattcttgtctacttataatatttttttgcagatataaactgaaacgatattacaatcattgtagcctgaaaaaccatttttatttataaacaacattaatatcaattaagccaagactttgtatagggatgaggatgacaccaatacgcaaaatatagaatgcatatgagatgtaactgaaatgttgaccaaaaacatgtttagtaagattaaactccaccaatgttgacgaaaacaatcctattactcaagatagaaatgacatatagttaagaaactgtatccaaataaaaacggaattaagtggtataatttagtattggcttaggtatgaaacacgtttagaattattttacaactataaatctaaaaacaccacttttattgcaaacaaacaatatagataggaaaatatcaatctatctgtattaaaactgaaatgaccgattaatctgtgtcatacacaaatgaaagtatatataaaaaaactacatatgcaagttgacatcagcttctggtcattatcgcttaaacgttatacaaacaaatacttttaaggaacattaacaaataattagattaaaatacagattttgggtaaaccataggtatttatcttcaaaaagtgtaccctaatttttctctatctatctttttttcaaaatgttgagttaaaggcaccaagacttgccattttgtgccaagtataacaaagaacccaacttgtgaacctaaattgctgtgaaagagatcgttcttctctctgtttcacataaaaggaaaacataagaaaagaaaaaaaaaaatctttctctttcacaatcttaatttctgctcaccatcaaggcaagtttccttcttttgatcctcaacaatttccattgctactaaaaatatcttctttccaaaacaattcacgcatttacgtttttctcaatctttacatatatggtaaccaactcttattccattcctctgtaactcacacaaattcctgtccaaaaattagttttttcttttcatgtgatgtgagaatttgggttacgagaaagatgaagactattagtggattaggtattgggttaagtttaatgtttgggtttcttctattagcacttgttggagaagtctactatcttctaagatgtaagaagcacaagaagagagtcataagccaagagagtgaagaagagaaagaagaagaacaacaacaaaacggatacgctaaagaactaatccagctcttctgcttcaaaaaacctcaatctctgcagcaaaacaatggaggaagagaaggtgaagtctcaatgaatgaagatgggaatccagatttagaacttgggttgatgaaacacttgaatggaggagatctagggtttgaagcagagcttatgaagcttcataaccagaggtttctattcacaatcatggaagagacaaaagcagatttggaatctgaagatgggggtaaatcaagattaggttcaagatcaagaagaagaagcttgagtgatgttcctaatgactgtaatacccctggattcactccattggcttctcctaaaaagtcatcatctcctctggagtcttatccacaccatggattcaatcctctgtttgagtcagacggtgagcttgagtttaacaagtttttcaggtcctcttcttcacctccaccgaagtttaagttcatgagagatgctgaagagaagctaaggaagagattgattgaagaagccaaaagaagagaactctcgattgtaacagaaggttcgtttctcaagtttatgaatcctgcgatgaacagagagaagaaacagagtattcaagaatgtgatgaaacggtgtcgttttctccttcttcttcctcatcaggtacaacaattacaaatcttagaacgttagtggttgtttagtattagcatctctgtggctttactcttttaatttttatttttggttgaatttttgtttccaaaaatttcaattatattgtgtgaaaattctatctttcctttctctcattcttgttatttaggaatgatttcttctgtacgtatcaatctgaaattttttgcagatgcttgttttgttttcgtctaagaaatcttcttaagatatagaaattatataatttgttctctaaccaaataggcaataacaaaatattttgtataaagctagcttttgggaaagtaatgtaaaataacattgtgttaggtttgaaagttggggttaataattcaaatctttacagcgccacaagttgaaattttctaccagaataaaatattactttaagtaacagataaaaagtgtaaattatggcacaacaaagcatgaataatactatttggattttctaaacgtaaaaagaaaaaatatcatgttatatatatctagactacatttgaataaaaacttgtaagagaaagaaacctttttgtgttgtctgaactagaaaaattcaaggcatcacgcgatgtatcgccgaaagctttgtttttgtttcattcacttacctttttttccacagtttacttttagatataatgaaatatacctactcacacctatgtgtatttggtttggttgcttccaacttccaagcaacccaaaattcaagataaatttgttcaactatcttccgtttctgcataaaagtcataattaaatcaaaaagcaagttttgttaacaaatttaaacttgtaaaagtttcaaattgaagtacatctctatctagcagaaaaaggtaccaaaaatcctaatctaaacttggaataattttgaattattggaccactggtactgaccatatgactttattagtggtgagtttgcgacatttttctcgtcagaaactcttatttattcttaatcactatgaattatcggctgttaaagcacaactgcagtacttacccaaaaaaagaaagtcacaactgtttttacatattttctaggtgtttcaaacatcgactgaataagtatattactatatttaaatattttttggattcttaagtgattataatagtattttaatttttgttttgaatacaataactagaatttgtcaatcagtgataattacaaatgaatttttctggatcatggttgtactggttcgatgatcatcatcgaatcagtattatttttgttgttgtttatatcttaattacaaaagaatttgaaatagacagtgtagcaaaaaaaaaaaactataaatgtaaacaccctgtatgaacaaaaactagaaatgtgttgttaaagtacaaatgtattaatgtatatatacgtatacgtacaacacgcattttcatatgtataaatgtacgtattagatgacacatgtgaacatggcggcacgtgaaagaaccaaactcaaagagacagaaaagggaaggggtcctggaaacacacgtcaacctcgtagcccccaccttaaaatgtatacgtaattaactatgatttgtttgttaatcgtttgtattaatcgtgatttgtttgataaaattatgggactgcatgtactcgaccagaaagaaaaatcatgataacagatatgttacatgtagtgtttgttataacgtcttctaatgatctgtcataatcagtagttcaatacgaacaaaagaatttaaatacaaagatgccaaaaatttcaagaatcaaaatttcaaatacatcttatacgaatccaaaacctttgatgtcagtgaccaagccctaatatccaccgtacgttgacacttagagacaaaattttcaaattactaagactatccacataattggccgttgcagtagtcagtgaaactcgaatttagatatatgtattattttacatatttttttaagataaccgattgttgccgacaaacaaaaaatatgaccagtcgaactgccattaccagttaagttatagtttattacattaatagtaatggactaaaggtgcgtgctattaaagtatggagatggaagagacaacctaactaaacaattgtaattttgtggttaattatgtcgtctagattcagttggattaagttatctggccattgtaaaagacttgatccaaagataaccattgtgctttcgtttcttgtcaaagtcctcttttcgtaattaaaatgtttcagaaagaaaaacttagtttagaacgaatttcggaaaggagcagagagcctatgtttgaaaactttgtgtcttaattctttaataaatgtcgttttgtatcataattcttaagatgatttttcttaaacagacgtcgttttgtgtctttacgaatttagaacagaggcccattgagtgaaactaaatgggtttaaaatatcagacgaaaacaaaaagacttgaaagcccaaataaataattaagagactctacttttcagttctttataaacttttttttgcctttgatgttttttttttctctgtcagctatatttctaagtaactgaagcatccgaacatgaataaatttcaaattataaatttatagttaaaaaaaaaattatgcatataggttaatgatcttaattttgtttctaatcagtatatcaaatttgttctcactaacaaaattacattatactaatagtttcacacggctctgattctgaatatacatgtgtataaataacttagtggtaatactaaagtaaagattactcttaaaaaaagggtgatgttaattatataatagatatgagttacctcgagaggggaatatttgggaagaataggatgtgtggggatgatcaaacacgaacgcatgtttgcttttgtagggggacaaaagtcaaatacactgaaaatttcaagattcaatcttaaagtaattccctaacccctaagacattcaaaaagtcaacttcttgttgattgagatagattaaccatatacgtaattttatggacacttttagcttaggatcctccaattatatattaaaaagaaaaaaagaaaaagtaaaacaacgtgaaagagacaaacatagatcttggaattggatagtagaagacaaacttagataaattgatatatgatttagataaacttacaaagataaatgtaaaacgaacaattgaatcctaaatagtaacgtcaaaaaattaggcatcatcatccaaatcagatactgcaaacaattaatgtaatacatgcattgttatatggcataccatgtatttatatgcggatagaacatggatcaagatctagcactctcaatattattaccgaaatctttaaaaaaaacaaaactgaatttaatttcatattcgtttgagaaaaacaacatgcttttgttttctgaactttgaattttatataaattcacatcaatatcacaccaataccaaaccctaaacttttgttttcctttttgatattaaacacactaatatagcgtataaacttatataaaaaacgcaaacaaaaaagtgggaaaacaacaaatcaagcctatggatagatagagatatatgtatagactattggttaaaatctcgctttcttgatctttttaccaaaatcttgaagaacagacggaggaaacatggattcgacctctctagctacatctaaaaaaaccaccgatctctttacccacatgcctctccgtttcatggacgggatagcttttggctttctcggcggtcgaggaggacaataacacacactgttcgagtttctcggcgtctctgggatctttacaggagactcttcatccttacattcccattttcgttttcctctcgatccatcttgtagattttctagttcttgatcttgttgtcggtgttggtggttccgttgtctgttagattgattttcttggtggtgtcgagataatgatgaatcaagagagtcggattttgatggaactaggagactctcaggttgttgcgttgcttcaatatctttgtcatcagggaataaatgaaaaatcttaatctttgacatcttatcacaaacaggaaaagagagagtaactttaaaagaaaaaataatgactactgatcgatcagaaacaacaaacaagatctcgatatatatcaaggtatacgtgtatatatgtatgtgactgtgtttatatcattgtacatatatttgatgcaaataaggagcagagaaattgaaattaagatctttaagtgtgtgtgtatttgatatttgtgagtgtgtgcgcttggtatataacaaagagcgaagacacctccaaatcgacaaaggagcaaggcatgcaggccgtaaaatgagaaggacttctaattaataaatatttttatacatgaagaaaaaggtggaaaaaactgccacacactcacttagtcatattattgtgtctatatgactataactagtataaatagtttggactcgttgtctcccacaataattcaaaatgataaactgttgccactacgaaaaatgtaggagtgtaacgtctgaataattctataagaatctgtaaatatatcattggaagaattataggatcaattttttaaagctgtgactatggcagagtagattttacaagcttataatggattaaggtttgaatactttcttttaagcaagcaagttcgatgtattctgactgcaatgtgataatacgtattcatcattataattataaacgtatacataagcattagtataattttaataagactatgtggggtcatgaagcagagaaattgaaatgaaaacccactttgtgcgagggatcctatgcaacacatatgaatatcgttctacatttatgcatttacatacaaaccacaagcatataattaattatactcttatctctttatatagtaattgtttataaaactttagccataaagaaatcagtctttcgccatactgagatagtcagattcatgtcttttcactattttcttttgtgttaaaagatcatcttttcacttttgatcctctttataaataaaataagtgtatcagactatcagtatataaagtagcgaatattcaaaattaatttttgaaataattcaatttagacgcttgtttttttgtggatcaccaaattcaatttagactataacaacttttaagatactactaatcatttaaacttcatttttttgtttttaatatatattaccagtttgtttgttgcattttgagcctttgaggtggactaatcgacgcaaattatctgtttgaaaacatttgaattaaacaatatagtaaccgtgttaattaattaccgatatagaggtaatttgtcacatatcagtaaaactaatagtatttgaacagaatagcctagttatattttggtttagtttttcataataaagctcatgtgactcatatatactttactttagattcgtcgaaatcaagtcacgtgattaactaagatctagtgcttcttctatggtatctattaccttttaagctttgtatccgctttttccatctttgatcttatattcttattaattattttataagctttcatcagatcctgatgttactctttgtaaacttataaatttcagtaattaaccctttatcaaaaataataagggtcgattatatacatgggttttagttatggaacgtaatgtatatagactatatataagtacattttaaattgataactatagtagataaataagtgttacctaatatgttaaaacatacacaaatcgttgcatttggcgtaatcttaggcttcttgtcaaaagtcgtaagactgattcctaggattccttcattgacactgatgtggttttgaagaggttgtagatttggtactgtcgtttttctttctttgtttcttaatattgttgttttttaaccactccccatctacgtatactcggtccgagatttctgtagagatacatatataagaaattggtaatccaaatgcaattattttaactagataccaaaaaaagaagtgtcttgagttttataaaaattcattaatacccaacgaaattttgtaattaaatgtggacaacaaacttatttggaatttttgtttgtatcttagaatttatggaaatactgctgttgaaggaacaaattacaattttttttttctatggaaataataattcgaaagatgtcaagtatgtctccatgctggggtgtgcggggtccatttgagattgcttgggtttcaccgcatcctaagtttattatccttgagatttgttcccgaacccttattttcataaataaaatagaaaaatacatttaaagtagactagtagagtgataagttggggcacaaaaaaaaaaaaaaactagtaaacaattgctaataaaaaagggtaaaaactatgagtaaacaattgtgaaaatatatataacaagtttttaaaaatatatttatttgatgtaccacgtatatcaatatataatccgttaaataatgatataattacaaaaaaataactcacacacttatatttaataaattatataaaaataacatattaattatttctgtccgtgatcattaaattggaaaagtgaaaacgaccaaaatgatccaaattcatttttctttgctagacattaatattttttccactcaaatatcatttgtttcattgccaactaacacaaacactcattaaactatatataaaaactactcgaataacatttttttttgtttactgaaagtcaaatttctagcaaatgcatcatatcatttacatagatgcaaatatataactttgattggtatcttattcaaaggacggtaagagaaataaatatataatgctatttcataactaatcgtatattaatacgaataacagaagaaccacactgtctctcataccaaataattacatctcatgctcatgcttaattatgttgcttccccacatcctatcatcattacaccattttctcaatctccgcccaactttttcagcaaataccccatgtctccccttaaattattcctagttttattctgttatacattcttataatctcacttttttatctgtgttcaatttttaagtgtctatctttatgatcttcatcaggctttcattagtagacataacaatcgacatatttcttttggagtggggctaaagggttcagaggcactcgatcaagataaacatgaagaactacgaatggttgaaaattacatcaaaataagtaccgtatcctaatataaattgctagctaataaaaattgtaaagaggttaatatcgttgtctcaaaatcatatgtttcataaatataccacatatacaaatctacacatataaaaagggtcattttgatacatttatattccattatctgaagtccaattgcagtaacaaactacaacaaatcggattttaacatactaaggactcgacccatgaatgtggttgattattaaaatgtcacaattattaaatatatcatcttgatctttaatcaatctcaggactcaatgaccgatatttcaaaatcccaatattgaataacgattaattaacaaaataaaaaaatcaataacgcttcatccggagaaccatgacgaccaaaaccttaatttttgggcatgttgaactttcacgtatccaaaaataggtgaacacatgtcgtcaccctcttagatataggatttagcaaaaactaatggccacgatctgttaagagtcaagcgataaaaagcaaagctcctttcgttttttcagaaattttgaacccattcaagtcggggcgttgcaggatccgatttctcgttttgttcttcgttaaaattcaccaggtgataaccaaatacccttgtttcttggtaacaatttcgattttcttgcatggaaaaatgtcaagaaaaatagattttagataaatcaacttgaatatgtaaggccattttcatttaaaatggcttgttgaatgaaaatttcatgggaaccgttacattatttgcatattacaattgtttgttaccggtcttgattcatattcatatatagattgaagaatggcggacggtgaagacattcaaccgcttgtttgtgacaatggaactggaatggttaaggtaaagtttctctctaagactcttattgctatgtcacatatatataaggctatgccataaacgactactcaaaaatatatcccgtgcttaggccggattcgcgggtgacgatgcaccaagagcggtttttccgagcattgtaggccgtcctcgccacacgggtgtgatggtagggatgggacaaaaggatgcttatgttggagacgaggctcaatcaaaacgtggtatcttgactctgaagtacccaattgagcatggaattgttaataattgggatgacatggagaagatttggcatcacactttctacaatgagcttcgtgttgcccctgaagaacatccggttctcttgaccgaagctcctctcaatccgaaagctaaccgtgagaagatgactcagatcatgtttgagacattcaatactcctgctatgtatgttgccattcaagctgttctctcactctatgccagtggccgtacaactggtcagtaacacacttatatttgtgttgatccaatctataaccagttttttttcatgcttgattttaaataatatgaactattttaaggactatttggttatgcttttatggacaaccctaattggttcttttgcaaattattgattaggtattgttttggactctggagatggtgtgagccacacggtaccaatctacgagggttacgctctcccacacgcaatcctacgtcttgacctagcaggtcgtgacctcacggaccacctcatgaaaatcctcacagagcgtggatactccttcaccacaactgctgaacgtgaaattgttagagacatgaaagagaagctctcttacattgctctagacttcgagcaagagctagagacttccaaaacaagctcgtccgttgagaaaagcttcgagcttcctgatggacaagtgataaccattggagcagagaggttccggtgtccggaagttctgttccagccgtcaatgatcggaatggaaaatccaggaatccatgaaaccacatataactctatcatgaaatgtgatgtggatattaggaaagacttgtatggtaacattgtgctaagtggtggaaccacaatgtttggagggattggtgatagaatgagcaaagagattacggctttggctccaagtagtatgaagattaaggtcgtggctccaccggagaggaagtacagtgtatggatcggtggctctatattggcttcactcagcactttccagcaggtgaacacattaatatacatttttattattatttgatcatgtataatataacattcataagtttgttttgatataaatattggtatgtgtttgaaaacttgacagatgtggattgcgaaagcagagtacgatgaatctggaccctcaatagtgcataggaaatgcttctaatcacagttcctaagatcaccaaacgaagacggaagtaaaagtaaaagacagaaggttaaaaacattgagattactaccaaatgccacatttttccattatattttctaatctctcttttatccttttttttttgaatagcctctctatgttaatttttcaactaagcatacttttctttaaacaatttccactcccaatgtactatatataagcgactaatttcaattattatattttctattttaaacttaatttatttgttactcaaaagagattttgtgatggttaaacaattgtgactaatatacttcaaagacatccgtatcaaacacaaaacaagctccataatgttgatctagtacaaacaattgtgacatataaatgcatattgtcgaaactcactaaatcttagattactcggttaaatggatgtggtctaataagtgtcaataaacacaacacaaaatgttaaactgatggattagtgatgagaagatgagtttaaatgtttcatttagtaataaaacgtgtttattatgtttgttggtaaagaaaagaagaaacgaattgttgatggttaactaaattttaatttcttattcgatctcggtttaaccgaaccgaatcgtaaacccagaaacagaagctgcgacggagaatccatttctcgagatcgtcgccgttaaaatctgcgatctcattgctcattggtgaagacaaatccctaattcgtatgtcagattctgtggccggcgatttccctcccgatccacttctcgcctccggagccttcatctcctccgccggtgacggaaccctagacagtagtgcgaaacgacgaccgattcagggaggaatcggaatttctggttcgggagagagcgtacgcatcgggatggctaacggcactgatcaggtgaatcatcagacggaatcgaagtcgcggaagcgtgcggcgcctggagataattggttgcctcctggttggagagttgaagataagattcgaacttccggtgccacagctggttcggtggataaggtaaagaatctcagcttgactctgcttttctctatgaagttttgagctgcgttgttgcttgaagactacaaattgaggattctttgattgctgttgttttgttctctttggtttaaaaatcttgcctttaaagtagtgacaagtgtaatgatgtagtaaaatgatgtggttggttctgcttaagcattaatgagtttgtttagattatgttaatggtgtattgggacttgaatcatacactttatcagtgtgattagtgttactttgatttatcaggtggatttagatggtttggtttggtatatattgtgattgaagagatgaagttttggtgttgttatactcgatgctaatatgggtgtagatattgatgtgtagacttgtgacattttcttatctggttttgcagtactattacgaaccaaatacaggacgtaagtttcggtccaggactgaggtgctgtactacttggaacatggaacttctaaaagaggcaccaagaaagctgagaatacatatttcaatccagacgtgagtttacatgcttaaagattaaacctttcaccctggtttcaaacctgtgatgtgtattgaattttgcatttgcagcattttgaaggccaaggaagcaatagagtcaccagaaccgctacagtgcctccacctccgccaccgccattggactttgattttaagaatccaccagacaaggtaagctggtctatggcaaacgcaggagaagaaggttggatacctaatattggggacgtcaaggttcaagactcagtgagacgagattggagcactgcgtttacctttatcacaagccgaaaccctagtaaagtgtcggcttgaagactatgatgacctggtggcgatttttgggttgttgcatctatggtaagatacacagatatgttagggttacttaattggataattcttgtttagtcttcattcatcaatcatcaagttatgtgtactataatttttgtagcggtttttggaagaatatgataaggggatatgcatctttgtgtttgcttttggaacgtgataaccattcgacttttgactgatgaaattgaagacactgtcgtagtaacaaagctattcttcttagacattttgatactgaactattctgtgttccaaagtcttttactttgtgtttaggaaaagatcttgttctttgtgaaaccagtgtcgtaattcaagaactaatgcttgacatgtctcacctgctcaggttatctaaatctaatggataagaagaaacatcaacaatactgcactgatacaagacaagaagcgtctgtagtccaacggttaggataattgccttccaagcaatagacccgggttcgactcccggcagacgcaattatatttttcccaaacataattttagattttgttaaccaaacaatttgtggggttcgaatgtaactggttgtagcacatttaatatctgcaataaattatcaaaaaggccattggaactctcccaacccatcgtctaatttagtaatttttggtcttgtaaccttctaggtgtaccagaggcttccttattagtcttgtatcccaagcttttgaaaaaaagtgaaacgaaaaggttttaagttttgttggcttttgactatcatttcccctctctgtttattaaaatttacagtattgccactgagtttgctgcgacggtctgtctcttcaaaaagcaattttggggaggaagagaaaaccttaagagtcaaacggaaaaaaaacacacactatttttgtgattcaccaagcagaagaaaattgagaaaaaaaaaaggtctctgctttttattttccatggcttagactctcatttttattgggaatttggatggtctaaagtcaggatttgctttattttgcttgcaaggttttgtaaaagaacactttttctcggttcttcatccgtacacgtaacaaatccatttcttatgtgttttttcgatttctagaatctgtaaaacccacaaaaaagaggtttttttttttgtttctgggttctttgaagaagcagagagaagataagctctttacagttttcttcataacaagtgatttccttttgttttcttattcgatttccagtttctatatgttacataaatttgatttttaactctgaatcatatacattactcaaaaccttaaaaaggtttcttttttgtttgtctaggttgttcaaaacttgatctttcagtagctaaatatatggatcctctataatctcatttgtaaagctcttttattgcagctttaagatggagaaaaatcaacaaaagcaggaatttctagctgagacctcagagatgaagaacaccaaaaacaacgacgactgttctgtacaacaacaacaacgatttgtgtggccatgggttggtctagtagccaacataccaacggaggtggaaccatcgggtcggagagtaggcaaaagcggttcaacgttacgtgatgagttcactatgaaagggtttaatccaacaagagtccaacccatttgggatttcaagggtcattctggttttgctttggttgaattcgctaaagactttgaaggattcgaaagcgccatgaatttcgaaaggagttttaatttagaccgtcatgggaagagagattgggaaaaaggtaaaacattgtttcagagtttttaaagtcatttgctttcttgacattgatgagttcactttctttgtaaaaggtcatcgcttgagagacaataagctctatggatgggttgccagagaggatgattataatcgaagtgatactgttgggaagaacgtcaagaagaagagagatttgaaaagtatctctcagattgtggaggaagacgagaggaaaatggttcatcttgttgagaatatgtctcaaaccattgagaagaagaagcaaagtaaacaagagcttgaacagaaagttgatgagacttctcgtttcttggagagtttggaattgcataacgttctgttaaacaaaaactaccaagaaggtaaaatagaagcacttgaataagctttaaaaacataatctgttttgtgtttcatgctgacatgtatagtccttttggtttgtttgtgtgttattgtgatgagaagggtttcagaagatgcagatgaagatggaagagttgtatcaacaggttctggatggacatgaaaagtctttggcagaactggaggcaaagagggagaagcttgacgagcgtgcaagactgatcgagcaacgggctatcataaacgaagaagagatggaaaagtccagacttgaaagagaaatggtgattatgctttccttacaaagtaggagaaaaagatcacaaggcaataaaatctttgttgttgttgttgttgtagaatcaaaaggctatgtgtgagcagaatgaagcgaatgaggaagctatgaagcttgcagaaaagcaccaggcaagtagttcgttagtgtttctgtatatattcatgaacaagtaataactaagcttccatttccaacttttgagttcctgaactatgacaacttttgcagaaagagaaggagaagcttcataaaaggataatggaaatggaagctaagctaaatgaaacgcaagagctggagttggagatagagaagctgaaaggtactacaaatgtgatgaagcatatggtggggagtgatggagataaagatattgtggagaagatagccaaaactcagattcagcttgacgctcaagaaacggctctccatgaaaaaatgatgactctggcacgaaaagaacgtgcaaccaacgacgagtatcaagacgttcttaaagagatgattcaggttcgaaaacgttctaaatctatctgttccaaactctttggcttgtccttttaacttgtgtaattactttgatgaacaggtatggaacgccaatgaagagttgatgaagcaagagaagattagagtgaagagaatggggcaattaaaccctgcacccttcttgcctgcagtgatgaagaaacataaagttacacaatcaaaggcagagaataaggctatgaagctgtgttcagtgtgggaagcaaacataggagatgtgcaatggactccatttagagtcgatgagtctgatggaacaccaaaggttaggactttaatttaggagtctactttcaattctcaaaagatggggttttagcaaaaaaagacctctgcttttacatattatatcatccacattccaaatgtgaaatgcagagagttgtggatgaaaacgacgagaagcttcgtacgctgaagaaccagtacggtgaagaagtttataatgaagtggtaagaacaaaactagagattgaggaacataacgctagtggcagctatgtgattttagagctttggaactatgaggaaaaccgaaaggcgacgatggaggaagcaacagatgtgatgttgaagataaggtccaaacttgctgctatgaagaacaaacgaaagaggcttgaggtctaacttaaagaaagaagacaataattcaagtaacaataccggagacgagaaagtgttctgtttttcgttaatttaccagtttaaattagttttgctactacaactattgtaccgaattggattttgtttcttcaaaagtttttctccacaaatcttatgtgttgtttgattttttacgtggagtctggagctgaaaatctttttccggttacgtatgtttggtaaattgggttacgaagttcttacgaatatataattcaactgtcgaattttaacaaaaagcgtctgtagtccaacggttaggataattgccttccaagcaatagacccgggttcgactcccggcagacgcaatatttatttttatacatctattatcaaatttttaatacatttagcaacgacatcgttttattataacccgccaaaatcgtatcaccgattggaagggtattatcgtctaatcataaaacgtagtatgttgcgtgcacgcgccgaaccaaatcgtgtggccacaatttctcggaccaaccgtctccaccacacgctttgtcttctctttcaatttgtttccggcgagtgaagaagaagaagatatttgttgctgatggcgggtacttgcacttcgataaggcctcgtctcattggctcttcttcaattgttgagctttcaaggttgattaatcgagctggagttcctttctctgtacgattctctacaagaaccagagccctccacggtggtggtttaaccgcacctacctctcgtgaggaaggtccttcttgtatcttcgttggacctattgattctgctcgcaaagaaactctagaagctctttatcgccaagtacgcctaataaaaatctgttttttggttcttcaaaattcgtctctatggttgtggagtgtgtattattcagaaatttagaatcctatgttttaaattctaaattttgcttctttttcttattggattggtctcggtggatattgagttctgctttatgaaatttttatgttataggctaaggatgcgtattacaatggcaagcctttgatagttgatgacatgtttgacagagttgaggtaagataacactgttagcatattcttgtgtatgtagcaagatatgatttttaaatgttggattctgctttatgcaattgtatcatttctgttgtagctaaagcttcggtggtatggttcaaaatctgttgtcaagtatcctcggtgtagtctactaagacagtcaacatatgctgatgcagaggtacaatgtgggtgttcatgtttccatttagctcatatgatacagatgggcctagatttttcattgacatactataaatatgtaactctcgagaaagaactctatgtttgcttttcatatgcgtttactacttgtcatagtgggaaaaacatcactgcatgtctgtttagtagcttagtatgtgatcattgttttgctgctgctgaacaatgttttgtcaagagttgatgttgagataaatccttgtaggacaggatgatgcatcgcaagttctcctgttagctaccgtatggattatgattttcttatttggtagttcggcatgtgttttacccacgatatatggcgtcggcctggtttatggaggagatccgtttgactcagggcttgtctatagcagtcagttgtcatcttctgtgcctattttgtcaaagtttaatggcatcctcctctccgtgctagggcctgcttttggatatccgattgcatcttctgcaggtaccttaatgcaaacacgattttacctataatctggtaatagctagcatttgcttctactgagataataatgctgtttgcagtaagagtacttaaagggttatggagaaatgacttaacggctctaaaaggagactgcccgaattgcggggaagaggtgatttctttacttgtagttcttttgcagcaacaaacaaaattgttgttgttttcagttctcgtcacatttgagtttgatgaacttgtgtaggttttcgcatttgtgagatccgatcaatcgaaccgatcagctcacaaagccgactgtcatgtctgtgagtgcaccttggagttccgtaccaaagtagaggtagatgttagtgtttttttcccgtgtgttgcttcatcgtgaccttgtttatttgaacaatctctgtggtttaaatgtgaaccagtcactgccttagattaatccttctgtagctttctaacaacaaagattatttgtttggttgtctatctgcttcagaaatctgcctcacgattggggagaaaatgggtttacggtaggatataccttgtttcacggccaaggagagatcggcgttcaaagtttacataattctaacaaaagaagaaagatttttttgggatggtttctactcaattgtgtattgtaaaaatgatactatagaaagcttttgtaacattcaaaagattcataaaaattgttactataacgttttgtctcttgtagccttatcttcagacagtttacaaaaacaaacaaaagaacaaaaagattcgttccaaagttccaatgcctttgctgctgagtgaaaagaatgttgctcagcttttttttcagaagtgtgccaagctatagacaagaatccatgcgagctgaagacagaacattaaacagattctgttagaccttataattactgttaaagaaagagtctgtactgttgagatgaaaacaaacttaccaaaaagagagtaagtgacgcaaagagaccctcttggagtaaagctgcgtggcctccgaaatcttcttcatcaaccttgagaatcattgcgtagtaaccataaactatcccagaggatatcgccaaaaacctgcaaaatcccatcattagttcattacatcacaaagttttgccaaacttaagaggtttcaaagaactgtgatccatgaatctacggctttgggtcgatgcaaaatgaaactaaaacacgaagaaactgatagaaacgaagctggaacatgatccaaaactaaagactgttcctttgcgttttcatcaaccattataacatgaaaacacaaatgtggaaagaaacattagtggccaaagttaatgaaaacttacagaatgatccaaatgcctccaacaagtggaatagagccccataacaatccagagatcaatcccaccacttgtcgaatccaatgtaacacatctcctaattgatcctgcatcatcattaacaaaacaaaatccaattcataccaataactcaaatttacttgagcttaaaattcacaaattgaacagtagagaacagcttgatcggatcaattattcatttccttactgattcagtaagatcgactacgacgattcattaatcaaatctccatgtaaaaaaagtcaaagactcaaagagattgccgaaaactagggaggaagaagagagtgttgagtaccttgtcccaagaagcatcgggatcgaacaatttcgctaatttcgatggagacaagtgagcattctggtgattctcttgttgttgtagctgattcagcttggctgatttcgattctttcatcctcgctttcaaacaaaaaacaaaacaaaactttggatacggagagaatctgaaaccttgggaagaagaaaccccctttgtggagtattgaattagggttcttagatttaaagcactgttaattggtgaactagtggctgagtcgtgagattattattaaactgtgagtgtagttcatgttctgtatcgaagtgattcggactgtgatcgagtttcttttttttcttcttggtaaattaaaagataaatccattagttctagtaattaattatcccttaattataatatattgggattagcttttggatattttggatctgatgcctcaaaatactgcaattatgtaccttgtttatatagtgaaacaaaattatctatactgatgttttgtttttgtctgcaatatattaaaaaaaaaaactattttcgagttctgactttggtcaaagtttgacttttatttgtaaagtactcttcctcaaattcggtcagtttaaaactttagttaatgttgctattaatattaattaatgtagtcatatagtttttaaactaacaatatgagtaatatttatatattattaaaaaaacaatattagtaatagcctaatatttgtcatactgtaatttaaaaaatttatatagttttgaattctcataaaaatttgtgcaaagatattataatttttttttgtgtaaaactgattttatcctttggtaagcttaacaaataaaataaagttatcgttgatggcaaaaaataaaaaaataataattatcctatgcaatttgcatctctagtcctcgttatttaaataaactacagatcgaacccatttctcgttccttttttttagtctccctccgcgtagaagcttctccgagacttgtctctgctttgattgaagaagacgcttgatcgaaaattcccttagatttcgtaaatagggttttacagaaggtgagattacacagagatcggatttgcgaaaaaaaaaaatgggaagtccaaagaagaacgagaacaaaggcttcttcgccgccatgacttctggcttctccatgttcggtaccgccgtgtcgagatccgttaacgggtcagtttcttttgaacttcttttttcttatctatcagaattttgcattaaagttcttgtttttgtgtgtataaaacactaaagatgaaaactttgcgtatgtgaatcgctgtgtttgtgtgatactctgtagttttaatagttaatacaataatatttcatgatatgttgtgttatcgagtctatgtgtgatggtctgatggataagcttattctctgttttgattcttcatgtgtttcattttgttgaattttatattagaaacttggataattctattattaattcttatcaagtcaataaacagatcaaagtttgtcaatcttttgtctgaagttttctggatatagcatatgacctagttttgaatcttctaagtgaattgtgttatggtactgaagatccaaccatgtagattttgctaatagcagttagatgcattttatcttcagcgtgcaaggtaatgaaggagttgaggtcataaatccagaaggtggcaaggaagatgctgaagaggaagctcagaaaggaaggtggaaggacgaggtaactaatcgtcgatggtgtctttgatacttcttcttaaattcctctatgtttctctacttacccgaagaaacttatgtttttgtatttaataggaacgagatagttactggaagatgatgcagaaatatataggttcggatattacgtcaatggtgactcttcctgttgttatatttgagcctatgactatgctccagaagatggctgaggttagtgttatacatctaattctcctgtgtttgtaagtatttgttgttttttgtgtgtactgtattataacatttgcaaatttctcacagataatggagtattctcatttgttggatcaagcagatgaatgcgaagatccatacttgcgtttagtatatgcttgtaagtattagtatttacacacaaaaaactcgtattgacttccgactttgtaagatgtatgttaagagttttacttttcttgtggttgtacgtgaatttttatatagcatcatgggctatatctgtttactatgccttccaacgaacttggaagcctttcaatcctattcttggggagacatatgagatggtcaaccatggtgggatttcttttatttctgagcaggtgcggctatacatctcattgttactcacatagtggataatgactaattcgcaataagtcatatatttgtttcatttataataagttactgtaatttttcaggttagccatcatccaccaatgagtgctggtcatgccgagaacgagcacttcatttacgacatcacatcaaagttgaaaactaaacttttgggtaactctgttgatgtttaccctgtgggaaggtaattttgttcctatttatggtccgacctctctctcactttggtataggctctaggaagaaatttttgcttcatgtactctttcctttccatagttctctaaattctgtgttctgtcttatactcttatgttataacgaaagagatacgaaagattgtgatgtaaccactatgttagtagcttttctgtcttatactttcatctaagctcatgcagccggtctattggcttgcagaacgcgtgtaaccctcaagaaagatggtgtggttctggatttggtgccgcctctcactaagattcacaatctaatatttggacgaacctgggttgactcacctggggaaatggtcatgacaaatttaaccactggagacaaagttgtgctttatttccagccatgtggctggttcgggtaattgacaagacattgcttcatcttattgttcattgatactctgttcattttgtctcgtcttgtaatcccgatatgctattaaattgaaatttgctaccttgatcgcagttctggccgctatgaagttgatggctacgtttacagcgcagctgaagaaccgaaaatcatgatgacaggaaaatggaatgagaaaatgagctaccaaccttgtgatgccgaaggggaaccccttccaggaacagagctgaaagaggtatgtcgtttcttttccgttttacatttttactggcctttgctagggttctgtgtgattatactttgcaaccttgggttattgttgaccaacattgtttgactttttagcggttgcttatgcttgtcgttggtttttcttgttttcttcaggtgtggcatttggctgatgtccccaaaaacgacaactttcagtacactcactttgctcacaagataaacagcttcgacacagcgcctgctaagctcttggcttcagactcacgtatccgtcctgatagatattcccttgagcagggtgacctttctaaagctggttccgagaaacacaggttcttcatctttcttccttcatcttttcttccttcttagtcacttgcagtggccaagactgatcttatttcttcaaactaggaaagatactttgagaatgattacattgttagatcacacaaaacactaatgttatgctcatgaggttcttcgtgctgtcttttaatctcagccttgaggagagacaaagggccgaaaagaggaccagagagacaaagggacaaaagttcactccaagatggttcgatctaacggatgagatcacacctactccatggggagatattgaagtataccaatacaacgggaagtacaatgaacaccgagacacggcagagagctcaagtagtgcctccaacgaaacggacctcaaatcgatcgagtttaatccttggcaatatggtaatatctcaaccgaatgaagtaactcttatagtttaatttgttatctctatatacgaatgctgtgattcatgttcacttgaaagtgagtcccatgttgtttttaactttgtttcagactgaaaaatctgattatgtagtttgagtgataaaacataagttttgtgtttctgtctcattgtatctttgttccatttcgatcaatagtaattatgtttgttatggtattgatctttatataataattgattgaattattcgtcctacaaaataaatgtgattcaatttcttttcttaatatacaaaaatacaagaatacattgaaattaaggagtattaattacaacattaattggaaaataattccttcttcatttatttcactgtcatatttattaattggaaaaaaaaagtgtactattgtgagccgccttgtgaagcataccaactttgaagtttgaagtgttgtgaatcatctcttctacgtcaaccatgtctcctcaagtttcctctaaccattttcccttttttcttcttcttcataagtcagatgtaattatcttcagtttttagacatttcttgttctttctacagattcgttaaactagcatttacggctttttcaatattcaatatttacatggctttgttataacgaccaatcaccatcgtccatcgataaaagcttatgcttagaatatgaaaaccagaacaaatttaataaacgtaagaaaagaagataataggagcaatgacgagattcttgttaggttcattgatagtctctcatgcatttttcaataagtcttaagtttcaagacgtcatggaacctttttcgtaacccacacgagtttggtttctattttagacaatttcgtatatatatatatttttttttcataataatatttggccaagatattaaatccattccaatactaaaaatatcaagaaatttcggataacaacaaaaatccaaattataatcctagtattggatttccgattgatgcccagtttagatgagaaccaataagaagaagtaattcaaattattgtatttatcctcacaatcgtgaaatcattatttaaaatggacgggccaatagatttccatcgatcatgataaagcgtttaattatttcaacttttatcctaaaaaaaaacaatagaaatattttatttcatcttatcctttctaaggtgggtggttttgaaatgttatcacacacacatcactgttctacgaaaataatatataatatatttattgagttttacaaatatgtatatctatataatatattgtttgtttattattatttacaattgtaacaaacaaaaaatatcttatcatctataatatataatttattaaattataattctatagtatcagtagctagacaagagaacaacattcgtgctatatgaaatcattagaaaatacacatagcattttgttcctaaaataattaaacatgtaatcaaaatttaaatagttgtttggatttatgttttcaaagtgaaaatagaccaattaacattcaaaagctggttgatgctatttttaacgtatacttaacattaaaatatttgttttagttttgccactctcgataattatccctgtcataggatgaggcccacctgttaggtacatgggcccactgggacccaagatttcttatctccgaacttaacgccgtttacacatttccttccaatatacacacaccgaactagatgccgtcaatccaacgccgtttatggtttatcctcccctagacgttaagattttgacggtttgtttttattatcctacaaaacataactgaaaaagtgtaaaacagagactcatttgacgttagattctgcaagtatctctaccgtccgattggagcaagtgatcagaaatattattactaatcaaaaattgatgaacatgattttgagggcaattttccttaagtaaaaaaatcataaagagacgataatgatgtacaaaattatctaaaactgagtataattatataagctatagattaaggtattaagaaaagaaaaaaaaaggtagatccacctgccacgtgacagaatgtcgtatagttatagtttacagattatctccactaacctaaatattaatttatatatatagaatccatgactatagtctatagttgaacttttagatttaatactatgaaaccaaactcaactcttttaaatacttgaaaatagataattttaaaattaatgagtaaagatatattcttggtaaaaaaattagtgtgtaattataacattccatataaaaaatcttagatttcttcaaagataagaactaggaaaatcaaagtaatttttgtaaattgtttactaaaactgaataagaaaatgaaagttgcatatatttttttcaagaatctgcaagtaaataaagtgtaactttaatgagatgtaattttggtttgacatggaatattctgattgggtagattcaggagtcatgtgatgatacatctatgccacgtggtaagatctgagggattacaagcaatgtaaaagcgtggcgaagaacctggtctaaaaagatgaaggtgtcgaccgataatagccggtgaagagaaagagtataaccggtaggaccggtggggaaaaggtcaatataggcttaaaaagggtttaagcaaaaaatgtggtcgtctttcttaagggtttttgtttttgtggcgtttcacagagagagaaagaaataggagattgtttttgcttgtggtgagagaagatcgcatcgtgtgggtagcgtttcaaacaagtaaaataataaaaagaataaaaagtttccgtcactttctcgaggaagaaggggttttggtgtgagtcctttctttgcgtttgtcttttcattttccgatctcgtaattgtcgtgttattcgccggaaaagttaaagattcagatttaaaggtgagagattttacagtcattttttttttagtcatcctgattctgtctttgaatttcataaaaccaaggagattttcgttaccttggtctgaaaatctctgggtaaatcccaattttacgtttttttaaaaaaaattcgtcgatttttatctttcatcgctttattcttcgatctgtaaaatccgatctgagatttagaacccttttgaacacccgtgatctggtggtcctttgatcttgagatcgaagtttttcgtccatacgattattttcttaaatttttttttatggtttagggttttcctgtggtgaaatatttggaacgacggtttgactctcaatttcagatctcaaagttgtttagggttttagggtggtttaagcttttttcaatgggctttgacccaaaaccttcaaaatcattcctttttttgcttcatgcattatttccagagacaaaacccttttattctgtttttttttttaaatttaaaaccattggctattttatctcgttttcttttgatttcaatgtctctttctaatttgatttctcaattttatctacaggttgggaattacattcacagaatttcgttgattggtgtgataataagccattgatcaacaatcttcttttgtggcaatcacataatcgtgttatgcattctgagaaatggtgtcgcataagtgtgtagaagaatttggatacgcaagctacctggtaccttccaatgcaagagcacccagatccgcccgggtaatggccttatcactcatgcgttttttttagttgtatggagttcattatcagtttatatgattacttacgtttggtttcatcttttggccagaagaggcgcagtatcgagaagaggataagtaaagaagatgataatatgtgtgcaattgatctattggccaccgtagctggacacttgtcatttgagagtgggagttctctcatgtctattgacaaactgattgaagatcatcgtgtaaaggaggaattcccggaggaagaaaaacctctaatgccagtagctttatccccttatcggggatctttgagtccctgcggattcagttctgtgataaatggcaaagtagagaatgaggtagatggttttagttactctggtggtagtgatgcttgtcaagtcgggaacttcagtcaagatgtaaaaccggatatcgatggtgatgcagtagttctggatgcgagacctaatgttgtagttagtttaggtagtagtagtagaaccgaagtgccatcaattgggaactgtgtttcccatggcgttcgggatgatgtaaatttgtttagtagagatgatgatgaaaacttttccaagtacattcacccgcgtgttacaaaacattcacctaggactgtacctcgtattggggacagaagaatcaggaagatattggcttctagacattggaaaggaggttcaaggcattcaggtagtagcctgcctaaggggttcttatctgtttcatatcttaaatacatttgatgggttttgttttaatgacatgtatttggtgttgcagatacgaaaccgtggagaaattattacttgcaccagcagaggagctatcctatcaagaaaaggaaaaactttgaccacatatctgattccgttactgatgattaccgtatgcgtactaagatgcatagaggtaaagagactttttacgcctaaacctctgttagatcttgtagctagctttctctttgttgttttaactagatcttgtaaatttaatttgcaggtagtagaaaaggtcaaggggcatcctttgtggcaagcgactcccatggtaacaatggagtctcatctgaattctttgtcggtgttatttacttacaaaagcggagaagctaacatgagaatgtttatttcagtgaaactacggatcaagtcgttcagggtgcctgagcttttcatagagattccagaaactgctactgttggctcattgaaggtaacattacacagctcttcctttcgcctcctattaagaaagtaagttcttatggtcctttggcttctgcagagaatggtgatggaagcagtgagcactttactgagtgatggacaccgagttggtctgatggttcaggggaagaaagtccgtgacgataacaaaacccttcatcagactggtatctctcaggataactcccacctggactctcttgattttagccttgaacccagctcagaaatgcctcaactgttaactaggttcagacttctattcaccacttaaaacccgccactgtgtttaattattcaaatcttttgtggcttaatttcttatttgttttccagtcacccgttgggacatgcttgtgaggagctgctacctgtgtgccaagctactaaaatagacaatgtgttggaatctgaccatcatgactcagcattattcccatctgactcattaggcaacaataatgtgacagaagattctaaagctatgatttctgtggcgctcaacgaattgtcttctcaatcacaaccaccttcccggaaatctagaagaagtgaacagcagcagcagcaggctgcacaacgcagaattcgtcgacctttctcagttgctgaagtagaagcacttgttcaagcagttgagaaactcggtactggaaggtaaaaaaacactaatacaagtcatatagtgttggcttatttgtgattgtgaatagaagaagatgatgattaaagtttggtgaaaactgtaggtggagagatgttaagctttgtgctttcgaggatgctgaccaccgcacttacgtagatctcaaggtttgcattttaatcagtagtttaaattctaaattcggtgaaaccaaatcgcatgattaggtctgagaaataactgtttggtatttgtgcaggataaatggaaaacgctggtccacacggctaagatatctccacaacagaggagaggagagccagtgccgcaggaacttctaaaccgagtcttgaacgcccatggctactggacgcagcaacagatgcagcagctgcagcagaatgtgaacaagctggagcaggagacacagtctcaaacgacagagggtctgttacttctctaaatgaatctgctgcagccttggaggtcgtctctcctttgtgtattactactactattgatgattatgtaagattctgacatagatgcaaagatttggtcttttactttggtttgatttttttaacttttctcaatgtaaagtttttaactggaataaggtttctctgaccagtttagggcttttagaggatctgttgtacatcttttgtgacattctcattctctttacatatttcttatctagactttttaaaaattcctcgtgtgtataattatttgatgtgctacttgtctgattccacgagttcgagttttgtcgtgtgattgaattcgaattgtcacttaccaacgtcgttaatacactaacactatgattggtctgatcgctggatcggtgaaccaattggaaaatccagttcaagttgttttagcaaaaaccaatctcttctctgaaccggaaaactgtaaaccggtcagtacttgatccataagaaaccctccgagtgatttgaagggtttgagctgtgttgaaaatggttcgtcggctctctctaaacccctctttttgtcgactgcttcttcacgccgtcgaggaattcttctccaccaacgaatccggcgacgtcttatcaccaccttgtcgaatctttagttgatgttgtttaaaggtgagtccaaattccacgcgccgccttgactttcatgaatgtgtgttttgatacatttcctacatattccgatgttttctagctagatctccaacgattttctgattgaatttagggttggttacatgatgatctttgactctaactcgcaggttttagctaataagggcatgaaacggatctgctcggtttcaagtgttcaactttgtaagttaaactaaattacataactttattcttggcctcttgcaatgtttttgcttcttcaagtcttttgattttgtattagctcagtgactttgataaagtgatgatttttgatcatgaacagactaatgaattcttcataaccttatggattttgtgaattgaaacagatattactctcaattgcctatagatagattttaagtttggaatcctttatctaataactctctttttagtttccagaagtttcagagctttagcatcgccacgttccttgaactatcccctgcagtgtatcaagcgttcatcagttcggatggagagtagcaacttttcttctggtgtcagaaccgagagtagtgtgaagccaagaggagcattgatagttctagaaggtcttgatcgcagcgggaaatcaacacagtgtgctaagctactctctttcttgaatggtttaggacatccgaccgagctctggagattccccgatagagagacgagtgtcggtcagatgatatccgcgtatctttctaataagtcgcagttagatgatcacacaattcatctccttttcagcgccaatcgttgggagaaaaggttcttatccaattgattccctttttaatcctctagtgcttagtaagaagacttgataagttattggcatttgcaggtcgttgatggaggaaaagctaaaaacaggaactacgcttatcgtggatcgttattcgtattctggtgttgcattctcatcagctaaaggtctcgatatcgaatggtgcaaggctcccgaaatcgggttactggctccagattctgtactttacctggacatttcacctgaaagagctgctgagagaggtggatatggagatgagaggtatgagcgagtggagtttcagaagaaagttgcagacttttatcaaacccttggcgattcttcatggaaggtaaatggattaagactctttgtttgttcctttgtagatttgacacagaatcaaacaaaactaaaccttgaaatgtttgtggtgatgtagataatcaatgccagtgatgccatggaggaagtagagaagaagattcaacaagtggtattagatcaagtcaaagaatgtactgaaggaaagcctctgtctctcctatggtcgtcatagaacgttttcgagtcatagcacttgcaagtttagtgattttgaaggaacttttgttgaagtttatactatgttgtgccatctaagcccattaacaggcccaaaagtttagtttatgtcgtcactcatgacatcttaatcgattattttggtgtaaactaattgagcgtcattaagtaaaggacaaatcattaaacgatagtgcataagattaactaaacccaagttgaagaataatcagagtgtaattaacaatagtatcagtagatgaaatcattattgatatcatacaaataaaaaaagcaagagacagtatgtgagagcaatgtaaccaaaacatagccacgcgctctcgactgtgaggttccccaacaggcctaacattgaagttatgtttggtcggtgtatatcacgctccgtgagagaaatggttactgagaatcaacttctgattagtacaagattatggttcttcagggtcaacacaacattaaatccttataaaaacaaaagtacaataaccaaatcgaatgattaaacatcacttttaacaaacatgtgttcacacactccgtggtacattaagaaaaaataaattgatatacgtaattaagacattatccaaattgttaattggacaaataagacatttgagactttacgaaatggtcccaaacaatttagtaacactttctcgacgtttacgaaatcttcttcaatccttaagttttagtgctaacttaaacttgttttttgacaacgaataatttatatattaaaaaaattaaccaattggaaatggtttctcctaaaatattagttttgcttcgtaataatctacactcattggggatatcacactcattgtatatgtgaggagaaaatattctaggattctttctgagatggagatatttatatattcaaggtttttgtaggacaacgaattagaacctgagcacttgatgttaaaaacaaaaatatttgggagataaggtgaatttagacactaacaagtaacaagtcgcattcatcttgaatattcctctttcttccactttcacctttatattgaggcattgactctataccaattgagtgattgatcactaatcatattataagaaatactaattatataccatgtcacgactgtattaaggaatctaatcgcgtcgtcttttgaactttgactgttcaagaaactatagactgagtcaaagatatgaaatgattttgttattgccgacaaagattaattgatttattaataataataaaccattaggttttggtatccacgttcctttcacccaaaatatttgtccaattccttggccatcaagatttatctttatagtttatataataagatgttataatacagtattataaaaaagacatagaaatacaacaacaacaaaaattagtgattgaaaataatgtcgaataccatatctaagtaacagaacctatatgttctaagttccactactatctatccaaaaccacataaggaatcagatgcaagccaatatacatccacctgatattttatcaaaatgattccattggtgaaaatgtttattagaaaatatgtgagattggatgatttttttatattttaaattcaattctcaaagctgagtaaaggaacctgacttttagtcatgaccaagcaatgcaagtgggaagatattagataagtaaaaaagataacaacacaagaatcaaactccaaaaccctagagaagtagttgcagatagatccgacacaaattaactaacctcttaaattatgtatgttttaataacttgatccactttttgtggctgcttactgttttcctcgaaagttccatttttttcttttgctctgcaaacgaaaaagaaccataaatttttctcatatttaaagctctctctttctctcacaactgtgttcacatgaactttctcaccgctttcttctcttcattgaacaaaaaaaaaagctcttaacttttttttcttctttaggtaaaatttgacaaaagctctcaactttcaaactctgtttcttcatcatcatcatcatcaccatggacgccctgcttcaagtttcagttgatgggtttagatttgagaacggatctggatcttgctgcaaacccagaaacaatctcgaatctgggaacaatctcttccctgatttccacgagtctcagaatcagtcttcaccaaacgattcacctccaacggtgtgtttggataactctcctgttctgaagtacatcaatgatatgttgatggacgaagaagacttcgtaggtatatctcgtgacgatttagctttacaagccgctgagagatccttctacgagataattcaacagcaatctccagaatctgatcagaacactagctcctcctccgatcaaaactccggtgaccaagatttctgttttcccagcacaacaacagattcatcagcgttggtttcgagcggagaatcacagagaaagtaccgtcatcggaatgatgaagaagatgatcttgagaacaatcggagaaacaaacaaccagcgatatttgtctcggagatggaagagttagcagtgaagttagaacatgtgttgttggtatgcaaaacgaaccaagaagaagaagaagaaagaacagtaataacgaaacagagtactccaaacagagcaggaagagcaaaaggttcatcgaacaaatcaaagacgcacaaaactaataccgttgatctacgaagtctcttgacgcaatgtgctcaagctgtagcgagctttgaccagagaagagctacagataaactcaaggagataagagcacactcttctagcaatggagatggaacacaaagactagctttttactttgcagaggcgcttgaggcacgtatcactggaaacatctcaccgcctgtttctaatccgtttccttcaagcacgacatcgatggtggacattttgaaagcgtacaagctgtttgttcatacttgtcccatctatgtaactgattacttcgctgcgaacaaatcgatttacgaacttgctatgaaagcaactaagcttcacatagttgattttggagttctctacggctttcaatggccttgtttgttacgagctctgtctaaacgaccgggcggaccaccaatgcttcgggtgactggaatcgagctgccacaagcgggttttcgtccttcagaccgcgttgaagagactggtcgaagactgaaaaggttctgcgatcagtttaatgttccttttgagttcaacttcatagccaaaaaatgggaaaccatcactcttgatgaacttatgatcaatccaggagagacaacggtcgtcaactgcattcatcggttacaatacactcctgatgaaactgtgtcattagactctccaagagacacggttctgaagctattcagagatatcaatcctgacctctttgtgtttgcagagattaacggaatgtacaactctcctttcttcatgacgaggttccgagaagcgctttttcattactcttcactctttgacatgtttgacaccacaatacacgcagaggatgagtacaaaaacaggtcactgttggagagagagttacttgtgagagacgcgatgagcgtgatttcctgcgagggtgcagagcggtttgcgaggcctgaaacctacaagcaatggcgagttaggattttgagagccgggtttaagccagcaactattagcaaacagatcatgaaggaggctaaggaaattgtgaggaaacgttaccatagagattttgtgatcgatagcgataacaattggatgcttcaaggatggaaaggaagagtcatctatgctttttcttgctggaaacctgctgagaagttcacaaacaataatttaaacatctgaaaaatgttacttctcaattacatcatttttgtttcccaatggttttgtagaatatgtttgatcccgtgagtggatgcaactcttttttcctgcaagtacatattgtattcaaatccttgtggaaatgataaattgtttaatcaaagatccgaagacaacacgagcacttttaacccaaacaaattcaaaacttttggctataatttatccaacgggttgcaacaccacgggaatgacgatacagacagagcaacaaacgatctactagaacatatgaaccgatgtaactaatagcatatagattgctgtagttagctaatttaaaccctatttggtttgaggttttggtggcctcaaaacgctccagtccaccttcttgctcttgggtttcttaaaaccattgccctttttattgctcggtgatggtttgtcaaagctccttggggacttgttaggacggttttgttcctcggagactacctcagactgttttcttttcaagtcaccatctgtttccccacttggctcaacctttgaactctccggttcactgaaagaggatgcattttgactagttaccgtttacaactttaacgagaagcaaaatcagaaatgaactaaacgataagtaggtgataaatctatttgcaaattgctatcagtaacgacttcatttgtctcaaaattagatgatcagtaagacaatagatctccagcgttgttctgttgtatgcacactctctggaaataacaaagaaaggaatataaaagcaagagtacagacctaaaagacttttttcctccattactgctagagcttgagggatttccaccgtttattgcctcttcatgtaatttctaaggagaggacagttttatttagaaagctgaaagatcacaaagtatttcaggccacagcgtcacagatactaacctcgatagagggattgaaagactgaaaagacatgcgtcctaacaatgctcctggctgaggatcccaatctgttatgaccacactgcatcgaaaatcacacattagtaaacactacaaaacacataacaaaagggtagacaatagatacacaatgtccttgtttacagtaatctgatgaaagcaaaacataaacatcaagtaagaagaaataacggtaccacttctttgcaacagtcctaagggaaggaaaactcccattaggctcttcttcatcagccttcttcttctctactttcagagaagacctttgcataaactatagacagagagtattatcaatcattattaacacgtatctttttgtctctcacccaaaaccagattatcaactaagagctacatgattgatataacacaattcttcagtgaaaaattgcaactttagtcccaaaccaatgtttataattggtgctaagctcagtgctacccccaaggtgaaatcaacctcgaaggggattatcaatttgtccaagaatcaaaacccagcttaatagagaaaagactaaattttcaagctcgaattcaattcaatttcagtaatttccttgagtttcaaatctaaggtcatgtaacatgaataaagctacttctacagagaaagaaaaaagacagtacctttagatttctcagagtgctactaatctctctcttcgccattatagctttccaaaattacaataactacgatattcccgttaccgtagaggaggaacaacaactccgcgtgtgttttcgtttttctaggtttagaagattttccgatttgaagctccgtccaaaaaaacacacttaggtttaactggtctacacctaaccgattcaaaccgtgccaaattgatttttttattaccaaaccaaagattctattggtttaattttttggtatttatttgatcatgtctgaagaatccaaccaaatccaatctgaaaaacagctgaacataaaaagtcaaggaagcaacttgaggagaaaacaatggattatctaggaatcgacttgagctgcgcaatcggatctctccgtaacggtgagtttccggcgaaagattgtcttcttcctctcatttcaaagctactcggttacttcctcgtcgctgcttcaatgaccgttaagcttcctcaggttggttaattcaatcaatcaatcaatcactatgattttacaaccctaatatctctaaactgaattgaacttctattgttgtagataatgaaaatcgtggacaacaagagtgtaaaaggcctaagtgttgtagcatttgagcttgaagtgattggttacacaatctcacttgcttactgtcttaacaaagaccttcctttttcagcttttggtgaattagcttttcttttgatccaagctttaatcttggtggcttgtatctactatttctcacaacctctctctgtaacaacttgggtcaaagcaattctttattttgctatagcaccaactgtgtttgctggtaagattgatccttttctttttgaagctctttatgcttctaagcatttgatatttctctctgcaagaatccctcagatttggaagaacttcagaaacaaaagcactggacaacttagtttcttgacttgtctcatgaactttggtggagctttggcgagagttttcaccagcattcaagagaaggctccacttagcatgcttttgggtattgttctttctatcttcaccaatggaatcattatgagtcagattcttttgtatagaagcaaaggaaacgaagataagctagtgaaaagtaaaaagatttcatgatatattgtaaaagtgattcaaacgatgttgcacttcattgaataaagtaaagcttttttcataactactcataatctcaaaaagtggtctcaatcaaagctttaaattacacttatttttcctcttacaagagtgaaatagttatgtggttttctcgctattctcgatactattagctgcaaaatgagccagtgaatgttttgtttaagcaatggtttcaatggcgaccttttgcctggttctaatctccttggctttgtcatcaacagcatcccatagttgaggaagagcttcacgtatgttgtgaatatgctccaatgcaatatctactccttcctctctgtgtgaggtcccaacctaatgatacaacaagatttttaaaaaggtgagctttgagaatgataagttttgttttacacttattgagtctctgcttcttttacttacccatacggtgtggagaccaacgcgcttcccagtttgaatgttgcggatgctgtcatcgaagaacaactgaaaacacgcaagatatttgcaacttattaagtttcagtgatgaattggtttaggtaggaaaaaagaaaagaagcagtgatatgttcttactgtcttcttaggattgatgttggccatcttgaaaacctgttcgaatgctccttcagaaggtttgcatacaacagaagtctttggaagttcaatgcttgaatcaggatttgccatgtaactgattatgtcgaagatttctctggttttggtatcaacaggagattcagttttggtgatggggttcagagtctcgaaagatatgattttctcaaagcagccctctaggcctagcctggcaataatcttggctgcatgagccttgtctgcattcgtaaaaacctgtgagcaggtttagaaaaaatagaagatcagagaagaaactgattggcaaccaaatttaagagcttagtatcaaggagtcaaaacacatacaactttccgaataggcaagctaagaataatattcctcagaattgggtcaggcttcagtgttgagtatggcaatctcccatgaacaaaactgtaaaacaaaagaggaatctcaagttccaaacaccttacattttacaagacatgtaaaacaactatgaaagacaggttaagttcagtaccgatggaaatcgtcataatcaaagtcataacccacagcctgaaagaatcaacatcagaaacaaagggcatgttcattaacaacattgaaagatatggaagaatgttaacaatgtggagaaataagataccttgagaccagccatagtagttccatagattttataaagggaaaggcaaagttcttggactttatcttcttcaataccaagtttctgaaccatatattctaaacaacaacaaccaaccaaccaaatgttcagctaaaacataagcaaccaatactcgagagaagaacaacaagtgaatacgagcacaatttaccttgaatgttctttttcacttccatggccaaaccagaactgagagggtaaagagtatcatctatatctgtatgattaaagtcaaaacaagtttactttaatcagaaaacgtttaaacgttaaaccatttcttaatcatcaaattgcaataaactaatgttaatattcaaatcccaatcctaaaaattgttcctttctcttaccaaataaaagacaatcatatttagcttcagaagtttgctgaaagtgttcctcatacgccattttgataccaaatcacacctgaaaacaaaaccttaaccaactgaatctcaatgtcaccaacacacatttcacataaagttggaaactttgacatcagatcccatagattataaatctctcacatcaccatataacatttctatagatcagcagaaactacactctgaaatctgaatcgaaatctaacaggggacaataatgaaaatgctaaacgtaaaatcgtaactaaaagaaaaaagaaatcaattagccagatcgaaacataccgagaagaatcgaacaaaagaataatcaatggagaaagtgggaaccctttctgatcaatgaaacttcgcgaaagagaaatgaagaaaaaccaaaaaaggctttgaaggcaatatgttaaccaaacgtttcaatggtgtccctcatgagtcatgactcatcgattggttgtcgttaaatctggagaaaaagcgtttttactcacgtcgacatctacgatttctccacgtgacgtttagattttccttcacgagataagcgaattattggatgacacgcgtcatttaggagccgaccaaacacttttcaaaatgtcgtgcgctggcccgccataaattcggttcggtttagtttattgctaatgtaccattacggtccagatggaccgggttattcaatcaaaggtaacttgaacaaaatttccatctatttatttgtttttcaaccatctaaatatttagccaatactgtgtatatatatatattttttaactagtgtttgtggtgtaaagcttcattttactttattttaaataaaagtagtgatatgttatatgtaaattttgttgttgttatttatagcaaggtacactacatgtggttttgagggtaactatatagcatatgactacttatggcttatgtataggctaattaaaacaaaaccaaaagttgtgtagtcctcaaaaatagaagtgaaaatcaaaaagaaagagcattagaaaatataattctgtttgctacgagacgacaatgaaagacagaggagacatttaccttagttgttttggggtgttttaaagagagaaatttttaagatttgagagaaatggtgatgaagagaaaataattgatggagtgaatataacgacgtagatatgtgtttatataagaaacaaactgatgcgcgtgaaaagctatgtcaataatagcgttcgacttttgtccaatagtacttattaatagtatatagttaattttaacactattaacactatcttattaaaagaactagttctcatgattcccgttgatgggggatttatttaactaatttgattcagtacgcaatacatatcgtattctttatcatgattaatgtcacgttttccatttgactctgactactatgacaaaataaagagagagggacttttaggaatcttcttgtcagaatataaatgcattcactgttattggttaaatttgtccataagaccataaccttaacaatcaacatacattatacgttctttctcaatcatgaaatcaagagagtttatatatctacgatccatcttctaatatggtgcaataaacaggatcttttactagcacattattgatatgtacaaaagagggtgattaaaatacaattatagactataaatacgaatcaaccataaacggtacatggatagacgacaaaaaaaggtacatagatattttattgaaacattcaatgatatgtaaatatcatcatatttagtactaaataaagttaagcttgaacagaagtttcaatcgagatctgtgaagcgtaatcaattctttcagtttctttgttgttgataatggattccgaccataactcggggaatgcctctttcatgttgtgaatgctttctaacgcgtaatcgcttccatctattttctctgatttaccaacctgaaacattgatatttttcatttaacaatttgataaaaaaaaaaaaagtacatacatatatgagtcttcttcgctcagtttctaggaactaattttaatagaattatagaaagatgtttgtgttagttacaaaaaagaatcggttttagttggtgttatgttaattgtttcttaccaagactgtatggagaccaacggctttcccggtttggatgttccgggtactgtcgtcaaagaacaactacacaagcaagtagcacgaaaacgttgattagacgataaaactattgattaattaagaaaatataagcctaaaagaaaagtctaattaggtttaatacttacggttttgtgaggattgagctgtgcaatgtcgaaggctttctcgaaagcaatctcagttggtttacaaataaccggattctcgggaagatgacctgtgacgcaagaaagctcagcttcgttgatatcagggtttaaggtctcgaaacttatgattctctcaaaacaatcttcgatgccaagtcttgtgagagccttcatcacatgaacctcatctccattcgagaataccttaacaatagaacacagttaatataaaaactgaagctaagccaaaccttaaaaaaaagataaagcgaatatataataccaattttcgcaaaggtagaccaaggaggagactccttagaaccgggtccggtttaaggttttcataaggtaatctaccatgaacataccggtggtactcgtcattatcgaattcataacctaccgcctgcataaatgatcttgtaaattttaagtttcgatttaatcataaacaaatttcatatttgtgtaatggaagaaatcagactcagttattgtgtctgatcaacatatattttatgaaggtagttataatttaccttaagaccggccattgaagttccatatttcttataaagaatttggtttagttcaacgactccatcttcatctattccaagcttttcaaccatatattctgcacaagggtaatatggtgattttatataaaatactaaacatattaagaagtaatcacaataaaaatctttaagaaaaaaacatagcaatacctataatgttgttggagcatgcatctgataagccagagcttaaaggataaagagtatcatccaaatctgttgaaaacaaacatagatatatagagacgatagatcaacaaatttgttaattgcttctaatgtttcaatgataaagaaaagaaaaaacaatttcttatcaattattaccaaagaggagacattcatatcttggtggagagctgttcacaaattccatttctccagaaactgcaaatctggtggttctaaaaatcataaacaaaaacaaagaacatttatatttataagaacttaaaaagaagaatatatgtagaacaatatggttggttttatggtttagaagaaggaattacctcaaataaaagatgacagaaaataatagacgtgagagagacgaagaagagaaaatatttgatgaagaaaagaagagaatgcagagtctctttatataagataagaaacttcaatgcgtgtgacaaatgaaaacgaattctctaaaaatgagtattaattaaacaatatagacgacgagtactttttcttaatctagtgtataaatggtttcgctgtcaaagagacatattttatgattatagaaatagttatcatgactcccgtggatatgcaattctaaaacaaatgaaataaaattgtaatattagataccccattataaagtctacgcgtcaataattatacatcgttctcttgatcatgtcacgtttccatttcgatctaaactaaaatatataataaagacttgttagatattcttgaccaatttatcttatatcttttcctttcttttctaattagactgatgaacgaaccgtgtgatgcgacaattataagaagacctaaatgataaaattaaatacccgattttggtcttatttttgttgtttcttcatataaatattttggtcttaaataatgaagctaatatattattgtagacgactccataagcacggaagggttcaaaacataaaatatcacaaaaaaataatgctacaacatttcatgaaaaagtcaaaattagaaaatgtaagtatatacaaaagtgtcaaatcattttacttaaatttaattttacactatgttatatttgttcattgagaagaatccattgatctcctaatccaaatattccgttagaaaatatcgatggaaattatcgttccaaaatatcgtgataaattgtgttttaacatattaatctatgttgctgacaaaaaaaaaaaatcattcctcaaatttatcttctagttttgcattctcaaaatttgcattttctagtttccacaatttctaattgagaaaatttgcttacatagactgtttcttttcaataatagacaagtaaaaaagttacatattaatttttaatttttctcctaggaaaattaccactttttgaagcgacttctcctcttccagcggcttatacgaacctgggccaagtgcaaccggtcggtttcaacggctaagatcagccggcgtaaaaaagtcaacacaattagttgagccaatttatagaaccttcctcaatgtttacagttttgcccctgcataacttgtcaaagcccattacttttttaaaagaccttaagctattctacatattaccccactgggccagtttctcttagcccataggcccattgttagttaccgaacactgaagtaaaagaggttcacttctctctctttctatgtgaagtttatctgttttccagtttcgatttcgaatcaaatatgaagctgaaagagtttttctgaatctttgtctttgtatccgttatctgaattctattcgccatggaagctgtgcttctctgctcgaagcttgttcctagagcggcgtcgttggaagggaaccaaaagttttcgttcaggcatttgaacaaacaccttaagtgcaattcccttcgtgctgattccagagacactccgttgctccgaggttttgaagcgataaagagtccgtctatctggagttgtgcgccgttcccagtgagaaaaggttcatgggttccacccagatgctcgatttctagctcgactgtttccgattccgataaccctttccttagccaatttcgaaccttctcttttgggtcaatggtgaagaaagttcgtgagttgaaagtgaagcccatggatgttgtgaagttaactcttttgctatcgattttgactgtggctgcaaaaaagactttgactttggtcttggacccattcttctggatgtattttagctggacatggttgttctggccttggtttatcgctgtgggtcttgcgggttatggaatttactgtttccgtaagcattggcttggcgaagccaatgcctttgagcagcttggtattgtaacttcagtcttcacatggctaacacttgtgcctcctgcttatttcaatggttatcttgaaggctggccttatgtgttcttcttggcgtatcattacttctttttcttcaatgttagcgtgagaaaacgcctctatggagatttctatgctcgcactcatgatcccaaatgggatgtgaacacgcctctgtggtctcggattttgtttggtgttggcatcatggttggacattggcttgcagcttttgaagggcctgagcttcaccgattaccagggggttgggccaatgtagggatatggattttgattgtgattacaatgcttatgcattatgattcaacgctatatcttgctagatattctgaaaaggttgttgttccaacggctgttgtgcaatttggtccttatagatgggtcaggcatccgatatatgcttctacgatgcttcttttcgctgcatactgcactgctctgcgtgcgcctttgagtctgttgtttcttttagcggtttgtttggtttactacaacaagaaggcaaagatggaagaagaattgatggtggagagtttcggacaaagctattcggattatgctgataaggttaggcacaagttcattccttttgtttactagtagtggtatagaggaacctgtgttgtgtctaattttctggtatctatcagccaaagatgtatgaatgaagatgagttctcatttttattggaatgttaggcttgtgaaaaggatatgcttttatgctattcatggttctcttaaattctatttcaagttatttttccatcaagtattaactagtaatattagtttaaagttcaactctttgggttagcacgaatctgaaaattgattggctgttatgaaaaccaaacttcacatcatcttgattgcttgtagctgtagctaatgagtgtgaagttatttcctaacacatattatgattgagtgctttatagtattagtgccttatcttttgtcctttgatgactatccatctttgctgttgcaaaattaaccgtgatttgctgcattcgttttcttttttcttgatgcttttaattgggtacatgtgaccctaattttctaaatcttctgatcttaactgattccctgacttaaagtatatgaacacctccagttaaaaactaaagctgcctgctttctgagtgtttagtagcctttacacgtaagaaaccgcacagggaacaatcttaatcatgattaatttaaataaagtgacatttctaatctaataattttcataatcccacttcctccatactaatcaatcatgtttagtttaataaaattcctctattctgataaaactttcttttatcgtccattgcatttgcaacccattatctaactccacctggaaatgtttctttaattgacttcttcatggtactttggagagaaaaggttttacggtttgtgtataaaagacttgcaatcttgagatatgtcatattgagaactctttagcctttggcttctgttcctgacacttgtatagtgaagtgggcttgtgttatatagatgggatctctctctttatttaaaagtcaattagagatcttgatgctacttctgtccctttccaagtgattttacgtcgaccaactagcttttttcatatgagtgtatatattcatgtacctatctctctcaattgcttctcaccaaaatcatcttgctgattcatttgctgtctgaatcctcttgctttcctctttgctttttcatttgttgatttaaaccatgggagttcccaactttagacctcgaaaccgataaggatctttctctgcggttgaaatagctaggttctcgatgaataggctagcctttggtggatgttatcagccagtagtcgcagatgcagcaccattaagattcacaagagatgtggttccctttgctttcgcctctcgatccgcagaaaagggttccttatcgagtgggaatcttgatgatgctgcatcagcaaatacatggctactcttgtcacttcttttttgtcattctctagtgaagagagtaatgatgtcttggagatcttacacaaaaacacaaggtaaagtctcttttcttgttttctgtctcttggcaatatcttgatcatgcacatgctgtgaaatatctgtaagtttatggtgtttctattttgcttttgttattggcaaaaacattcacatgtggaaggatcccacatatgctttaaaaccccaaacaagattgtaacaactgtatttaaaataaatagactatgataagtttctaagatgaatgtgaaatagtgagaactcagaagtgagaagtctcttgtggctatggtttgtgggaactcacatggtcacatgtgagaatggtccataagtgtttgttggtcaattccttgcctttggtcccaaggtttattgtgtatttatatagtttcattgaccgaggaagaaaaactaaacatttcttccacatggatcatatgaatctcgagacacattttccttgttaaaaaataccttggttaggggagaaattaatgtataattgcaaataatcaaatattgctgaaagtttgtttgagaaaaatgtattaaatttacaaaatttacataaattggtgggtctattgtgcaattgagtatataaaagtaaattcaaattttacttgctatttgtttacatttctatatttttgttagtgacatttctttggctaatcgtacactaatggtcccaactcctgataacatattatatatatttttatatatatttagtctggcatttgtaagctttttaacaagtaaacaacgatggcagagaaaaataagtagtgacgtcgatgacaaatagtttaataaaagcttctgtgctttgctatttctttatatgaaaatctagcccgataaacaataattaatctctcgataatatgatatgccatgttacttctgaaaataaaataaacgtataatatgtttgaatttatgtcaagtctccacatatcatattagtttcccgtaattcatccgcaatttgcaaacatttaacctaataattgtgaactattttcgttgtatcaccagtcgaatttaaatctagtctagtaatatttacactataatgacaaacaaaaacaaactaacaaatcattaattaataatgtcatcgcttatgtatctaactcggaaactatagacgatattatcataacttatatatgttcggtattttatagtagtactgaataaaacaacaatatttaactttaccgactttttaaaagacattatttccacgaatggccttaaaagctttgacctatttcattccatacgctctattatctctttagttccgtcttcaattcaaacatcaaacaaacacacacacacatatatattttctatacattcatgtagtacatctatataagagagagtttggatcaaaagaacttaaaacatccactcttgattcatggatgatgaaaatttgtggaaagttgtgaagaaagattccatcttcgaaacgactcatttctcttcaaaacctgtttttacacgaagcttctcaacaaaaacttcttcttcttcttcaaaacccgttttcacaagaagtttctcaactaaacccacttcgtattcttcatcagagcccatctttagacggagtttctctgcaaaacccacttcttcgaaatctccgtttctatctagaagcggttccacgaaatgccctgttgatacatcttctacttccaagtgttccatctctcggagcttgtctcagaaaggagcttcggtgacccgaaagtgtcgtaatatggccaaggaacacaagtctcggttttacatcatgaaacgttgcgttctgatgctcgtttgttggcacaaacatgcctgtgattcgtgaagaaagatgcataattaggttatttaattacagattcactctttttttcttatttttttacccatctgttaatttttttccttaagttttctgtattaatgatatactccctccatctcttaaattaaatgtatttttgttttatttatttattttacaaagtgatgttttacattttcaaaacaaatagaaagaaaaaaaatcaaatttactcatgtcagatgtaatgtatatacagtctaagataacatttaatttgaaatggaaaatagaattttattgaatcacatttgtatctctactcatgatatattgtaatgtacaaagtgtcctggaatttagttttgtccagatatattttcacactctagtttgtttttcttaagtagtttctttgattaaaatggttggatactcttgtattgaagttagagagattccctctgaaacattgggaaattaaaagacataaacaaaactgtacgagtgttccagttccaccgttcgcatttatatgtgtcggttcatatcacaaataaagtactatccttagatataaaactacaatatgcaaattgttggaaaaaagagaatctatcggcaaattaaaaccgcattgttgggcttggcatatctgtaatggacccttaagaagaaatcatatgggataataaatctattgtgcatgagtcgaatctaattgttctagcacataacttagatgaatttacgtagcctatgtggtggcttggtggctcatcacattcatatatcaacatcgtatacataaatgtttacattcttttttgacaactgttacattgaattgtgaaattctgcaaaattaataaaaacgaagaacatgaacaaagggattgggaaaaaaaaactaattattgaaactaagtatatatcaccaaaaatcaatcccaaatcattacaacagagagcaaagcaacaccgaggaagacggcaataaacttgtagattggcttgtcgaagtaacattcctcacgaggcttatacccttttgagatgagatggttaaccgcaacgtacacaaaaactccacacgcaaggcccatagagatcgcgtaggtccagtcaccaccagctccttggctagtggcattgattcctatgccaatcccgacacctatgggactcgatatcccaaaggcgaaggagtagacgacagtgaggaagaatggacgtttagggattagcttgagaagagctattcccattgctacggccgcaaagaccttgtgcaacgatattgtccataggtttctccaagcgtcgcttttagtgtctgaccaaaatattcattacaaaacgttactaaagaatcatgttttaatatgcatcatgaactggctccaactatacaatcaataacaagtgcttttgatttccactgttcaaggaccaaaacctaaataaaacgagtagattacctaaagtcacataaaatgaatgatgaactacgtctaaaacaattccatctagattaactacttgattattttgcaaaaaagcaattagggtttatcattgatagtttacctgagagaccaatggcgattccctcaaagatggagtgaaaacaaagagcaaaaatcagcaaagctgtgtctccaaatccactagttcgtataagcgcttgactcacatcaacaccactctttatctcacgacgtccttcctctttcactgccacgtcatcatcctccctcgactctccgacgctagctccgacgtggttgttattactcccagccgctacaaacgcaaccgccacatctgccagcattgtaaggcaatatccagcggctgctaacatgaaggcgtaaggatactctttgtgttttaaccctcggaaagtctcgttagcgtcgctgaggaaatggattagagcggtcgcgaggaatataccaccggagaattgagttccgaggaggagaaacgactcgttccatcggtaaaagtaaggtgaaactccggctaagaatgtgctaaagaagagtattataatacagtagatcttcacaagcaccaagcttttcgatcggagattcacgacggtggttgttccggtggccggaggtggctggttggtctcctcttcttcgtcgccgtcgtctatgccgccgtgagctaggatcaaggagaaacagaggaaaataatagagaggaagaagagagttgactttagggttttggaagacaaagccattttagttattgtttgtttgtgttgtgctttttcttcacttcatgaacattattagtgtaatgtttatatattttggtgtttgtagtacagtgttgactttcttgttggagatttgctgtgacaagtacaacggtaaagtaattgggaagttgtactacaaaaagtacatacaatgtaaataagttaataactaaatcgccggcgaccaaaggagctgattctttgtgaaacgccctgtaccggatacaattatcccctatgattagagtcagaacgttgacaaaatttgtaatattaaaatgatactttgtttccttcttaagaattttttctttttgtctagtgaattatagagattacatccataaacttttcagaccggactatttgttgatggtgcaaaacattaaaccgaagaggaatagaagtttcaagatctaaacctttttcaacgttagtttattttgatttaaatggcaggaaatttctatttttggaaaacgttttgagaaatagaaactttctgaaacgtgacaaaaagaatactaagacaaatagaaattcctttgaaagaatttacttttcaaattttcggtagaatattgtcaaatcaaattgtttccgtattaactttgcctttaataccaaaaatattggatattttcatttcgattcctatggctacgaaataggcagagtgaatatactgtactgtatacctctttttttgtcatcaatgtatatttttatatctttaacgaaattttgtagagttgagcaattgatgatatagccaatataattacttaattagtaccacactaccacgtatagaaaaatcatttcattttaaatgagtgcatgattgtcatataagttaattatttacgctctacgatgtaattcaacaaattataaaaaaatgaaattttttgtttatacaagatccatttagtcattaagtagaccgatcatatgcgttataaaacatatgatgttaggtcgaaggtatagaattttcggtctaattcacatcttgcatatcgagaccgtgcctgtcctgtgagctttgattatctatgacatttaaaatgttgtaaacattcaaataatccagtggtgatggagggcatgacgaatctgcgcataatgacagctatctcaatatacttttatatatatacacattgactaagtagacttcttttaaatttatatgttattgaaagaattatccatgtatatatataatttaatatggatgttggatagtattcaagtagaagtcaacaattttgttacttctccttctccattccatatatatgaatcagcaattttaaaattggtatcgtgtactcttgatgctgatgaaaattaaccttttaaattgaagaagaggtaatagctagttaaataaactttgaatcattatatcaaatgaatgttaaacgttcactgatattctgatacatgtggctaagaaagattcaaatacagagtagcttaacacataaacataacaaacacattatttcttcttatttttggtacattggtttaactgttgcagagccaagaacagagtagctagctgaagcgagaaacacaccaatatagagatggtagaaatatcttacaaacacacaagagccaataaacttgtctttttcatattctgaaatttgacagatgcgatgttccatcaagacctttcttaaagtatccttctgagtattctctcaaggttgtgtctctgtattttggagggttttcttcagacacaagctctttcatcggtccataaactgttgaattctcacgtatacttgagctgaaaaagctcgctacagaaatccgtgggcctcgtgtattcgctagtaccctatgctctacacttataaacttatcgttggttatcagctgcaaaatcaaagcaacatatataagcaaaagacatttaattttcaaggtatctgtttttttctttttcttttcagattgttactgtacctgcaagaaatctccgacgttgactaccagagctccaggaagaggagagacatcgacccaagagtcttgatgaagaatttgaagaccaccaatgttgtcttgaagaagaactgtgaggaaagagttgtctgagtgtttacttattcctaaagttaggtcaggttgtggacaaggtggataataatggcagatcataagcaaactcttcaagcaatccatgctcttaaggatctcagatttcaaacctagtgcttctgagagaagctcaaagagcaaatcacctaagctcagtacatgctttgagtattcaatcatagcatccctgagtcaaatcaatactgttagaaattaatcactctaatacttgattgtttccgagtaaaaaaagaacaaagaaaagctaagactattttcgttacctgcaagtctcagggagctcctcaggagttggaggatcaggagccatgtaacaagagatagaatctctccaagtaagagacggcgaagaactatatagatcgaaattactactgtatgcaaatttgttcttggtgaaatcaagcgagtagtatgatttcttgacctcaggatcttcttcctcgtgaaacctacgaaccccatctttaatctcttcaagaacgtttaaaggaacaccatgattaatcacctggaagaatccccaattctccaccgcatatttgactttctccacgatggcttcacgtgagggtgtgtccacgttgacgcttgcaaagtcgatggtagggatctctaggtctgaaacagagcgtttcttgtctggtaaggtatcttgagggacgtggaaaattcgagggatctcggtgattttagcatcgatgagccctttaacaccttcttttgtattgtcgaaagctttgcgctcgatgtaacgatcgaattcgacagagtttttggccattttactgtttcttacctccttctaaggaacagcaaaatgaagataaaaaggacgactgagaatagacggttgttgattctgaccggaactaatgttgtctctttctctctttcacactgactttaatgagttgtcgtaattgaatttttcttcgccacttttgttttattaaggactgattagtttttaattacgcatataaccctgtaaatagtgataacagtggagaaacaaatttgctggacggctcctttggggggctggtttaaactgaacacagacggcgcctcgcgtgggaacccagggtcagcttcagctggaggggtgttgaggaacagtatgggtgattggtgcggtggctttgcggtcaatatcacttgataacattttacaagtgataagatttaaatacacagtagctcaacgaatatacagatatacatagtttacacacaacgacacacacaattatttcttatatttggtacatgcattggtttgattattgaagagacataaacaaacagtataattgatgcaaagaaactcattaagaaatttctgtcgttttcgtttttcatatcctgatattcgagagatgcgacgttccatcgagacctttctcaaaaaatatttttgaatactcttttatggttatgtctctgtattttggagggttttcttcagacacaagctctttcatcggtccgtaaactctggaatttggacgcatacttgagctgaaaaagctagctactgaaatccttggtccttgtctatttgcaagcactctatgctccacacttacaaacttatcgttcgttatcagctgcatcaaatcaaacctaaaattatttaaacaagacatttaagtttaaggtatttggttctacagattgttactttacctgcaaaaaatctccaatgttgacgacaagagctccatggataggagagacatcaacccaagagtcttgatgaagaatttgaagaccaccaatgttgtcttggagaagaagcgtgaggaaggagttatctgagtgtttcgttatccctaacgttaggtcaggttgtggacaaggtgggtaataatggcagatcataagcaaagtcttcacgcaatccatgctctcaagggtctgagatttcaaaccaagtgcttctgagagaagctcaaatagtaaaccaccgaaactcaacacatgctttgagtattcaaacatagcatccctgagtcaataaacaatttagaaatctattaaacgacctaattaagttgttaactaatctcacttctaagtttttaagaaaaagttaaagaatattcccgttacctgcaagtctcagggatctcctcaggagctggaggatctggagctatgtaacaagagaaagaatctctccaattaacagacggcgaagaactgtatagatcgaagttactgttgtatacaaattttttgttgccggcatcacgcgagaagaatgatttcttgacctcaggatcttcctcgtgaaacctacgaaccccatctttaatctcttcaagaacgtttaaaggaatactatgattgataacctggaagaatccccaattctccaccgcatatttgactttctctacgatggcttcacgtgaggctgtgtccgcgtggacgcttgcaaagtcgatgatagggatctctaggtctgataccgaagcagaaggtttcttgttggttaagatatcttgacggtggtggaagatacgaggaacttcagtgattttagcgtcgacgaggcctttcacaccttgttttgtttcgtcgaaagctttacgctcgatgtaaggatcgaattcgatagagtttttggtcatcattatgtgctcttcctgtctaattcccaaaggtttctgctatatatgaagaaacaggaaatgaagataaaaaaggaaagattgagaatgaatggtaggggttgggttgatggtgtgtgggtccgatttatgtttgtccatttttgtggaatatctgaatgtaggtaatgattacatgaatgtggtctctctctcacaccatacacactcagacttgtcgtgcttgatttttccttgttttcttttagtgaggactaattgtactaaattattatgcatttagccatctttgataccacttgaatcaccgaaatttgagttctgaaactgaggagaggattttgagtgttgagtatatgtgatgtgttgttattaactcatagttcaatatttggactagacagttttgacctggtcaaccatttccaaccataaatgtaagtatgtaacggtacgtacgaataagaaaaacttggaattgaattcaaattcaaatttggcaacttcaccatcaattctcgcaacttttcttcttttctttttgttttctctaagaatccaaggaaaaactcaaaaaaggttaaagggttcgggcacacattcttttactttctcggattttctcggaaaccaaagaaagccaaattcttgggaaaagtttcaaagcatctgggtccaagacaaaagatgaacacttctatatgaacattatacattttgatgtaacaacataaggaagaattaatcgaattgataatagaaaacgaagcaccaatctttttcttctgaatcttatatttacattgttgaatgaacaaaccaaaaaataatatatatatatttctgaatcaatgaagaactgaagacgaagaatccctgttacttctgtttcttctgaagtatcttctcatcactgaatttgacctatccaaaaccctagattctacttcaatgttcaaatccagattatcagaagaagttgatatcgcagctgatgaagaagaagagctacggtttggtctcactctcctcattaacgacaccattccacgaaccatcctcctcaatcttccaccggagccggaacctgagccagtaccgttactatccgattcgagtgtaccgtgtgacctaacccatgagatccgtctaggaccatcctggctattaccaatcccaccaccatccatttctgttaacaccactggcaaaactctctctccgtctctcattgctgcgttaaacctccctacggcgaatccaccaccgggaagtctccaaatcgtcatccccacggcgttatcctcctcgttgttgttgctccgtcgattaggctctgaaggtagctcgaatctgcacacgggacaagagtttcgaatcgatagccacggtacgatgcaatcgtcgtggaaaaggtgtttacacggcatctcacgcgcctccgtctccgtctcgaaaatctccgtgcaaacagcgcaattagcctccgagcctatgtggcaatccgagatttcgactctaggtaaagactcaatcgccgatttagacgccggagggtttccagatctaccaattccagtagccgacgcttcgatttggcttagctgttcaagtaaccgctcgaatccagatcccatcaagatctcagatacagaatccggaagcggtctaagacccgatccggatccgtcatcgtaataaaactcaaaagcgcgtcgatctctagccgcatctccttcttctccctcttctctctcgccggcgcctccttgaagtacgatgaccggattaaaggacggacgacgaccggatctccggcgtctaatcacggatctacggttgttattgatcgatcttacttcagtagaagccggaatcgttaattcggtagcggcggaggaagaatcgttaatctgttcgataaaaccgccgtcgcagtgagggcaagcgacgctaccgacggttgttgtgccttgatcagcccaaacgctgacgaaacgcgtacagctgtaacaccaatacgaagccgtgatcggcgttgttgtagtcggcgtcgtcggcgttgacggcatctttaaaatcttcttactcggtgaaaggatctgagaagaagaagaaagaagaatcgctgaccagagtaatgacagagaggtttgaagatgagaaaatgaaaacgtggtttttaaggcgattcttaggagcggaattaacggtgtcggattagacggtaaatagacacgtggtgagtgtttgactgggtagatgatagcggagttataaacggtcgttacgtatagagaaggagcgttttgaccaaacgtggaaagtgtaaaacgccgagtagaaaattcaaaagaagcgccgtgtctgctgtttgtgggatccatttgggacctatttgatctccgttttttctgggaaagacactaaacgacatcgtttcgacctgtgaatcatgccagaaacaaaagtgtgctaactgcaaaataattatatcactttttaactattttttcttctttttttaaaatgaatttcattaaacaatttgtgatatactactgtattttataatgtcgaccaatgaggtggaggatggagtatttagaaaattagaattgttacacgttgatggctcaatatgtttatttgtcaaccgatggctacataaattataggtgaatttgataaaaatacattacataaaccaactagtatctttgtgtatttgtttttttggtgaatagtacctttgtgtattaacaactaaatttataactcaatataagggatgtaatgctttcttaataaattgaccatattatcaaaagttaaaaacaaacgaaaagaaaagttcctcaactatttttcttctctttttgtttgcaagttgcaaccaatgaaaatagatagacaaatcgtaatgatggcaactgattaccatcttaaagactagaaacacaaatacaattgattgacatagaaataaaccacggtttgcatctttattatgatcagacaagcattaaattttattgactgcattgataagtcaataacttcaattgttttgcccgccttgaaggctaagattatgcaaggaggaaaaagacagataaacaaaatgttgcacaagtgaaaatcaaaaagcttttgaaaacaatgatctaaaattagtctgaaacgaacaatggcagctccgaatctataccagaactgaaaaaatgccagcttgaatcatggaatgctgcaaaataatcatctgattccgtctcaatagcaaactcgcttgtgactctttgtgcagctatgattcgtttggtagcacagatgacttctgcgtcaaatgaaacttgctcctcatacatctgaaagctgttcccaaacaatgcgattttcgacagtcgatccattctccaatttgcttgcaataggttgctgtatagattggcctcacagtgtggcatgaagaaaagagtaggctttaaagcttccctacgagcttgctcattcacagatagaacactgcatcccaaagattctaggtaactagattcagttgcagagagaactgggtcaaacacttcaatgttatcaccaacccaatcaaactctctcttcatcaagattgcaatgctcagctgaaacctcggagattcataagactcaatgctacctataccgtacatcaccatctgcaactgtgtttcagaccctaacacgaggcgaatctgattcgaaacctcaggagacttaagctgctccaagaatgctgtgtaaaaactcgagctttcgattttcttcagagagatttccatcttctgctttagtcttgcttgtctctgtggatcaatttcaagatcatctgatttccatggttgctcttcttcttctgcttgacctttaggtttcggttttcttcttcttccttgtcttcctttactaggtaagactactttccactcaccatcactgcttgagtttttaacagtcgtttccattgaagcttccacaagaaactggttttcctgatctacttactccacagtcccccaaaattagggtttctactcaatgcaatgattccattggttccgattacctaacatcacaataaatttcgattcctaaacctaattatcaatctctttgcttaactctgatctatctactttgagattgacaaaaatcttcgataccgagcaaaattaaacttacgattagagacgaaaacacaggaggaagatcgaagaagcttgcttgaaatacagaggaagcaaagaacgcttcgaatatgtggtgaccgagtggactcagtgagacatttgtgagtttggtgcgccgagtcgcgcggcgataaagtgaatcagatgatttgtacgcgaagatttggtaaacaggtattgggctagaggaaatggaatgggtctagatacggcccaataaaggcgcgagatagagacaactgaagtcttgtttcctgttatttcttttgattttgttttactaatctaaatatactaaatcagcagtcaattttccaataactgatgcattcagtgattgacacatcagcttagtactacttttttattttttcatttttacgcatagtatgtgtcgtttttatttaactttgtttcattctcaaacgattttctctttcatccccacgatctccacatctccactttctctcttccaaaaactccatgactactgtgtaaaatctcaaagatgggtttctcaacatcattaatcgattactcagaaatcaggtactttgttcatctcaatgaaccaatttaccatcttctatttttgtttgtaattttgttttatatatatagaattctccatagatccgaaaatcatatatccttcttctagatttctatggcttttttttttttttgctttgtttctgctttatttgactgaattcgatttctctcatacatctccatttttccataggattattctttaatacaatcaatgcctatgattctcccgtctcacaaacactcaaagaacaacgacaaattttggcttctcatctgaacagttgccttaaaacaagggtgagtttaatatcttaatcgaagctcaagtgtttttttaatggtaaattaattctcatactttttactattcttctttcatctcttattttacttctttatatttgcaatttcttttttgtattaaaccgcaattgtattttcacgcaagatttttgtattaatacaaatacttcaattttaaagtcatctcttattttacttctttatatctgcaatatctttgatattgtttcaaaggcagcgtctgcgttatgtagttacttacttgtgcacattttacatttttttttagacttccaagctttgggtgtcaacgaatgtttgtaaactgaattactgatgatgagaagaagaacacattacaattggttggagctaatgatgaaataagcggacatgtatatacccagcataattttcgtacttatactctcttatatttctaaactcttgatttgttagttactgtctatcgcaattgattcattgggtagaaaagttgtaccttctttatatctttttcttaatctttgtatattcttcagtcaatgataataaatttgttgtatatttatgctgtctgctttattttaaaaatcttagttaagagttgtagcagatataatttaaaacaatgttgtccctgcatagtaggggccaaatgctagtagtagtttaaaagtaaagtacgtaaaataaaataacgtgtatttttcattataggaaatgtagtttaggccgttattgttctttttcattataaaataacgtgtattttatgtgttgctgtttaaccctaaactcagacagcgaatgttgagttccgatgcagtggtgtatggtttgcggatacagtaaaacttttataaattaataatattagaattgcgaaattttgttaatttaaacaaatattaatttatagagaaattttttaaatttaataattgttttaaaaattgaactcttttcgtagcccaaacccaccggtattgaactctttttggcccacttagccacgttaaagggtcacttgttactagttgtaattgcaactatctgcctaaaccgtcgtgccttttgtctacattctagaaccatgcactaatgacgtggctggagataagttggttgattacacacgtgtcacttagacagagcgagtagactttgatgcgggtaaaagatattttagattatctagctcgctaggccacgttggcggatatttgcactttttctttttttaaaaagaaaaaaaactaggctctacgaattttccggtcaccttctccgatctctgatccgatatttttccacatgttgttgagctttaaaggatttgaaaccgttatgaaagttatgaaaacgaagagtgtgtgaaacatggggaaggaagttatggtgagcgattacggtgacgacgacggagaagacgccggcggcggcgatgaatataggattccggaatgggaaattggtttacccaacggagatgatttgactccgttatctcaatatctagtcccgtcgattctcgcgttagctttcagcatgatcccagaacgaagccgtacaattcacgacgtcaatcgcgcgtcgcaaatcacgctctcttcgttgagaagcagtaccaatgcttcgtctgtgatggaggaggtcgtggatcgagttgaatcgagtgttccaggatcagatccgaagaaacagaagaaatcggatggtggtgaagcagcggcggtggaggattccacggcggaggaaggagactccgggcctgaagacgcgtctgggaagacatcgaaacgaccgcgtttagtgtggacaccgcagctacacaagagatttgtggacgttgtggctcatctagggattaaaaacgcagtgccgaagacgattatgcagctgatgaacgtggaaggacttactcgtgagaacgttgcgtctcatttgcagaaatataggctttaccttaaacggattcaaggattgacgacggaagaagatccttattcgtcgtcggatcagctcttctcttcaacgccggttcctccacagagctttcaagacggcggaggaagtaacggaaagttgggggttccggttccggttccgtcgatggtgcctattccaggctatgggaatcaaatgggtatgcaaggatattatcaacagtatagtaaccatggcaatgaatcaaaccaatatatgatgcagcagaataagtttggaacaatggtgacatatccttctgttggtggtggtgacgtgaatgacaagtaaatggatcttaaaggtctataatttgctctacagagagatactggtgagcttgttttcgtcttcttctttgagattcttattctttgatgtttgttcatgttactagcaaagtgttacaattttcttggtagagtgttatggtcaaatcctagtttggtgttgttatatatttactctgtctttgcaagtagttgatcttaattgattcttgttacaggttcttggcttatggtttattttcccacttcatgaggttgttgtgacttttaattctccatgttttccacacaagtctttattgcctttgtatagaaaatgatttcgagaaaatcactgggaagcttggtattgttggaggatgaagccttctatgaatgatttagtttcctactgtctccattctttatgaggtaataaagccttcttttgctcatcgcttgtagtcttcttaaattcaagacagcgtcacatgtttgttcggttatgttaattgtttctttctttggataatgaagatagcatcaggtctcatgtctcctcactttgataaatatctctttcatttatcattttcttctattaaaatagtttttctctttcttaagaaaagtatcttttgattgtgttggatggtcatacaccaattaactcccaaccacaaggaagaaagtgacatttcaaccataagctcgtgtttctttgcccacaatgagttagtagttttagccttttagccatatagttttcatttggtaaataatctgttaagatctttaaatctgcaaactagatgagaatccatagaatatttctgtgaccaatgtagagtcgccattagaagatcacttttcacctctctgttttgtttcattcaaaagatgtttctctaacgttatcttcatattacttctttgtgggtcactcgtgtctcctctacccttcctaaacttacaacaactgactcaaactgtccttgaaatttccaatgcgccagtcttttcatgggacttagttgagctgtttagtttggtgacagtgaaatattattaaagtaacctaaatgaaagtttcaagtggttgaaacgtggcctcagcaactgtaatggagaagcccaagctctttatctcttatcatgtgaacaatgattttgtctataaatgcagaaactcttttatttttagatacaactgccaaaacattactctaaaaatagaaaccatctccttttatgccatttgattcatgatgattataaagaatctcttctgatacagttttgacttcaaaacagggactacatgaaattcatcatttttaaggaattgacaaagttgtctaatgagctgaatgaggaacctctactcttgacagaggcttgaagcttctctttcaagttgataactctcttcctcatttctgctccttcttcatccataatcaatctctctacagctctctccactgttcctttatccagctctccttccaattgaaccccaattctccaaactctctctaagtacctcgcattgactttctgatctcccgtaaaaggcctacagatcatcggaactccttccccgatgctctctagggtcgagttccatccgcagtgactccaaaaccctcccactgcaggatgtctgagaacttctatctgtggtgcccatttcacaatgtaacctctttctgaaaccaacctactgaattcctccggtaaagactctgtccattccgagccgggaatagaacccggtcggatcacccataagaaaggttggttgctattacgtaaaccccaagccatctccaacatgtctttagtttccattagagccaagcttcccaaacttatgtaaatcactgagcctattttttgcttgttcaaccactcaaggcaactcctgtcctcttcaagtaaactagaaggcgctgaagctgcaatgtgaagtgggcctataggatacactggaacttgcagttgtttttgtaaccatgccaaagatgagctctctagacagcttgttgagttgatgataactgccgaagctgttcgaatgttgacagtctcactgtaaaccttgagtatactctctaatggcccaaatgctgaagttggcaggtccttgtaccttagcggatgcaaccctggaaattccttgtctgacactttgggatctgcaaagcaaacaacagcatttggattggtttatatacctaaatgcacttttaaagtttgagttaacaagctaaaaaatcttgagtacctttcatgtcaagcaagaatgactctgcgttgactctagacaaaacagagcgacagacaaaggcagtagcacttgtcgtgctgaagaggacgctaggaagttgaaactctttaactgcagcttgggagaagtacatgtactcatcgtagacgacacaagcgatatcattaccttgctcctgcaatagttgaccaatacattgcttgaagcttgcctcgcaaatttgattgagcttgaagagaaacttgaatggtccaaggtttttgagatcagactcggtcaagctgcctgggatggtgaggaaatgaaaatcagagaagtccttggatgagctaactcgattatactgtgtgagaacaacagtgatggagaagcccttggagtaaagagccttcccgagttgcataatcggagttacatgaccttgtgctggaactggaaccaatactatccttctcttcactcctagttcttccattgtttttctctcttggagtcttggtctctctctttttttggtcaatgtgtgaatggaaaaatctcaaagacacataaggatgcttaaatgcttgaaccagatctaattaatatgaaatatagcacgtgggatatatattaactgtttcattggtctcatcgacatgttatttatttttatccctaagtggaaaattatgaggttagggaaagatctcaacattgtggaaggaaggacataccacaagaaaaagcacgtggagtatataaactagacaaagaattcccaaagttacaaggaagtgacaaatttggtgactagcaccatttaaggcttccttttgtcattttctttattaagtttgttgtcttgttttggaccatttttctaattaagtctacctctatcatttatttacttattttccctcttgcttaaggttaacatataatttcatgtctgaacataacaactagcacactcgtttaaattatgtcgacgtacgtacaccttagaatttcatttctgaacatgacatctaaccactgtagctgccgcgttgccgtaattcggattcataactttgtagtgtggatgtatagacgcggcaaaagacaaaggattttgtatttttgtagtttacttgaccaacatgttatttatctaacttccttcaaaccgttgttttcttatcaaacaagatcattacttttgatagtaacaaaaccgtgatcttctagtccaccgagtagccgtggatctcctgccctgcttcatattcacaagtgaggtacaagcaggcaaaatgctagtaatcgttgttgaatttggatataatattcatgagccaacatctgtttaaaagcatcaagagctttctcattctgaaaattatgtacaaggacttaaatagtataattctaagacacaacctctggcttgtgaccatcaaaacgagttcgattaaagtaactcaaaagtagttgagttggcgacaaagtgaaattaattggagtaacttaaaagggttcaagtaaaaatagttgatttggtatggtgtcaaagtgaaaataatttgcagtaactttaagagttcaagtaaaaaatagttgagctgtttggtatagtgacaaagtgaaaataattgatgtaacttcgagggtttaagtgattgaatttggtctaagaaactgtaatggagaagcacaacatcttttatctcttatcctgtttgagagtaacttaaaataatgcttctgtatccaaatgcagaaactccttttttttttttttgacaacaacgtaaaaattcttattatagagacaacttccaaatattacacttaaaatagaattcatgtcctgtatatcatcttgatgcactttcgactttgactagggaccttatttttttctttttttgctaagagactagggactatcttatctcccttcatcatcttcacatggaattaacaaagtcgtctagtgagctgcatgaggaacctccacttctaacagaggtttcaatcttttctttcaagtcaatggctctcttcctcatttctgctccttcttcatccacaagcaaccactctacagctctctccacagtttctttatccagatctccctccaattgaaccccaattctccaaactctctctaagtacctcgcattgactttctgatccccggtgaaaggcctacatatcatcggaactccttccccgatgctctctactgttgagttccatccacagtgactccaaaaccctcctactgcaggatgtctgagaacttccatctgcggagcccatttcacaatgtaacctctttctgaaaccaacctattgaattcctctggtaaggactctgtccattctgaccccggaatagagcccggtctgaccacccataagaaaggttggttgctattacttaatccccaagccatctccaacatgtctttggtgtccattagagccaagcttcccaagcttatgtaaataactgaatttgatttttgcttgttcaaccactcaacgcaactcctgtcttcttctagtaaactagaaggcgctgaagctgtaatatgaagtgggcctataggatacaccggaacttgcagttgttgttgcaaccttgccaaagatgagctctctaaacagcttgctgagttgatgataacagcggaagctgttcgagtgttcacagtctcactgtaaaccttgagcgtactctctattggcccaaatactgaagttggtagatccttgtacctcagaggatgcaaccctggaaatactttgtcttgtgtttcaggatctgaaaagataacatcgatcatttggattagtttctataaataggattttgaattaagataaaacaagctagaatcttgaatacctttcatgtcgatcaagaacgactctgcgttgactctagacaaaacagagcgacagacaaaagcagtagcacttgtcgtgctaaagacgacactaggaagttgaaactcttttactgcagcatgagagaagtacatgtactcatcgtagacgacacaagcaatatcattattacattgttcatgcaatagttgacctatacactgcttgaagcttgcctcacaaatttgattgagcttgagcacaaacttttgtggtcctaggttttggagatcagactcagttaagctgcctgggatggtgaggaaatggaaatcagagaagtctttggaagagctaactcgattagactgtgtcagaacaacagtgatggagaaaccctttgagtgaagagcttttcctagttgcatcatcggagttacatgaccttgagctggaactggaaccaacactatccttgtctccttcacttgcttttcctccattgttttctctctctttttcttaattctctctcattctcaatatatgaaatggaaaaagctcaaagagacataaggctgcttatctgatatatagacacgtgagagataggttaactatttcattggtctcatcgacattatatatatatatatatatatatatatatattttatctcttaatggaaagaattatgaggttggggaaagctctcaacattgtgtgaaaggagcagcaaaagaccaaacacgtgggttacaaaattagacaaagaaaccgaagaagattagcttcgggaaatgacaaatgccgtgacttgcccatataaaggcttccttttgtcattttctaatcatgtctatctcattctcatcctttccttttttcttttagctttctttctatttttagttaatactaatattgttttctttttttaacatagatttccatatccaaataaaatagaaaccactacttgatcaaacaagtccgatttcatttgcatagcctcacaggcctcaacaagcttcaaattatgtacttaatttaatataagtccaggacccagcgtcaggcttgtaacaatccaaacagaaaccaaactggccttattggaatcagtttagctgcttggtgacacttgacctcgaggcgcatgtgaccgattcatcttttttttcaaaatctaagtcggttttgatgatcaaaaccagaatgagtcttaggatcaaacagtttctacccagctgctgcctagaaaccttctaaacctcttcttctttatcatcttcttcattcttacaacactttcccaactaccagcattggcatataaactggtcagaagcaaaccattccctgagttctcaggttcgagctctgctaagtgctttgctgcaatccttgcaagctccatgttcccgtgattcctacacgcagctaacaaagcaccccacacaaacaaatccggctccattcgcatagccttgatcatctcataggcctcaacaagcttccctgctcggccgagaagatccaccatacaagcataatgctccaatctcggcac

SEQ ID NO: 930 - DNA, 74877 bp, Arabidopsis thaliana
gatctatcagttacgcacggacaaagccggatcaatgaaatccggggcctcatttaaattaagaaaataaagtattcttatcgttgcagaaaaaaaaaaaaaaaaaaaaaaatgggagctcaattgtaatgtttcatatgttcatgtgctatagtccagttctgcgcacggaacaagtgcaaggtgagagatctgagaaggaaaccttgagttgaaaaccatgaaccttgacataacacttagcttgtgcatgtatgattcatccatgtacgactctttaaccaaagaatagacatgctataatctatcattacagctataaccacttggttaacatgtttttaataattatgccaatgcgaagaacatttctactaaaagcaaattgaaatcaaagataaataggggcctagtgcatgcatgtagatatgcatggcgaatgtttacattgagagtggagacaaatggaatgcaatcaaaacaaattgaaactaagtacagatcataggatactgatgaagttatgatgtaagagtgaaaaagaaaggtaagtgtgggaccaaaggggtcgacttatcttaaattcttgatcgttaagtgcgtttgcattcgcaagtcacgagccaaaggaatggaaggggaaaaaatcttacttagtggagtggccatagaggaagtggtggcgtccacgttacacagtctcatatctgtctgcttacttcactctaatctcttcagaattttgggtcctccattacaaagacacctttgaaaaagaacccattttacacaactgatctctcatgagaatatatacttatatagttaaatatataccattaatgaagattagatatgaaaaatgttataaaattcggccgcatagacgcttatcaagatacccaattttaacaatatctattagaaatccggttaaagaaaaaatcaaccaaaacaaaatcatgtctacggacagccgattaatccctctagacattcattcataatctttataaacacaaaatatttaaaataaaaatatgttaaaatttgaaaaaaagaagaaaaaaaaagaaaaaaaaaagactaattctaataagcgtctagacgtttaggggataagctgtctctgaacaaccaattaagctttagctattttgagaacaatggatatgatgaccaaacccaactaatcacaagaataatatttacttatttaatctttttgcttgaatcatctactaatcatattcttccaaatgtattaatctaattgacactcattatttaccgcttaatttaagtgatcatatccaactactaattaatcgatggctgagatcaagatgacaaatatgcagtagctttcggattgtggtgtgtagaattttataatagctattggacaatgggcaatttgatagtctgaaagcaacaggcaaaaaaatcagaaccccgaatctattacaaccatgatatttaaagcattacaagcacaaccacataatcctttagaccttaaaaggaaaaaaaaaaaacatagcaagaactttttttacatgggcgaggaaagcttaaactagtcttaaccttggtctggtataagccggtttaacttcggattagtcctatatgtgtcggtttaaaattattactgattttttcacagccttaagaataggataaccgcaacttcaatagggttggaccgatgggtccacattgagttattttccaaatgcactaaataaaaatactgaaactcagaataattttaagcgtatcggtatatttttgcttcaacataaagactttgcaacatccatcaatccaagtataattctctcagattcttgtaggtctttttcagagttttccacagaacaaaccaatttgaagaatcttgggaactctttgccaattagagatatattcagagaaaagaagaaatgttttattctttgcttctacggaccagcaaaccaggtacttgtgcatacacagagtcagaagaaccctctctgtaccctactctaattcacatcttgaagatgtaagccacataaactacacacgtgagaatatactataatgtaaggttactgaaattccaataaaccatgtgatactaaatgaatttctatattatatcttaaaacaagtattatcaacggctaatcttatgttcttcaaagatttatggactaaaagatcgaaactttctcataaaaacagagcaccaagaggcaaattacaaccaaagtcaagccaaatcaaattggcctttctcatctaaacaaataatttagttattatttaaaatgaattcaaaatcctaaaaataatatctaagtatctaactttcaatctcaagtgctgttgctagatacaaaaaagccacttatcacacacccaaaacaattcgaccccttttgctatatgctttataaaaaaaaaaaatctccttttttgttcttctttatttgccttttataagcttctacagtgatatttaaattaacctttaataaagtcaagagacacactgcaatcataaactcaccaaaagagtagaaaactaaatgtctagagccttctctccctcacacacacacgtttatgtatgtttcttccacattgttaaaactaaaacgatataagaaaactgcaatgataggttttacattattttctcttctggtttgatatttggatgctgttgatatttcactgacacgagagatagtgcaaatgaaactattgggacatgccaaaagaaaatataagaaagtgttcttattgcaacacaaaaagacaaaagaaaaggcagaattaatgggtgtgttacatcaaacgccctattaacgatcatttccatattttttatatgctctaatggcttgatggcatcacaaaacaatagaccccacattatcaacagcataatctctccccatatggacggtaaagattagaaaacaaaaaacaaaaagaaaatcattagagaattttaataatgtgagtgttatatcgcgtagacacaacacagtattcaagttggcttatataaatattggtaagaggaatgccataggttcccataaaccagctgagaagtaaaattttctattgcagagagaaagagagttagagaaagagagagagagagagagagagagagagatgaaacttgtgcaagaagaataccgtaaaggaccgtggacagaacaggaggacatcctcttggtcaactttgtccacttgttcggagatcgaagatgggattttgtagcgaaagtttcaggtttgaaggtggagggagaaacataagaataggtataggtttgttttggaaaaatgggcggtctttggaaaggaccttccatttaaagaaatgacctggttttggttgtaggtttaaacagaacaggaaagagttgcaggttaaggtgggttaattacctgcatcctggtctcaaacgtggtaagatgactccacaagaagagcgtttagtccttgagcttcacgccaaatggggaaacaggtcagaagaatcttcaagaaacagagaaaccctaaaaatgtttttttttttaaccctaaaaatgttctttgtttgttgtttgagcttttggatactttcatatgcaggtggtcaaaaattgcccggaaattaccggggagaacagataatgagataaagaactactggaggactcatatgaggaagaaggctcaagagaagaagcgacctatgtctcctacttcctcatcttcaaactgttgctcatcatctatgaccactactactagtcaagacactggaggctccaacgggaaaatgaatcaagaatgcgaagacgggtactactccatggatgacatatggagagagattgatcagtctggagcaaacgttattaaaccggtaaaagacaactactactcagagcaaagctgttacttgaatttccctcctctggcttctccaacatgggaaagttccttggaatctatatggaacatggatgcagatgaaagtaagatgtcttcttttgctattgatcagtttcctctaagttttgaacatggtagtggtcgcctttagtctaggatttgattcatttggaatgtttatatgtgcagcatatatatgttatcaaacgacgactgtagtagtttcctatgacttacatcaaaaatcaccacccactgtactaatctcataagtagtcatcatcttatgcctttgtttagtttgtagagtgagtgaaaagatgtgtaatacaagtcagaactctatttccaaaataaatagacttttgaagtttctgtgaaagtttgtaagaaaacatatataatgagttagaaattaatgttgatccatcagaaaggcatggatgagaaaagtctttgagtattcattcattattaaaaccatgaagagtgaaggaagaaaaatggaataagcaagtaacaacatgcatgagtgaacaaggcatattcatttgctaaataatcaagagaataggtttgacttgtaaagcttaagccaactttgtgaaaaaagaatgtattcttctactttatcatcttattgatcaaatcgagtatgattttttttctgtttaagaaatgaatccatgataaaagatcagttcccactctttagtctttatggtaagatatcttttttttttctttgttatatgatgaacaagtaccactaactacaacttcaactttttgtctttaaaatttcaataaaaaaaaaaaaacaaaaaagaagaaaaggatggctgcttaaagtaaccgagaaactatttatcaattaaaagtgtagaagaagggagcctaattgataatcagctcaattcaataaaagaagtattttttacaaaaaaaatgagatcacaaattcgtaggtttttactgccaatcgagcaaactctttaaccgaattggaatgtatgtcaaaaattaagtccttaaaatcttgtcaataaaatgaaaattttcggtatatttttaaatcactatttcaataacattgaatttcattataacttttaaaatttatgattaaataacattagatttgttactttaacacaaatcactcaaaatacatgattaaatacaccccttaatctttaaaacgcataattatttttgaaacatttttcattttatttaactaaattactgtaattgtaaaaaataataatacaaaatataaaaatgtgtcatagattttaatatttagctttgaaataataataattgtttttatttaattggcctaaccatatgtagttactactgtacgagtgactcatggccacacaaagttgttacgtcactcgaaatcttaaatccgccgtcaaaaatgctattcagacgaagcagccaccaaccactactcgagccgccgtagatccagattccttaacagtagatgtcgccgtttgtgaagttttatctcttcagttacaattttctccaagcttctgcatggtatatctcactctttctctccttcctcgtttttcactctcttgccattttcttcgtttaggttcatcagatttgtgttgttgttctccgcagggcgatttcgcttctgattattcttaacagctttttatcgaacaagacgatcatttctgcttacgcttctgctggattcctgattagtgagtagtcaaatttggttaaattgtactccaaagtttgatcgatttgtgaacatgatctctgttgttatgattccgttcaggtctgtttcaaactgctgctattcttgaagttcttcatggagctattggtaaatattggaatgtatttgaatgttttgttcctttttatatgaattatgaattcaaacagtgattgattcattgatcattctctgtgaaatttaaggaattgtcccgagtggattcttgtctccactgatgcaatggagtggaagaactcacttcatattggctattgttggacagatcaaggaggtttgtgtgttttttactctttagagcgtgttactcgttaagcaaaagtgttttcaccagtgtgattctgtttttacattcatctttttaggtccaggattcgccgtggctgtctataacacttgtggcttggtgtatcggtgaggtaagtttaatctttacaataataaaacagagaaatgccaatgacaagtttgtgactactgaattgaaacatgttagttatctcaagagaacttttttatagcagaatagattactgtctaggtggttgatgatgttatatacaactagctgtataccaccaaatgtgttagctgagtgatgtatttggatgtagatgatcagatatcctcattatgcttttacttgcctcggtagatgtccctattggctaacctacctcaggtattgcatcatactttgtatattgttttgaactgaaacattccctatcacagaaagtattttcgaattgaatggattgcgtgatatgtttgaccatccaggtacacgggattcatcgtgatttatccaacgggactagtgggtgaatgtgagtgctttaaagctagaattcttgttttcatttcttcttgttgatattgaccattgtttctgcagtgttgatcatgtacaaagcacttccatatgttaaagaaaggaatctttacgctaatttcttctctgttttccccttcagttactacgatttcctttgggtatgttcatcgcttccttcttcttcttcaccttcaacaaaatccttttggctgaagtatcgtttatggatatatagcttttatgtttttagcagcatttttggattctgtttcataaaaggtcaaccatgctgatctttccatgtcatttttattcaggccgtcctcttggtctacccattcctttggttgaagctttatctccagcttttcaaacaaagaaagtctaagcttggaaaatcgaagaagcttcacggcaagagaaagagaatgtgaactccattcaatcttacatatatgtatctcatctgtgattcacaatattctggtctaaacaaccataacaactgaaaataaaaatttggcccaaagctttttaaatggagtaattataatgggttgattattgagccattacctattcacttactagactcaattaaaattagatattttgtcttcagtcaaactagtttagtttggttttgggcgacgacgacccaattattttccttcaatcttaaatttaatgaaacaaaaatgctttcctctgctgcagcttgttagtaccagtcaactactcgtgcacctcaaggtatgtgttcgcaattaatacccaaaaagtgctctatcaatagagaatttctagaggacagaaaaaggcattcaaacaaacccttggaccgactttaattctggtggagttgttaaaaagttctctcatttattggccggaaccagtcatgaaaataacgaaacatttcgattattcttttagaaattttgtcattaattatactttgaaagtccttttgatctgtgatctagtgacaatcagcaacaggttttgtcaagactctaaaccaaaagatcaagcaacctagctactacgttttcgcaaatagtaaatcaagaggaaaaatgaattatgatggaacatagtttcggtagatgaaatcgttctaatagctagccaatcattagagactgaaccatccgacagcaaaaatatggttgaaacagaaagcaaactgtgcaattgttgtggaccatgaccattcttctataaatggaacgattgatcgttaggactaaggagggtcgagaaaagtagatttatgacaaaaacatttgaagatatattcaaattgattggatttgatagtcagagcatttagacgaatcattcacaagtgaagacacgtgtaatagttttcaatttaaggtcacaagtcatgaaagttgagtgttgtctatacatgacttgtacttgttgctatgtgccgtccaagaaaatgctaaatcacgagttccataagtttgataggccaactaaaacttattattaatacacatcagtatagttcacaaatttttttggaaaatgatctaatatatagtttatttgttggattttgtatatagattaggggatatacaagtcttaaggtctcttctgtttgtcatgttatggtttgtgttttattcacttctctaaaattgtatattgagtatatattttaggaaataaatattttgtgtttaagttcattcgcaggttttctcaagtctttttatttgtggaacactagctagtgtaaaaaaaattagagtttctttctataccactaaagtttgctctctagtaatatatatcctaaagtttgcattaactcataagaggcaatattaagctaactaaagagattgttttatatcataagaggcaatattaagctaactaatgagttatgacaagactcaagagtcaacgtagtttatctatatgcatgctttaagaagagtaacgtcataaagcatattttgcgccgtgagccgtttaagtgaaaattagaatatttgaagtagtgtgggatatataactttttttttttgagcaaatcgtgggatatataactattttataaaaataacattgaaattcataccacgaagctcgataaaatgtttttgtataatagtggttttgagtattatgtgcgtaaagaatatttgcatgaaaatgatatagagtacgatctaaactaaagctagctaatgtaaggaatataaagatacatataataagtaaagctagacatttatcgtgggaaaaacaaattatgctacattaagatatcaaataaatgtattgggcagtccacaagccaatctagtacaagtattaattaagttacatagaaacaaaaatacatacatacattacaaaaatatactgcgaccctaaattggacttgtctgaaacttacctatctttttgtaagtttcttcacgagaatccgctacaattattgggtaactaaatgaaaatactattatgtgtttgggaatgtgtaataagtcaattcaatatataactatcaaaggcaatttctcaaatcttttttcttttaattacgatctaccagttctaagcctgccttatgattagttcgaaacttgtaatcatgtttagtcgtgtcgcgagagaaatatgagtttattagtttatatggtttgaataaaaaatgggactcgttttgacgtctactaaaaagaagacttaacttttccccctcgaaaacaaaaatatccatttagtcacagactcacagtaatacactgatacttccattatcattataaatttttatttagctcgtgtcatggaaaagatcatgataatggaagcattactgtgagtctgtgactatgcataattgatagaatagtttattttctttcccgtaagctgctttgatgcgtcgttaattttcatgaaaatattacatatatctgccaatctaagcctagaaactattaataaatgatatatagtaatgttataatgtttacaaaaatgtaacttttttccgcgaaaaatatgtattctaattagaatctttagtatatggtaaaaacaacatcaataattaaaatagccctgcgtatgaataaagtatagtagtatatggcatacatgtatagttttgagaattttaaataagcaaaaaatagctagcttaagaacttaagtgtttcttaaaaaaattttgtcggcaatgtttcttaatataactaaatcaaagttttttttttgttaatcaactagatcaaagttcaaccatccactttacatttttatttcatatctttttttctgtcacatggggtaacgacttttgaaaggacattccgttgaaaaataaccgatttttttctctttttttttttgtttgatcaaaaatcaaacaaagcactgatattttacattgattacatttatgtatatgcacatactatatatagggtccaagcaaccattataaaggatcattcttagtcttacaacagagtataacaaaacacagacactgatcaatggatgtcttatattcttctaattggcttcatcaagaggtatcatcatcatcatcatcatcatcatcatcatcatcattacttttctttaatatatatactcatatgaaactctttttgaaatgcagagcattgatgagatgaggcagaatctacagagcactctgttcgaactagagacactgaaaatggaagctaatgagaaatcaagaacacacagagaagaagtgaaccaacttctcaatctcctcaaattcactcagcaagaaagagacgaagctagacaacagttatctcaattcatcttccatacccaacaaaaccctaattcaagaagcctcactaaatcaaacagcttctctcactctcaagatgtatcttcttcttcttcctcagaactctccaccttcctcaacatccatcctcagccgttgacgaatcttgaagatccaacggctcataatcatcatcagcagattgatcctctagacgttcttgtgatggggaaagcttttccagaaacgggaaagcttttgaaagcggtggttgaagctggaccgcttcttgaaacgcttcttttggctggaccgctaccaaaatggataaacccgccgcctcaaacgcaatcgcagcgttttgagttaccttctatctcgtttagagggtccgatgttgatagtaaatgtgattctatgacgtgttctggttcggttaatagttttgggttcggttcgagtttggttatcgatcaatcgatgttaaccggaaagaggcagagattagagtagcgaatcgatcattttacaagattctagattcctactactacgagcagttttataagttgttgggtgattatttttgtcccttctatataaaactataattcgattttatgtcaaatcttccagaaaaaaagtaattgtggttgatgattacataagaatgaatcaatttataaatacaaaattcaaaagtgtgtgtttctatcaaaagcttttgggtcaagctaatggctgatcgttgttatcagagatataaatgtgacccatcttcttgcgtttggtctccatatatcttctgttctccttggtgattggtgtcaccaccggcacacggccaactacagcgagtccgtaccctttcagaccagtgaatttggcagggttattcgtcattagtctcattgttctcactcctatgtctcgtagcatctacattgggccattccaaaaccaataaaattgagagaaagcaatcatatcaatggctatgagttagtccttaatgtagccaaatcaaaccgatataatatggctaacctgagcaccgataccgtattcacgagaatcaatggataggccaagttcaacattggcctgaacagtgtcgtgtccttcgtcctgcaagttataagctctaagcttgtgaccaaggccaatgcctcttccttcgtggccacggagatacacaacaactcctcttccctctttctcgattaactccatggctaagtccaattggtttccacagtcacaccgtgctgagccaaaaatgtctcctgtcaagcactctgaatgcactcgcaccagaatgtcctcaccatttccaacgtttccctggtcacgattcagacagaaacaaacacaagactggtcttaaattcgaatatccagttggttgttctgagatgacaccaatgcacattgatcaagatttagaagtaagtcgtgattttgtaccttaacgagggcgatattttcggttccatcgagtttagatcgataacaataagcttggaaaagaccccatttggtaggcaaacgagacactgtgattctctcaacaagcttatctcgctttcttcgatatctacaagtatataaaacttcagataattacttgtatccagtgttttctatcttttcaatacatggtcttcttcttctctaacctgattaaatcagtcaacgatacaatggggatatcatgttccgtagcaagctttttcatatacggcagtgaagccatagacccatcttcttgatcaagaatagctgaaagaacagagaggggacgtaaaccagccaatatcattagatccactgaagcttcggtgtgaccagctctccttaaaactccaccatctctgtacttgagagggaatacatgaccaggcctcctgaaatcatctggtttagcatcgagagacgaaagtgcaagaaccgtcatcgccctgtctgaagctgatactccagttgatgttccagattttgcatcctgtaaccaagaactttatcagaacatagacacaatgaaaccctcttgagaactatatccaaatcgttaccacagtgatggtgaaagttggagcagaggaatcttcgtcttccatttcaggtgacataagtgtaaggcttaatctttcaaggttttctttcttcataccaactgagacaatacctgaaccattcttaatcagaaaagctatgtcttttggactcgtaagagttgcagccatgatcagattcccttcaacatctccggtttcatcgtcaacaacgatcacaaactgaaacataagtgacaattttttagtaagaccaaatctatacaactgtaaaaacagatcatcataatcactggtcttcaagaaaatcgtcaaagaacaaacctttcctttgcgtagagcttgaagagcaagttcaatagaggaataaccttgagtaggacaatctggatcaccctctgcgtcactcacgaagaaatcatcagtctcaggcgtgatttccgcgtcaactgtctcaaacgaagcagaatcaaacaacgacccgtcggttttcctaacaggattttcatcgaacacattgcgatcactattctcactagccttgatctcccaacttgaacgactaaccaatctccagcaagtattagcaaacctaggagaactatacaagccattgatgaagctgtgagcgaaaaagattcgaggatgatataaagcagaatccatcatcgacgtaatgaaacatatatctctctgctcgtacgattcgctgcttctcgtctctttggagttgttctcaacacaaaaccaaaatctgaaaattttaaaatttcagacatatttttaaggttggaagggaaaaaaatcacgaccacgagtttaggatttatcttctttcgtcgtcatcgtactaacttaactggtgtttctcatgggccacacatgttgatcatgaagaactatcacataaacggaaaccctctgggtcctttagaaggttttgacctttgtcttattgctgacgtggcctatacttggaaaacatcaacgaacacaactttaaaaagggcggaaataaaggaattgagagaaagaggacggtggaggagcaaatcggatccagacggagaagtcgccggagaacggtttacaaaaggagcgtgagagagagacagagacaatttttctccgatctcaccggatcagccgttgtactcttaccaatccgtcgtctagcttgaaatctccgagctcaaaggtgtgttacagtcactagtcactgtgatttctcacgcttacattacaaaatcggagcttgtattgtgtgattagatttggttcattaatggtgggttttgtgttcagaggtggatggtccatggctgagccagaattagtaaacggaggagtgaaagagaacaaattatggaaaggtgtattcgcagtttccggcattatgtctactcttgtaatctacggtgttcttcaggtctgtcttgttttcatgataccattctctgtgaaatgtctcccctttcttacaaatttcttttgttttgtgattgtggttttgtaggagaagataatgagagttccttatggagtgaacaaggagttttttaagcactctttgtttcttgttttctgcaatcggcttactacatcagctgtctctgctggtgctttactggtaaactagctaaaaacaccaactttgtgtttatacttatttgctaaagttttatgtaaccctttttggcttttcttttttaatttgtaggcaagcaagaaagttttggatcctgtagctccggtttataaatattgccttatatcagtgactaacatcttaactacaacatgtcaatatgaggttggatttttattttaatgtatgaactttgtatgcctactttttgctgcttattgctttttgctatctgtaatgcctccaggctctcaagtatgtgagcttccctgtccaaactcttgcaaagtgtgccaaaatgataccagtaatggtaagtttttcagagctggaaactcatgcctttgagtttagcatccaccattcttatatttgtgctctatataggtgtggggaacgctcattatgcagaagaagtataagggctttgactatttagtggcttttctggtgacccttggctgctctgtctttattctctttccggtataaacctctatacccaatcaaaagcttcggttagttagactatcatatttaccatgaacatcatgtttgtttatgtaaacctgatttgtaggcaggagatgatgttagtccatacaataagggaagggaaaatactgtttggggtgtttcccttatggctggttatcttgggtatgtgtatccgtgttacttgttttattgtttatgcgaatatactgaaatttttgttgtcttgttttaaaacaaggaatattgattgtgtatatggtaattggctcactaacaggtttgacggctttacaagtacattccaagacaagctctttaaaggatataacatggagatacataaccaaatattctacacaacactttgttcttgtgttttgagtttcactggtgagaatcttatttgtttctggaacctatactgttagagtcgcatcattttctgtcactgtcattttctatggacattggaccattaatcgttttccctggtgggtggctggtcctaagaaaattctttaggaagaagacttttctcttctttttttctctttatttgtttactttagttatatatctgagttcagtttattttgactgttagacctctggaatgaaaattgattcaatcttcagctgatgactactaggctaaagtgaggttttatgttagtgatatcaacatgtcattagtcgcaactattttaagtttcctctgtttctgaatgtgtctcatagtcagaattcatctcttctgcataaaagacctcaatgcttagaccctcaaaaagaagatcaatgtggtcaatcattctctgttcttaccattatgtaaatcttatggttgatgtaggacttatattgcaagggcatctactaccagctgtagattttgtttctctgcatagggattgtttactcgacatcgctctgctttccacagtaagttttaagcttcctctattcttctacttagtaaatgcattgccatgtcgtttcgaccaaattagttttaagatccacaagatgcatgcatgtatattcataaaacaaatccataaatctataatccgaaacaaaaggctttgatgacgtctcatgatacaatcttcctgtcttgtctttgtttaccactgaacttaccagagactaataatgtgcaggttgcaacagcgagccagttcttcatttcttacacaattaggacatttggtgctctaacatttgctgcaatcatgacgaccagacaggtaaaaagaaaactcgatctcagtctgaataatctgtcttcataactgacaacaccgtccgatttctaatccgactaatctgtcttttaataaagcttgcaagcatcatgctctcatgcatttggttttctcatcctcttagctgggagcaatgtatcggatcggtacagtttcggttccttctacattgttcggaactttatattatactttttgattcttgactaaccaagtttgctccatcaggtcatcgttttcgggtctttatatgcgaaaaacttactgaacaacaagaaaaattcacaaacgcaaccaccacctccagaacttccgcagtacgaaaaggttgagagctcttaagaagaaatataacaccagttaaaggtttttgcgcttgatataaccctcagaagttcagaacaaaagaaaactagccgttaggaaactgaaactaggatttatatactcgttgtatttgtctcatctttttaaaaattttgttggatctcgcgtagagttgattatatatctatattatgagtagtgagtacatgtgtttcttgtttgttagttgatcgctagacgaaaaagattgatgacaatgaaaatgttatacttctgcacaagtttgcctaaccagatcaaaccgaaatcatttattccgagatcaaatggatcattatttgtgtatactatctaaaacaaaaactgaatccaaatttaagttaaccaaaaactaaaaaaactgatctcaaacctaaatttatgtaaaaataaaagaagattatagtttatatagaatttttctttttgagttggtgcaattatagataccacagctgaaagattaaaaaagtagttgtagttggttagaatttctgatgtaagcctttgagatatcccgattgacttccaacagcaagactttccctttaatcacttttttctgtttactttcaaatgtaccaattttgtatttttagtattttaatattcttcaagaaattttagcagtatcaaaatgtacctggtcatcatcagaagaataattcaaagaaggaaagagattgatctggtaaatatcataataaggtcttgtattacatttttaaaaaaatggcgatgagtatcagtcctttatatatagtggacttattcttcattcctaaaacatacttgaatacttcaaaggaagagatatattcatatataaccctaaagaaactttcattaagtttcaaaaaaataacaatttggttgttaagggtaatcattgaatagttagctgattaactactgcatatacaaagattataactttctgccggaactgaaaataattaatcaattgtgtgtgtataaaatttgaaaattagctttttcgttctatgctatgctccctcgtttttagtcagtttatttagttgatcatcacaaccgaagatgaaccaaaaacactaaattaagacgttttcttaaggaagttataaattcgtgactataagacgacgtcaaaacgaattaacgaaaggtccaaaattcacaccttggacgataataaatattcaaaaaaattaatatcttcatcatagattcgttaaatacttatatataaaataatactttggtcttcaaatcaaaaaataatatcaaaggaaatgttatataagcaatattttgcgtgacgaagttccgttcaactcacagttgctaattcaaagtcaaaccggtgcgtatataaggaaggtcttgcctacataattaaagacctatacatggctacgtatgtcttattcatacatgcacatgtgtgatgtgtgcatattcgcgataaaaattcatgtgccatgtatcatgtgtatgcatataatttcaaaacgtactgttacgaataaaatagaaggactatgaaactaatttatacagttacacgggagtttccttagttacattgtaaacgttttcatacatgagtgtaagttagggagagattaatcttcaaaatcatgtagcgaaaaacactgaaagtaggtttgtgaatgaaatatacgcaaaatgatgcatgccaagaatcagtctaagtatgaactgtatgatatgcacaatggatggttttatggaaagatgacgatgaaacacgtggtttggaatggatcttattatacacatagaatgggtggtccgtgatcgacgtcctttctataacttaatgagaaatctcacgcaacacaatagacgtaatgcttgtcttatgaagaattcaatggcatatggttgtatagtgtcaaactgaaagtttggccagcattttgcctcgatctgagttaaaaaatcctctttaaaccagctaaattaacatataaccaatctgattatgctgccaacttcagctcaacccccgattatatcaaactctctcagtttttcttttgggtttcattggaattggtacaagatcaaaacttctacaacaaaacactcttatcagttcatgagaacagagctaacatctcacatagaataccgattatgtatgatatctaacgaatgaaatgaactattatgagactattaacaaagtagtcgttgatggactatctatctatatataatttaaacaggttatttggatagacccgtaaataaagcggtcaaacttagtaaggtcaaattcttaattttatatgatttactcggaccaaacataaaagaaaacaaaaactaagtgctctaaaaagagaacaagtgggtcggctcctgtctagtcgaaatccctaggggccatggagaatgaggaccatttgaattgcatgagtggtgggtgacattagctttatcctagtcggcaacttccactcgattcacgtgttacttatgttaaaatcaatctttagattctctctttttcactgtctttttcccgttttagaattgttttacttttcgacgacaaaagaaagagaaattattgcaattttccgttagcaaactaatttcagaaacaatgattaaaataacataattattcttcaaacacataatttacatgcatatattatcatgctaccttcctcacgttgaattttggtaactgccgtttcgtttgattgtcggttgaattatctttttagttaaaagtatggtcggttgattacggtaattttatatcattttatgaaatcgctttgagactagagagcttagacaatatcagaattttaccgaatcaagagccgtattgtctccagtcttgttgttttcatctattcttaactaaacacaattaaaatgacagtgaaagttttaacttctatcctatattaaacttttaaatttctatgattttgaatatgattatgaaatttaggatgtaatttcaacatctgctgtgtgtttatgaatagttttaacttcacaataaaattttgattgggaacatatttaactgtacaaaatattttaaaatctgaagcaagagtctttaaattgatttaatatctgactgctaattagatttatatttgacaccgatgaaacctactgaaaatggtttaagatgggaaattttgtattgtgttctcttctcccctaataattaaagagatggagaaaactatgaattagtagtcgtgttttggcaatttaggatctttgaacatctgttaacaaataaactgttgatttcatttatgtggcggcagtacgcaattttcaacttataaggcaaaggaaccttcctcaaaatcttcggttccaaaaatacaaatctagtagaaagctaactaacagtttgtatcataaaaaaagctaattgtgtttttccattacatccgttaaatatattaatacaatactgataaaaactaactgtaacacacgtactaacattcattttattctaaaattcataccacacaaaattttgctgtcctgatttgtgcacgagagtttccaagaatttaagatcatcgtatcacttataatatatattttatattcaacaactctctcaaactaattgtttattgtttaaccaagaatcatagatcatagatgacgtacttacttagtacttaacccaatcaaagccaaggatttttcagttaagggtatattagttttgcaatttcgtgacatttaatattgacagttttaggatataaacattaattcttacgaatcctacagatttaccttttgtgatattttggtaatttggttggtgaattactactagtgtatttaatagcacctcttttcgaaaacggtaaactatgcaaaattcacagctgcagatgaaagcagcaataaatgtaaaaataaaaacttcgtcagaattgactttccccaatgtcttgtcttatttgacaccgcgtttgactaatcaaccattcttctccacatatctatacgtacactcacatatacgcatatacgtatatttcattgaaaaagccgtcgtttctataatatatatagctcattcctccaccttcctcatcttatctacttcactttttgattacaaaaaccaaacaaacaaacaacaaaccagaagttttatttttgttaaagagtaaccaaaaaaaaaaaacagagtaccttcttcttcacacacataaaaagagacggtaccaaaaaataaaaacagagcaaaccacaaaaatggggaagcatttattccgatcatctcctccaccggagaaaccaacagctcatctctctctcgcggaatcagctgttcaagaatgtatgagcaacatcaacaccgtcatatcaaaatggacttctccggctgcttcttcctccgacgacttcctcttctccaccaacagtcgtcgtgaagcagaggagtttgttacagccgttagacatctacaaagcacgatgcatcgtttggtttccgttaacccttcctcggagaagctaatctacgcacagaatctaatgcaatcggcgatgaagcttctcgaatcagagtttcatcgtgttttaaaagcgaaccgtgagtatttagatcctgaatgtgtctctgtacgttcttacagatcatcgagattcagtacttcgactacgactagtgtctccgattccgaagacgaaagcagttacgaagaaaacgccgacgaagagcatagattctccggtggagattccgacgcaatggatgatctcaagatgattgctgattgtatgatctctaccggctacgctaaggaatgcgttagggtttataaaaccgtacggaaatcgattgttgatgagacgctgcataatctgcaaatggagagattcaatcttcatcaggttcagaaaatggattgggagattctcgaatcaaagatcaaaacatggctaaaagctgtgaaattagctgttagaaaattgttcttcggtgagaggattttagctgatcatgttttctcttcctctggtttaatcgttgaatcttctttcactgagattactcaagaaggagcattgattctcttcactttcccggaatatgcttccaagatcaaaaagttaactccggagaaaatgtttcggtttctggatatgtatgaagctcttgcgaatctctatgttgagattgaatcaatcttctacttcgaatcagctgctgcggttagatctcaggtgataaactcgttagctagactcggcgatgcgacgaggttgatgatgacggatttcgaatcggcgattcagaaagaaacctcgaagactccgatcatcggtggtggtgttcatcctctgactcgttacgttatgaattacctctccttcctcgctgattacagtgattccatcgctgcgatattcgaaaactggaagctgagtgtgccgacgccgttgccggattctttatacataagcggcggcgatgaagcgaatccggaggatctgtattcgtctccggtctctgtacgtatcgcttgggtgattttactcacgctttgtaaaatcgacggtaaagctcagccgtataaagacgttgctttgtcttatctcttcctcgctaacaatctccaatacgtcgtcgttaaagtccgatcgtcgactctgaaggttcttctcggagacgattgggtgtttaggcatgaagagaaggtgaagctgtatgctgataagtttgagaagcttgcgtgggggaaagtgctggatttactaccggagattccgacggatgagatttcgccggaggaagctaaggttttggtggcgagattcaacgatgagtttgagacgtcgtaccggaaacagacttcgtgggttatacccgacccgaaacttagggaccagattaaaatcacgttgagtcagaaacttatgctggtttgtaccgagttttaccggatgaaccggtttgcatatggtatggttggagataatgaggctatttccagatatacccctgaagatattgggaattacctctcggatctttactttgggtctagaggctcagggagtgtttcgacagctggtgggtctggatccggatccggatccggaactggttcgtcgagtacgggtaaagctcgtggcggacgtagtagtcattgaatgagaatctcgtgatattagttttttttttttcttttctttaatttgtgtggttataatgtaacctatagtgattgatgtgtcgaatatcttattcaattatgtgtgtacagatatatgttgaattattgagctcttcttttcttaaaagcaaatcattcgattacttttggaactttgtgattttatcaacgacaaaagaaagtacaaagattattgagcaaatagacaattagacatatacgtaaaagacaatcataagtagctctcactcgtgaatcttttgactaactgtaatttttttggtggtatataacttcatgttggtacgagtccacattccacaatacaataaaaataaaagtaaaaaacaaattgcaaatgcaaattgcttatgaaataaatacgaagctgacattattagtacatagactaccaaaaaattctaagaaacagaaaggtcgacacgataggagggtcggtgaatctaatcaggttcgcattaatgctttaattaggcgattcccgatacgtagtctcacgttacaattagtactaaaataaacgtaaaccgaacttaatctcctcattatgtgccatgttttaaatcatttgttttgcggttattacgcttacttttttctacatctttattttataaaatagatcatgaaatagcatgatgaagggaggtttataggtccctcgcctcgttttactctatgagcccatcttatctttaatcatattccatagtccataccatagcacatacagtagttatatgctgcagaagagatccaacaaaacattcacaatggattatagaaacatttgtttattcattataatgagatcttacattcatttaatattagaaaaagccacaaattcataacacaacaagccaagaaaaaaacacaaacttaagcacacaagctttttatttgacacaccaaatatttcatcttcatcttcatattcaattagccccggagatatcgatggacttgacttgaggcttcttctcaggcgctttcggaaccacaaccgtaagcacaccattctccattgttgccttcacttcttccatctttgcattctccggtaacctaaaccttctcataaacttcccactagctctctccacacggtgccacttatcgttcttctcttcgttctccttgctcctctctccgctaatctgcagaacgttcttgtcttcaacctcaaccttgacttcttccttcttcaggcctggcaagtccgctttgaacacatgtgcctccggcgtttccttccaatccactcttgcgtttgtaaacgctgccacatcacgagcggttgaagcgtttgccaacgcagaagatggcgtgaagaatccttcgaatggatcccataagtcttgcgagaacggatcaaagacgtttgatctgcgtcctccaaaaatgcttggaatgagagacattgttcgttgcttttcgggagacttttggttcttgattttcctgctgatttgatctgattagcaaaggacatatttatagggaagttagaggatgaagagagaatgttcttcgagtttcttgaatagaatagaaaatgctcctttttctaaaaccttcgcttggagtctttagaacacatacacaatgatcactgtggtgaaatgaccagatttttcttggcatttcaggaagtttcgtttgttgaaacaagaccgaaatgcaatccttggttacaattaaaactacgtgccgttttgctttgttgttgtattatcctcttcgagatacgggctcagtgaagcggatcttctttgcaaaagcccatttcttaataggtcggaagtggaatttaagaaaatctaactcagagaaaagaggacaaaatcaagatttaagattattagcttttcgccaaaggaaaactatagtaagttctcgcaataacagttggcactaaatttccgagaatgtcaacaatcttttaatggatttttttgtctccatatatacaagaactgagccacgtttttgtgacaaacatagacaacatatttactaaacaagtaaactaaaaaaaaaaaaaatctaaatgattcgattcaagtatcagttactgtgatcaaaatctcaacttatttattgcctgttcatgtcatgcttgaaccagaagaaatgaccatggaaagtaattgtgattacctttttgggaaacttggggttaaaaattgaaaatgtgatatgtcatggttttggtttctaatcaatagaacttgcatgaaagaaagaaagaaagagaaatgaagagaaaagctttacattgtaaagatgctactaattgaacaaacctacttgtcgtcaaagctgcagcaagcttggtctcttttccataagctcgtacttgataacaaaatgttcctgcgataaccatcaccagcaaaattcactcataacactgcaaattcgagaacaaggaaatagatattcctgcaataatcgtcggcttacctttctcactgttttgaacgaatttggatcaaggtattcgtatgttcctctttcatatgtagctgccctgactaaaggttccccgactctgaagaaccatactctgagttccttgtggtaaaaccaacctctttcgtaactgcaacatgtcaatcgaactcaaaagtctcagccaaagagagcggagtaaacgaatagatcaaagattacagtagagaaaaaacatacagttcatctgctgcgtacagctgtgcttcatcttttggcatactggaacaataattagagcaaagtaataagtttaaaagcccaaggttaatttaggagttgggcaaatgtgacgctgaatgctgatctaataacagacctgtaaaatgtgtagaacaataactcgtaggagaaccttttgaaactagctcgctgcaacaaacggaaataatgacacatttgttaacaaaatcgagaaaatactttgttggtactactcgcaacaacagagggaacttacagttagaggcggaggttctgtggcgtagtaacaatttggtactgtgaactcgacctcgctctttgccggttcatttgtccaaggagacgcaaatgtcttgtagagatttccagttgaattcaaatccaatcctagcgtcgtcaagtcgatgccaagagcaagtgaggtcaattcagggttgctcctgtttagtacgtctaacaagccaagcaagcaaaaaggatctgcctctgactgtgtcgatttcatctcagaatctctaaattggttgattgatgacatctgttgcacagggaactgggattgattttgatgttgctgatactgctgaataagctgatcataaccaatactggaaactgcattaggcgagcttagaggtctaaggccaagaccctgtagcccaccagtctggtattaaataagaattaaatgataagatacggtagttggagcaagtgtggcccaaccacatgatgcagtaccataataatatgagatatgcaaattgaagaaagttccggcttgtatacatatagggataggagagactgccactcacagatgaagtatgttgtggctgttgttgtggacgatgtgatgaatatgttgctcccaagttgaaaccaccagatctacccatctgcaaatttgcaatatccaaacattaattcacatcaacaaccatatcaacagaaaaaggcaggacaacactttgttaacttcgaaacagtctaaagcttacagaaaagttttgagagtgcatcattgacatagcattgtcatgcagttgttctttttgatgcaaatccataggatactcagaattaccacctgcaacaaatctactacgcttgtgaatgatccagcaggtttagcttacatcattaagaagcacatcttatcatctttctcatgcaataagctataatatgaaggaagctaagaagtttatgaacttggaaacggactttcatgagattttggagaatagcatagaggaaaacttttcaagataggggaaactagagacgatattcctcactacgtgcacataaagtctgcaagacccaactttatgcacaatacaatacaaagttatcgacaataaaagaccagcacctttatatccaggaagggcaggaaagtcttcattttggatgctgaactcctggttttgttggacaagtggaactcctaaaccttgtttcctcaaagagcctaaaaacaccaccgcaagagtatgaggaaacaagacatgatttggaaaatcttttcaaaaacttatgttatattaagtatatgaatttcaaaagatcttcagataaaccgactacctagatgtccttgagtgccaccagcagacccaggacgacttgtcagctggggaaaatcgttgttgatgtcaaatagagagctgtcgttaggatgatcactgagcatcatattgttaactgactgaacatgattctgcgaaagcgggccaccaccagtatgataggagttccccagcatagacatgacctgagatcctgtaccatacaattttacaattaaatttttactgctatttccacatacagcagctgctaactaattgcatgtttaattaaataagattttgtgtaaagtaaacaagctcgtcttacaaagtccaaacaatcccagagtactgctttctctacattctaacgtactcacgtgagtctagagaagtatagactacaaaagcaaaacaagttcaactgctgatatcaatcctaccccctaaatgactaattattctaacttattttccacaggacctcctagctactagaccagtaaaaaggtgtactccatgaagcaatatattctattttatttacaatgctataacaagaagttaaacaaggctcggctcagttgtatcaaatgaaaggcaaaaaaaaccttgaagacagcaaatggaaaggactcgataaatcatatataccttgaggaagtactccacccatcattcggttctgtccctgaacatttaatcctgatccgctatttgctgccaaatttagtcgtgaagacagaccaggaatagacaatccaccagagctaatattcctccccaagttacctccaccaaccatgtttcccattgaatttgttattcgaggacctgaatttcccaacaattgggatattcccatccctggaacactattccgattactgagtcctgcagatgtagagagaattccaggaatagaaccaccaactccattagcgttactactgaatccagggttgccaacaacattaagacctctatttgggattcccgaatgcccatgtgagctaccatgggacaactacaaagcaatcatcgtataatataagacacagattaagaacaagagccgttttttcacaaaattttaaacaacatgcacctgagagagattaacaggtagattatttgaagcaaatcttccactggaaaaactcccattaggttgttgaactccggcagatggtatactattcatacttgagtttcttgatgtaagtgtaccttgcatgttcccgacattatagttcccatgaatattatgaagtccctgaagatttcctgcatgaagaatatgtagaagttatataagttcagaacgacgcaaaatatagaagaaggtcaagataagaataacacccaccagtatgatgaaaagagggagacggtgcaccagattgtccagaataagaagcagtaaacgatctgcccgaaccatctggtaaattcgaagctgaaccattgagagatgactacaaaggaaagagcacaagagttgatggatgagaaatggtacgcataattaagcaaacgttatcctaagcacactaaaaatattctcaaggtgaataggaaggtacatgaaggtttgacattgcactaactgactgacaatctcacgtgagacaatgtatcattcggtgacaagacgcgaaaccgcctacaatctgagatggaataaacgattactcagaaatgaatagcctggaaaaaaggaagaattcaataaaccaaacaaaggagacataaatcttatcaaccatggtgcaacaacagacgaagctactgtataaactacatattgttcaaagtaagattgaaattctcatcctttgaaggtttatacacagtaaactttcatctagaaacaagaagataatgaatcagcaaccatgaaataaacttctagcaggaaatcagaagtccaggaaacgattcagaacaagaaaaaaaaacctcacgaggatccaataaagaaaaaaacaatcaaacgcaagcgtaattcaacagttgtaataatacgactgagcaacaacacaggatcctaaattcagctatcgcgatgcaaattcaatagtaagataacaaaattgaactccgaaaaccctagaaatgacgttgtttaaatctgttcacactcaacagtaaaaaggagaaggatgcgtacggaggaagaagaagaagaagaagagaaacagtgcccaattagaaaactctggaagaaaaattgagagaaagggttaagaagaatccgaagaagatttttcgtgaagtttcgtaaattgggaagaagcggagattttgattcaatttggtgccctaaatcggaaaacggatataggaacgagagaagaagcaagatttagaaaattgggatcgataaatattttattaaataaaataaataaaggaaacaaaatataaatattagttttgtgccgaatgattggtgatggagggaactttcagaggtcacgacaggccccacgaaaccttcttactcagaaagagtgtcttttgtaaggagaaaaattccttatttgcggatccatgtttgggcctatttgaccaggcccattagatacacgattcacaattttacttccaaatcaagaatgatgttgatgttttactttgtggaatcatgaaatcgtagtgtaaaagaagaaatactgaagtaggtgaattctgtttacaagattacgaagcctaaatcaaacaaaacgacaaaattgtgtgttttgaaggttgtagttaaagctaaaagtgttgaatagtaactatgcctcttattcagctatgaatgctaagatgttttgtatttagttaacatgaaaatgacgttagatctttcaagataattaaaataacgtccattaatgcaattcaatcatatgatctaagcttgtcaaagtttacaaaaaataagaaaaaggccgtttctttagaagataagttatttttgcatgggctttaaaatatcactaagtaatcttagcacaacatacaactcaatttatgttaatatgtgtaaatttgaattttatgttgtatttgttttaagtgaatcaatataaacaaatctaaaagtcattctccttgcgacatctcaaccaatttttattttattcttcttgattatgctttaacatagtatagaattgttgtttccactgtccaaacaaatgtgtcggtagacaacacaggtccacaaatatcattttaggctgaaactattttgtacaacatatgatacatgcttgaacttggatattacacacgacactaacacaagcactagattatgtaaatgatcatttatacgttgatatccaagaattatattataagttcccaattgtcaagaaaaacatagtgggctcatcatattatagataattttagtaaatatagcgacatcttatcgatcctttcagataaactctattgtatgtcatgttccatttagatgaaaagtaggggcggttaatgtcgtcattcttcatttatatccaatctagaacttctagatctttgacacatatatgtatgtgaccacctcatttcatttaaaatctttaagcttctgtttcgttttgatttatgaaaaatctcaaggctaagtagtgtatgatactttaagtataaaacttaatagctcaattaactagtaacaaaaacttgaaatgagactattgtgacaaaaaaaaaaaaacttgaaatgaacttccaacagaacgaacatggaatagtaaactcatgataatctatttataatgcatgaacagatgccgaaaaaaatcatgtgtcccgtgctttcttcataaatatggtcggaagtttggtatatccttaaaaaaaattacacaacctacatatgttgactttttttccaacctccactaccatccttaattttttggaataaagaaagtatatatttgagatttagcatatgtgactgtgagtgacgaaccgacgattgcatacaaaaatgatattataattataattataattaacaagaaaaatatatagtattgttgtagagaaaaagttaaattatcgctatttctttacagattaaaaagtggtaatgtaacatacccactaacgtttgtgcagttttttatggtaaaatctgggaaattttcgtcttcttcctaactttcatagccatcagaaaaaatcagactgacaattcaattcaatcccttcgtctcctatatttgctcacgtcaatttatttgtcgttgcatctaatacacaaatattaaattaataactttttatatattcatgtttgcagagttcacaaaaaaacccatctcttgtttgttactactctgttccaatttccaaacccaaattttattacacaaaagccaaaatctggagatcaatctatcagctgatcctcaacttttgtacctttcatggaacaatttactctttaaggtacaaaaaatttgttttttttgttacttaattttatccgttatgattttatttttatctgtcgttataaagttgtcatctttggtaaaacaaaaccgttgatttgctcatgtcgtatatcccttgaatctagctgatagattctttgtctattcccatcgaattatttaaaatttccaggttttgtgaagatgggtggtgaaaagtttggatttttgatttggattttatcgattccttgcttaatcttcctctgctatggatacgtaccagtggataattacctcatcaactgtggatcatcaaccaacgtcactgtcactagtcgagtgtttatctctgataaccttgcttcaaactttctaacctctcctaatgaaatcctcgccgccagtaatcgcaattcaaattcagatatttaccagacggcgagaatcttcaccggaatctctaagtacagattctccgttgctagaggccgtcactggattcgtctccatttcaatccttttcagtaccaaaacttccaaatggtctcagcaaaattctctgtttcttcagaaacacatgttcttttgagtgatttcactgtgagttccagagttatgaaggaatactctctgaatgtagctacggatcatctggagctcacgtttactccctcgggtgattcatttgcgtttctgaacgcgctcgaggttgtttcggttcctgatacgttgttcagtggtgatccttcctttgcaggcagtcctgggaagtttcagggcttgtcatggcaagctcttgagacggtttatagagtgaacatgggcggtccgcgtgttacgcctagtaacgatactctttcgagaatttgggagcctgattctgagtttctagttgagaagaatctagttaagagtgtgtctaagattgcatctgttgattatgttcctggttttgctacagaggagactgctcctagaactgtctatggtacttgcaccgagatgaattctgcggataacccgtctagcaacttcaatgtgacttgggatttcgatgttgacccgggttttcagtactttctacggtttcatttctgcgatatcgtgagtaaagctctaaaccagctttacttcaatctttatgtcgactctatggatgttgttgagaatcttgatctgagctcttatttatccaacactttgagtggtgcatacgcgatggattttgtcacaggatcagcaaaactgactaaaagaatccgtgtgagcatcggtcgatcgagtgttcacacggattaccctactgcgattctgaacggattagagatcatgaagatgaataactccaaaagtcagctcagtattggaacatttttgcccagtggttcaagttcaaccactaagaagaatgttggtatgatcattggtttaacgatcggctcattgcttgctttagtggttttaggaggtttctttgtgctgtacaagaaacgaggacgagaccaagatggtaattcaaagacttggattcctttgtcatccaatggaacaacttcatcctcaaatggaactacacttgcaagtatagcttccaattccagttatcgaattcctttggtagcagttaaagaggccacaaatagctttgatgagaatcgagcaattggagttggtggttttggtaaagtgtacaaaggagagcttcacgacggtacaaaagtagctgttaaaagagcgaatcctaagtctcagcaaggacttgcagagttcaggacagaaatcgaaatgttgtcacaattccgtcatcgccatttggtttctttgatcggatactgcgacgagaataacgagatgattctggtttacgaatatatggagaatggaacattgaagagtcacctttacggttcaggtcttcttagcttgagttggaagcaacgtcttgagatatgcattggatcagcaagaggattgcattatctccacaccggtgacgcgaaacccgtgattcacagagacgtcaaatccgccaacatattgcttgacgagaatctcatggctaaagttgcagactttggactgtctaagaccggaccggagatcgatcagactcatgtgagtaccgcggtcaaaggaagtttcggatatcttgatccagaatacttcagaagacaacagctcacagagaaatcagatgtttactcttttggagtggttatgttcgaggttctctgcgcgagacctgttatagacccgacacttactagagaaatggtgaatctagcggaatgggcaatgaaatggcagaagaaaggacagcttgaacacatcatcgacccgtcactgcggggtaagatcagacctgactcgcttagaaagttcggtgaaacaggggagaaatgtttagctgactatggagtcgatagaccatcaatgggagatgtgttgtggaatcttgaatacgctttgcagctacaagaagctgtcgttgatggtgatccagaagacagcacaaacatgatcggtgagttacctctacggttcaatgattacaaccatggagacacgagtgttaacttttctgtagctaaagagggacggtttgatgaagaagaatcgagtgttgatgatagttcaggtgtttccatgagtaaagttttctcgcagctgatcaaatctgagggacgttaaagcgatgataaattggaaccagaatatagaatctttgttctgctctagcttttcttctgtacattttttacgattagactatgattttcattcaataaccaaaattctgaagtttgtcatcaagttgctcaatcaaacttgtaccggtttgtttcggttttatatcagctcactgttacactttaaccaaaatcggtttatgtcttaataaaggaattgagtcggtttaactcatatccgtaccaatgcgacgtcgtgtccgcgtttcagtagctttgctcattgtcttctacgggaactttcccggacataggaaccgccctttcgttatcctcatccatcgtgaaatcaggaaataaatgttcgaagatttgaggtcaaaagtcgaatttcatgttgtctcttctatttagatacaaaattgaagcaattttcaccaatttaatgccaaaatttaaaacaacgctgataaagtgaaacttgattcgatttatatttcaaccgaaactgctgaagcaagaagaaaaagcgtaattacacataacaagaacgctaccgcaaactactaaacgccaaacccaatacaaaagtaaaacgcagacgcttaagtgagaaacccagaaaacacaaacgcggatctgaaaaactctaattaaccaccgaatccgtaaagagtccttccttgcctcttgagagcgtagacaacatccatggcggtcacagtcttcctcctagcgtgctcggtgtaagtgacagcatcacgaatcacgttctcgagaaagatcttgaggacgccacgagtctcctcgtagatgagaccactgatacgcttgactccacctctacgagccaatcttcgaatcgcaggcttggtgattccttggatgttgtctctcagaaccttcctgtgacgcttggctcctcccttacccaaaccttttcctccctttccacgacccgacattttttcagcgaagatttagtttatctcgagagaaattgatgtctgtagaagaagaagaacggttaagagtagatttgggtgagaaagatgtgaaattgtttttataggcaaagacggagagtctattttttgagcaatcagatcgcatattaaatctaacggctgagatatcgatccgtgtgtacaataaaatgatgtataaaccgtcgatctgttttaatcgacggttcatattagtgatccgcgtgatggcagtgatagccactaagaatcgtcttttgttttacatgtggcgccacaaattagggtaatgaagcggcaatattttggaactcggaaaataaaattgcgccatcacattatttgaaaattttcacatgcttttattttaaaaacccacgaattacaagttacaaccgaaaaagatttataatatagtgatttatactaattttgtagtagcttaatgtatattgatactggaaaaacaatgacaatcatatgttagtattatcaagttatcgtattgatattgatattggaacatacaatgggtattgccttctttcgaccataaatatcaccaaatttacaaagtttgtgtataccaagttatcaattgtaaatgggatgtcaacattttaatttccctttgagaaactatagaccacaagaacacacttcaatagataaagtaactatttacataagaggttttaaaatcacattaacaaaaataattaccaaccggcactcacaaatacaaacagagcacacgacatgtcaaagccacaagtaaattcgttgagtggtggtttcattacaattgtgtcacttgcagcacaaactatcttgctctgggaatcatctcagcatcaaagatcatgctcacttcaggggaacttagtgtatccatgcctcgactcatatttctcctcgagttttcagacacgagacactcttttagttcaataacaacatgagacatggttggtcgtcttgctgaggtaggatccgcgcacgacattgctagctcaagagctctccacgcagaacgagaatcataatcaccgttaagctttagatccatgatcttagcaatatctcctccgttaagctcagaccctacccattgtgttatgtgagactttctgcggtttcgatcaatcactgcttggtttgtgatcatctctaataaaacaatcccgaaactgtaaacatcacttttctcactcaaccgacttgtatggtaatatctacaaggaaagcgaatggtatatactctttaagtatcgacgaaagaaaagaaaagtttcagcactgttaattgattcttactctggatcaaggtaaccaggagtaccagcaatcaccgtcgaaacatgagattcacctccaacagggaaagatctcgagagcccaaaatcagcaagtttggccttataatgctcgtccagcaatatgtttgtagttttgacatctctatgaaccattggtggtgtgcatccaatgtgtaagtactccaaacctatgcaaaatgattcaataatattaaatgattcttgtaaaaccaatcgaatggattcaagttctacagtgtaacttggtacaaacctagtgctgcctccgccgctattcttagccgagtaccccaattgacgatgggtttacctccttttcctatatatcagaccattagatcctttcatgttttcatgagttcatgatacatattataaccattataaaatgttacatcaagttttaccagacaaatgttgtcttaagtctccattgggtacaaactcgtagataagggccaagtggtctccttcatcacaatatccgacaaggcttaccaaattcgtatggtgaactctcagaagaagatcaacctaatgcattcatgcaaaggaaaacaaaaaaacccattaggtttctgatgttgaaaacagatactagttggaaagattgtactggaaatacctctgccttgaactctttatagccttgagttgatgattgtgaaagtagtttaacagccacctgttcagaaccatttacagtaccatggcagacaacgccaaatcctccttcccctacaactcttccgaaattattagtcattttcgtaacctctgaataagtaaactttctctttttcatctcgattgacggctcaggtgagttagcataaggaacattcatcgttggcctacttggacgcgggagaacaactgttagatcataaatcaggggttagaaaaaaccaaatccattagatttatcgcttttctagtttgatatgtctctcttgcaaataccttcaacagccgacggctttttctttcggagaaaaagtacaagaaccagcacaacaataagaatggctgcagaaccaactgatgcaactattgttactggaaagctcttgccagatttggtttcagttgaaccaggggaaataagcctggggtttccttgataactacaagaaacaagtgtttttttcttagaaatcaaatgcacaaaagggttgtggataatggtaaagaaagttcataatatatgtgggaagcttcttacagtagctcaagtcctttcctttgtagagattgaggaattgtaccgttaagatcgttcccgcttaagtttctgcaaaaaaaaaagagaaattgtgatacatgcatgaacatgatccaaggtggaatgtgaaaagcattttggaaaatatgtttttgcgagaaacttacatgaccaacagcgatttcatgttgcttagaaattctggcacctctccggtcaagttattattcgacaagtccctaaagttaacaagagagaatataataccatattacatccaatttttttttttgcatacacgtaacatttgatcagcaacaagacatacttacagcttttctagtgtcgtaagattttgaatggcagctgttatcgttccagttaaaccacttgatgacaagtttctggtgaaatttccaaaaccatattcaataatatgatcatgatcacttatagatcctgatgtgtatactagtgaactaatggcttacaaagtagtgattcttggtggcgtggttatatctgtgatgctgcagtttaaaccatcccacataaactgttgagggacgcatggatcgctttgccagttgattctactcaattcataggtggcttggatgtttttcacagcagaaactgttatataaatgttttggtgatgttagaaagaatacataaaacgttttgaatactcttttagagtttataataaatttctttccatactatcataagaaagcatagatcgtattagcataaccttgaaacacacgtaccgtcggtttcatttgtttccaactgcggaaactgaataactttgtagacctcataagcgttaagtagaggtggaagagttgatctgttggttcttatcagctgtaaattgcactcccctccttcacaagtattcggcgacacacttaggatagtacttattgctagctttggaggaaccacagggccaaaaaaaagtttcccatttagtaacatgttgaattccctggtttcatttgcctgcaactcttggatctcagaaaaatgggcgtatacgtaatactgttcatcggggtttactgaactccattcattcgtcaatggcgcactggcattagttggaatggccgcagtagtgagagcgacttttggtggcttatagtcattggaatttcccacatcgctagtggtgttaatttgtgtccactctgtatcaaagaacgaagtccattggcggtcatagatatcatcagggtacctgaggatgggaacaacatcgtttcagcagaggaacataaaaataagatggaaaatccgaaaatatcatttttttcttatcttagatctttagagactttttctgttttaatctttgttataaaccttttctagtttctaaaaaaaattattttcaatccacgttggaaacagatacacacttgcaaaaacagaggagaacagagccaaaaacaaaacagagcaaaacagaacaaagagcgaaacagagcaaaaagaggagatgatgttcagttgaagttgataccttagagaagaatcagacttgctaaaatattctcgatagtaaagtttcagagagccagacttggtgagataagtaccacttcccatcggccgtacttccaaaaccgatattagcggtgtagtttccccagtcttaacaagacaaacctgcaacttgtttgatgttgggatgtgcatgatctcgggacgtgtaccattcacttgttttgccaaatctatcgtggcccatggattaggtccaagatacagatcaaacttggggccagtgtcacgaccatcataatttccatatacaaaccgagccctgataagatgatttcttcccttctcaacgtttagattgtagcagttccgttttccgtctggaaaatatctcatcgtcgttgatggcttcaggaagtcagcctccagatttgcttgaatcctaccaatttttccactctggatgaatgctgcgtccgaagaaaactgcaatccagtcctcggctctgtataaggagatggttcattcgcgggtagaccacaatccaaactgatgaaccctgttacgagacatggaaaaaaaaacatgaatgttgaaaatacgattaataagaacaagaagatgaagaatacacatatatatgtgtcagtttaggcatggattatgttaccttgttggctttgagcttgagaaatatgaatgatggccaaagttctgataaggagcaacaagagctcaagagacctctccatattttcttcttacccaccaatgacaaaaatcgttgcctaagctcaggaagataacaagaggatatataagcaaaaaacaaactggaaactaaaagcaaagactttttcaagtcatggcttttacaacttcaccatgggaagaagaagaaggataagaggataacaatgttccaacatcactattatgaacttgactggggtcatttgtggcattgaacatcagtatagtttcttggtcagacaatatgcaatttacttcaaaagaacttgtcaagtacacaaaaaagatattggtttaatagccaccagactaccacaatgatgcatgaagaaatgttcaaaaagagttgacattctaatggtcgttgacttatatatgtagtagacctgactttgtttcaaatcatatgaataaaaagtgagaaaccacaacaatattcagcattatttaggcacacaatgatctatatatgctgactagatattacaaagcaaagtaggtcagcaggaaataaacaaggtttataacaattagcccttaggcttaaacatgatggataatgaccaaaaggtgtattctaatgcaacttcaccacgagaggaataagaagaataaaagggagataatggtccaacatcactatcatgaaaattgtgtatatcagtctagtttttagtttcctggtcagaaatatgcaacttgcttttagtataacttccaaagaatgtatcaatcacgcaacaaagatattggctttaataagccactagacactcaacaccatgacaacatgaagaaattctgagaactggtcaatggtcgttaattagtgtcacacaaaaggctagtggcatgatggcatcaatagcaagcagactcaccagtcaccaacattatgatagttgactaggattgagagacctagttctgtttcataggcaggaaaaaaaaaaaaaaaaaaaattagaaatgggtaagtggattaacatgagagaaaacaattacagacaaaagtaaaccacattgaaagaaaccaagattgtagagaaaatgatctttgaaatgtagatggtcaaagcaaaactaccttttcgtggtactcaagacatatgaagaaaccaaaagagcagagaatattgatctgaatatattaataatcaatgaacgcagaaggaaatttgtcgacttcgagtttatctacaagacgtatacacaattacacacttcaatcattactttaacaagtttacaaatcttgctaaatgtgtaactagttgagtattgattccttattagtagaaaacattcagaactatcttgccatgggaaccgccgtagtgtccaagctaacgttcatttcttgatattccaagcttcgattcttacttatccctgtgttttcacacgcaatacactctttcagctcgtgtataacctgagacatggatggtcgttttgaggaagaaggatacgcgcatgacattgccagttccaaagctctccaggcagaattaatgttataatccttgcgaaggtttggatccataatctcaagaatatcacctcggttcatctgaaagccaacccattgtgttatgtgagaatctcccgaggtttgattgatcactggttggtttgtgatcatctccaataacacgatcccgaaactgtagacatcactcttctcacccaatcgacctgaatggtaacatctgcaagacaacaacataatatatactctttaatcatcgaagaaggaataaaaagtttcagaacaagtgtttgagtgtgtgtatctggaaactaataatacttactcgggatcaaggtatccaagagtaccagcaattgttgtcgattcctgagattcgccttcaccttggaaagatcttgaaagaccaaaatcagcgagtttggccttaaaattctcgtcgagcaatatgttggcagttttgacatctctatgaaccatcggtggtgtgcatccaatatgcaagtactccaaacctatgcaattgagtacaaatatcatcaaacctatcatcaaactaatatgaacggaattgatatcttgtcctacagttttttaacatagtacgaacctagtgctgcttccaaagctattcgcagtcgaatactccagttgatgatggaattacctccttttcctgtatattagattgttagatccattcaggtcttctgagtttcatgagcaactattagacgtgacataattaagaaaatatatcacctgacaaatgttgttttaagtctccattgggaagaaactcatagacgagggccaagtaatctccttcacagcaatacccaaccaggctcaccaaatttgtatggtgcactctcagaaggagatcaacctaaaaaagactacgtgttaagaaaatgttgaaatccgtaacctttggagaaacagatcatagtatagttgggaagattacagaaatatgggcacctctgctttgaactccttagagccttgagttgacgattgagagagaaccttaacggccacctgttcagaaccctttacagtaccgtgatagaccatgccgaaccctcctttacctaaaactctttggaagttctttgtcacttggacgacctctgaatatgtgaaccttttgctttttttattagaaaatgtaacatccaccattgatgtccttggtggcaggcgtagacctgtacatcagaataaggatgttatgatatttctttttttaatgtgcatctcttcttgtcatgcaacggagcaacgaacggcattcccaagatttataagtttttcttatttaatgcctctcttgcaagtaccttttacaatcgtggacattttctttctgaaaacaagaaaaagaaccacaatgactgtgacaaaaacaactaatgtaacaattgccacaggaaattccttcttaggtggttttataagccttgggtttccttcaaggctacaataaaataagggttgttcaggacatcaaatgcacagaatggttacagatatttattgataaaagttcatatagctatgtggaaagtttcttactatagttttagtcttttctttcgaagagcttgcggaattgaaccattaagattgttcccgcttaagtttctgttaaaaacaactgagttggaatctgaaaagcattagaaaatatatattgagagagaacttacatgaccgacaacgatttcattttgccaagaaactctggcacctctccagttaagttattatacgacaagtccctaacgttagcaatagaggataaacacttgaaggtttatcaaatttattcccatccatataataacagtttctcgtattcaattaacaatggtaaagcttacagtgtttcaagttgtgtaatactttgaatggcagctgctatggttccatttaaacgacttgaagacaagtttctattgaaatgcacattcaaagtgttagtgatcaagattactaacagatcttgaagagtgcgtgcgtaccactaaatttacgacttacaaagaagtgattcttggtggttgggagatatttctgttggtgcagtctaaagcgtcccacctaagctgctgagggaagcatggatcgccttgccagttgattctactcaatccatagctggctgagatgtttttcatagcaaccactgacataataaaagaatcgatgtgtttttgatttatttcgttactaacataagaaagcatagacctggaaaagaaagtcacgtaccgtcgctttcatctgtttcggaccgtggaaactgaataactgtgtagacttccaaagcattaagtagaggtggaagagttgatcttttggttcttatcagctgaaaattacatgcccatccattgcaacttatcggtgacgagctttggaaggtctttatacttagcttatctgggacttcagggccagtcacagataaattttgtccattcaataagatgttgaattctctggtatcatttgcctgcaagtcttggatctcagcatagtgtgcgtaaaagtaatattggacatccaatttttctgaattccatttaaatgtcagtggcgcactagcatcagtaggcgtggcagcatttttcagcgcatcttccggtggttggtagatgttggtattaatcaccccgagagcagtggaaatctgggtccattcgtccatgaagcgcggaaaccatgagcgatcataaacatctttactgtacctaggggttaagaacaatattgttttagcagcagaataggtatcataaaatgaaactatgttattcaccatcgtgaaccgttgtaatattaccatactgatcgtcttaaaaccaaatgtatggaaaatttcattgtttttttcttgtcttctatattatttagagtcgatgttccttgaaaagaaatcagcctacttgtgttgaaaaagtgtaaacagacaaatgagaaacaaaggcacagaaaacatagcagaaagaagagccattgttcagttaaaagttgacttaccgtagcctagatccagactttttaaaatataaacgcctgtatgttttcagggaaccagacacagtggtatagcttccagttctcattggccgtaattccaaagaggatatcagcggtgtagtttccccagtctgaacaagacatatctgcaacgagttcgatgttgggatgtgtaagatctcttcccctgtaccattcacatcttgtaaatctattttcgcccataaatttggtccaagataaagatcaaacacaggggctatgttatgaccatcgtaatttccatataaaaaactagcagcgatcaaatatttacgctccttgaacacactcagattgtagcaattccgtactccctctgggaaatatctcagcgttctgtatggcttcaagaatttactctcttgatttgcttggactctaccagtttttccgctctggatgaatgttgcgtccgaagagaacaacagaccagtttgagtctctgtataaggagacgtctcatttgcgggtagcccgcaatccaaactgatgaaccctgttaacagacattaaaaccagtgcacttctttcttataaccaaaatgtttctacacatagatgtatatagaacaaagacgatatctgataccttgtgggtcttgagcttgaacaatatgaatgatggtcaaagttaacagtgccaacaaaagcccaaaagaactctccatcttttcttaactcccaaggaaaaatcaagaaaccaacgggtggctatgctgttgaagataaaactttaaataaataagcaaacccaaatatcatacactaaaagaaagacttagtcaggactcaagtcaatggtgaaaatgagtatatatgttttctagtgcaggcagcttcaccaatggaagaagatgagggttaagaggacaacaatgtcccaacatcaccgtcatgaagtttttttctgggaaactaaggagcggaccaagaagcacacattgatatatcacagtccaaacaagactgccctttttcgttgattgtttattgtgtttttctttaaagactgtcctttccgtagtttttttgctctcactaatttgtgagttctcttttatcgcgtaggttattagtctctaattattttgtttaagaaatcacaaacaatattctttttctttagttttactagagaagtgtcacttttgatgcaacagtagtttcttaattaatcagacaatcagcatgaatcttagttccaaagaaactatcatatcaatcgtaccaaaagatcttaatccaccatgaagtgatgatgcacgaagacattttagtgcaatctcaaaagagaaacctgtttgggtttttaagtttaggcgtcttaccaatttccctgtagttttggaaaagggtttttgttagaaaaatgaaatcgataatcggtaatgctgctgaagataaacttcaataaataagcaaacccaaatcattcacaaaaagaaagacttttgataagtcaatggtgaaaaattgagtaaatgtgttttctagtgcagctagcccttcgccaagggaaagatgagggttaagaggacgacaatgtcccaatatccccgtcatgaatttgggagcgggccaagaagtacgttaagcaataaattggcacattataggacaatcaataatataagacgagtccaacaacctagagtacaagacggtctttttgggtttttgttttcttgaatgtcttttttgttgttgtttggatgctctcaattcaataatttgtgagtctcttaagtttagcttaggttattagcctctgattattttgtttaagaagacactatcaaaatccaaagaaaaacatgttcggataaccacagggcagcgagtctgagagaaatcttggtctgagagataaacatcaaataaataagggaaaaaaaaaaacatatcattcacaaaagaaagacttttgacaagtcagtggcgaaaaagagtaaatgtgtgtgattctagtgcagcttcacagaggtaagaagacatcattttctcttaaattcagctaaagttgattagcctaattatttccttcaataagaaatcacaaccatgtttaacaagttgatttagcacaaatgtcacaatcttaatcacaccagaagatttgagttcatgatgcgtaagtagaaattatagtgtaatgtcaaagcaaacacctgtttggataatccacagagcagcgagtccaagagaaatctaggtttttcatctatctcagcaggcttcggcgagtcggcgactgagaatgataatctccggtggtttacgacggcgaaagatcccgtcgagcgagaaaaagagcgcttcttcatcatcagcagttcccggcggtgagaccttttctccagcgatcgacgattgattcgcgttaagaaattgccgccattcacagacgcttgtttggcccattgggcttaagccccactcttactagggtttaggcgtcttcaccattttttttttctttttataacgaaaaagtgttttttttttgttgttgttggagaatgtcacaaaagcaaaaccatggagaagaaatcacattttattatagatgttttacaaattgatatgttgattcaatattggtacaacaagtagacaactactcaaaagtcaaaactatcttgctccaggaaccaccgaagtatccaagctaatattcatttcttgatattccatgcctcgagtcttgctcatcctcgagttttcacacacaagacactcttttagctcgttgattacctgagacatggttggtcgtttcgaggaagaagggtctgcgcatgacattgccagctcaagtgctctccacgcagaattagagtcataaaccccgccaaggtttggatccatgatctcaataatatcacctcggttaagcttagagccaacccattctgttatgtggtacttttcagagatcacgggctggtttgtgatcatctccaataacacgatcccataactgtagacatcactcttcgcagctaaccgacttgtagggtaatatctgcaagacaagaacagggtatatactctttaaccattgaagaatgaataggaagtttcaaaacaaagagatacttactcgggatcaaggtatccaggagtaccagcaacgaatgtcgaatcataggactcacctctaacttggaaagatcttgagagaccaaaatcagcgagtttggccttgaaattctcatctagcaatatgttggcagttttgacatctctatgaaccattggcggtatgcatccaatatgtaagtactccaatcctgcaatggagccagctatatcaaatgatttaccgcaaacctgaaaatgagtcgatatacatcttattctacggtatttaagttagtacaaacctagtgctgcgttcaaggctatttgtagacgaatactccagttgatgatggatttacctccttttcctgtatattagatcttttagacccattcaaggctatttctgagtttcatgaccaaatgcgatgagattactagaacaatatacctgacaaatgttgttttaggtctccattgggaagaaactcatagataagggcctaattatctccttcatagcaatacccagtgaggctcaccaaatttgtatggtgaactctcagaagaagatcaacctaaagaaagactcatattaaaataatgttgaaatctgtaactgtaacctttagttatgctagacacagaacatagtttagttgggaagattgcagaaatatggatacctctgctttgaattgtttatacccttgagttgacgattgagagagtactttaacggccacctgatcagaaccctttacagtaccatgatacaccatgccgaaccctcctttacctaagactctttggaagttgtttgtcattttgatgacctctaaatatgtgaaccttttgcttttcttattagcaaatgtaacatctacagttgatgtgctcggtggcaggtgttgacctatacatcagaaaaaggatattatcatatcgatttttctttgtatctcttcttttaatgcaatggaacaatgacatttacaagatttgataaagttttcttatttgatgtctctcttgcaagtaccttgtacaatagttgactttctctttctgagtataagaaaaagaatcaatacagcaacgacaatggcagcagaagcaactgatgcaacaattgccacatgaattttcttcttaggtggtttcctacatgaatcagagagacagagccttgggtttccttcaacactacaagaagccaaggatttatcatgacatcaaatgcacaatagggttgtggataaacaactgagaaattttcaaaaactatgtagaaagtttcttacaatagttctagtctcttcttttgaagagtttgaggtattgaaccactaagattgttcccacttaaatttctgttaaaaacgaaaatgatcttaggtggaatctgaaaaacattaagaagtatgttgagagaaacttacatgaaggacaacgatttcatgttgcctagaaactccggcacccctccagtcaagttgttattcgacaagtccctaatgttagaaagagagaatttatatgatattatatatagaacaatttcttgctttcaatcgacaaaggagtcatacttacagtttttctagttgcgtaaggttttgaatggcagcagctatgtttccagttaaaccacttgaagacaagtttctggtaaagttttcaaaaccacattcaaagttgtagttaaagatcatgactactaacagatcttgaagagttagtgtccgtgtctactgattttacgacttacaaagaagtaattcttggtggtgtggagatatccgtattgctgcaatttaaaccatcccagataaaatgttgagggacacatggatcgccttgccagttgattctactcgattcgtacatggcttcaatcttttttatagcaatcactgacataaaaagtttcgatgatgttagaaagtaatacatgaaaaatgcatacatgagtaccatgcttatgttttgtttcctagatcactaaccataagacataccgtcaatttcatttgtttcggattgcgggaactggatgactgcatagatttccaaagcgttaagtagaggtggaagagttgatcggttggttcttgttagctgcaaactacatttcccttcttggcaagtttttggggtcacactttggacactagttatgtcaagtttcttaggaatgatagggtcagaaaaaacttctccgttaaataggatgttgaattctctggtatcatttgcctgcaagtcttggatctcagcaaagtgtgcgtacaagtaatattggtccctgggacttcctgactgggacttcctgaaggccattcaatcgtcaatggtgcactggcattagtcggtgtggcagcatttcttagcgcatctttcggtggagcataattgttggaattgttcacttcaagagcggtataaatctgggtccatcccgtccgaaaactggctccatatgatacccatgtgcgatcatatacatctttcatgtagctgggggtgggaaacaatgttgttttagtagtaaaacaaaaaaaaatgatcatattgattgccttaaaaccttatgtatgaccttttctaagtgtcaatgaaaacaacccttgtattgaaacagagcagaaagaacaaacaatgatcagttgaagttaacttaccgtagatcagatcctgacttgctaagatatgttcgtgataaaagattcaaggaaccagacttagtgatataagaaccatttcccataattccaaagccgatattagcggtatagtttccccagtcttaacaagacaaatctgcaaagagtttgatgttgggatgtgtaagatctcttccgctgtaccattaacttctgtttgcaaatccaccgtggcccatagattaggtccaagatacagatcaaactttggcttaaggtcaaaaccatcataatttccatatacaaacctagccacaatcaaatgtgtcctgcccttctcaacgtttagattgtagcagttccttattccatctggaaaatatctcagcgtacggcttagcgtatccctgaggattttctcggattcgaccgttttttccactacgtatgaacttttcatccgaagagaaccgcagtccagtgaaactctcttcataaggagacagttcattcgcagggagtccgcaatccaaactgatgaatcctgttggcagacatttataaagattattctttaaaacaatgcacttctgagaaccaaaaagtttgtaaaagaatgtgtttaaaagggaaaaaaaaggtttctgataccttgttggtcttgagctcgaacaatatgaatgatggagactagcaggaacaaaaggccaagagaattcttcatataatcatcttctctaaccttccaaggaaaaatcaagaaaaccatttggctaggaagaaaatgtaaaagccgaaagaaagactttgccaagccaaaagaaatgagtaaatgcattttctattcaacaaaatgaataagaaaaagaggacagcaaagtcccaacatcactatcatgaactcaatcatggaagatatggagcagacccagaagcacgttaagcaataaactatcacatcaattatatttgacatagccttaagtgaatggtgagcctaataatttcagagtacagataaatgtatgttgagaaatcacaatccataatctgtttctttaattttatatactatttgacagttttaaatcaatactcttccaaccattttacaaatatttaaccaaaatcatttgtttgttaatgatggaaccacaaagaggtatactcttttacggtcaatgattattagcatccaagccacacatacaaagaatgaaaacatcactaagcacacataaaataatgaaaacatcaccaagtaacagggtatatgatcttggcatgtggatgatcaaagcaaacatgaccaatagcccaactaattagcatggttgtgttacctgcagcacatactaccttgccctcggaaacaactctgtgtcaaagctcatgctcactttaagagaattctgagagtccatattcatattttccctcaagttttcagaaacaagacattctttcagttcattagcaacttgggacatgtttggtcggttcacagaagaaggattcgcacacgacattgccagttcaagaactctccatacagaacgagattcgtaatccccgttcaggtttggatccatgatcttagtaatatctcctcgggtaagctcaaatccaacccattgtgatatgtgagactttgaacgggactggtcaatcacaggttggtttgtgataatctccaataacacaattccgaagctgtacacatcgctcttctcacccagtcgagttgtctggtaatatctgcacggcaaaagtacatggttatactctctaaccaatatataaagtgcaaaatgacaactcactttcagcacattgtaatggtaactaacgacacttactcaggatcaaggtatccaggagtaccagcaaccacagttgaaatatgtgtttcacctccaatagggaaagatctcgaaaggccgaaatcggcaagcttggcctttaactgttcgtccagcaatatgtttgtcgtttttatatctctatgtacaattggtggtgtgcatccagaatgtagatattccaatcctattcaaaggaatgattatttgttagtccaccagaaggaaagtcattttaagctgccaatattggctaataagcttacgaacctagtgcagcctccagagctattcgtagacgattaccccagttgataaaggacccaccgctttttcctgaatacttgattctttagatccttgggaacgttgaaacatatatacactttcgaatcatgaagaaattcaagtttaccagatagatgttgtcttaagtctcccttgggcaaaaactcatagatgagagccaagtgatctctttcatcgcaatatccaacaagactcaccaaatttgtatggtgaactcgtagaagaagatcaacctaatcattcatgggaaataaaagtaagagaaagcgttagatggtcatatttttaagaagattatgcatacctctgccttaaaatgcttatatccttgacttgatgattgagagagaactttaacagccacctgttcagaaccatttatagtaccatgacaaacaacaccgaatcctccttcccctacaactctttgaaaattattcgtcattttgataacctctgaataagtaaaccttctctttttcgtctcgattgatggttcaggtgaattatcatgaaccattggcatactcagtggaggttgtagagctatagataagaaagaaaaaaagtagggtatgtaagaattcatcgatttgttgcagtttcttgatttgatgagagatctcctgcaaattacctcccacagtagatgactttttcttactgagaacaaaaataataaccaacacagcaacaattatggccacagaagcaactgatgcaacaatcaccaccgggaatttcttcttcgagtttttttctgtgcaggaaccagagagacaaagccttgggttgccttgaactctgcaagaaaaagagtgttgttaaaaacatcaaatcacaaaagggctgtggaaaataactgtggaatattaaaaagtacgtgggaagtttcttacagtaattctagtccctctcttcgaagaccttgaggaaggggaccactaagattgttgccgcttaagtttctattaaagaagagcaatcttcatgcatacagacacatgaaccaaaggagaactgaaagtaaacgaaaatatgctgagcaacttacatgatcaccaacgatttcatctgggctagaaattccggcaccactccagttagtgtgttatttgacaagtccctaaaagtttatttccaaaataaagtagagctcattaggttttcctccatcaacaaaaccaatattaactatggccatacttacagtttttctaaatgtgtaaggttttgaattgcggccgcaatgattccagttaaaccgctcgaagacaaatttctggtgattccaaagcatgatagttaacttattttgaagataagtgtcaaagtgtgcatgttcatatcttggatcttacgacttacaaggataatactcttggaggtttagaaacatctgtgttgttgctacagttcaaaccatcccacgcatacttttgagggacgcaaggatctccttgccacctgattctactcaatttataggcagcttcgatatttttaacagcaaccactgatgtagagctcaaggatgtgagaattagcaggtgaagttgatttctctagttaaaaaaaaaaaacagactgtatctgcataacaatgaagataagtaacataccatcattttcatttgtttccgaccgtggaaattggataactgtgtagatttcaagagcgttaagtagagaaggaagagttgacctcgaggtttttattagctggtaaatgcaattttctcctttgcatgtcactggagaaagattatggatagtagtcacccctaactttggagggatgaaaccttcttcaacaacagctccatcccataatatgtcaaattctctggtatcattggtctgtaaatcttgtatctcagagaagtggctgtacaagtaatattggtcaccaggattgtctggtggccaactgattgtcaatggcgcgctggcattagaaggcgtggcagccgctgcaagagccttttttggtggttcataattgttatcattggtcacttcgagagtggtgaaaatttgggtccaatcatccaccataaagtaattatgccatctgcgatcataaatatcatccgggtacctatgtggaacaaaggttgtattatccttgaataagtataggaatgttaaaaataaagagtataggaatatagaatccatcactgttaaccaaaaaaaaaacacttaccgaagaaagccatctgtcttgttgagatatatccgaacgaaaagattcaaagaaccatctgtgagataagaattatttcctaatggccgtaattccaaggctgagatcaagggtgtagttgtccctgtcttaacaagacaaacgttcaaagagtttgatgttggagtgtgaaggatctcctccattgtaccattcacaaacttttgcaaatctatagttgcccacagattaggtcctagatgcagttcaaatatcgggttagagttacgaccatcgtaattcccataaatgaacctagccctgatcaaatatttcctgttcttgtcaacactcaaactatagcagttccttctctcctctggaaaatacctcagcctcgtgtacggcttaaggtagtcattctccatactcgcctggattttaccactttcaccagtctggatgaattcagcatcagacgagaaccgtagtccggttactgactcagtataagaagacggttcagtcatgggtaacccgcaatccaaactgataaactctgttaagagagtgaaaaatcaaaagcatctcagatacaaacataactaagactcgaatcagtaagaagtagtagtgtaatatacatataaaccattaagatttaggtaccttgttgatcctgagcttgaacacaaccaataatggcaaaagctcctaatagcagcagcaaaagccaacaaggactatccataattgcttttagatatcaaaaccttaccaatgccagagtttgagagaaacacagcgtataaatagataaacccaagaaacagtccaagcctctggcaacatggcaagatgtcctgagtcagtgaaacgaatgagtaaatgtgttttctattgcaactttacaattacaaatttgatttgtcccaagaatgtcagaatatatgcaacttgtatttagaaaaaataatatgcaacttctgtgtttttaagagaatatgtcaatagagggttttacagtcaccactcttttaacgcattaaaaaatgttcacacagagagaaagcaagagatttgactttctagtggtcagtgactttgattgaatcatatcggataatttatcactaattaatacacattttgacgtcttcatcgacaagaacagcttctaatcacaaagcagaggattcacatttatcaacaatgactattatctaaagagaagtgggtcaacatgaagaaacaaatttcaagacaaagacgccattatcagatatctaaaatcataaagttcaaatttttaaaggattttcagttacatcataaactgagaaattaccttccggccatgaaactgagagaattttgattccatctctttgagccggcccaataacttttgtgaggaggaggacgaatgtgaggaatctccggagataaatcggccatatacggcagcgaaatctcccgtcgtgagaaggacggcgatgacaatgagacctcttcatcggcgattagcactgtttgagaacgcgattggcgatttggagtgctggagagtagcgttttaaacgcaacggtatgtatatttttcaacgttgctataataacagaaataattgttatgggccaaacatgggttttatcagcccattaaacagaaaataatgaatttggagtgctggaaacacggtcgctggagagtagcttttttaaacgcaacggtatgtatattattcaagcttacttacagagtttctagttgcgtaagattttgaatcgcagcagccatggttccagttagaccacttgaagacaagtttctggtgacatgtccaaaaccacattcaagtgtcacaactactaacggatattgaagagcgtctggtcagaaatcgatattcttacgaaaaaattacggtcattattttcgtcagaaaattgtgaccattttcatacaaaattgtgacgtatttatttggtcataaaaacgttactatttcgttataatattatgacttaattgaatgtaactaatgtttgtcactaattatgtcaaatttgttacaaattatatagtcataaatataagtacggatttgcgaccaaatatagtaactaaattatacgataattgtgactgaatttatgtcatgtatagttacgagaattttgtaacaacgatgacacaatttgtcactgttttagtgacttttgcgtttggtcatagattgtgacataagtgttaccaattttaatacaaaaataaaaacttgtgaacaaaaaattaaataaaaaaacttcttcagttttggaaacaatgtttttgataatacaaaaaaagctgtaaaaagtccaaatgaaaaaaaaaattattcggattcgtcactagttaattcgatatcagaatttccatcttcagcatctgatccatcttcggcttctactactggatcatcaagatcttctggttgggcatctagatatgatagtgtctcgatttgtaatgaatcaacttcaacaatagaatcatcgttatcatgctgcattgcagtgaaatccagatttttgttatcaatactttccctctcggttgtatcataattgctgcttcccattgttgatcttttctcggctgagtcatccgtggatatggaacataacatacctgatctgcttgtgaagccaaaacaaaaggatcatactcttcataatgccttttagcattaatatcaataatccctgacttgtttcttcgtatacctctcccaacttttgaatcataccaatcacacttgaagaccacgaccttgagatcaacatgtccaggataatgaagctcataaatttctctcaatattccatagaaatcagcttcttcatttgagctagaagatgttgtacctttgacacaaactccataattggcattctttttgttctttccatgatcatatgtatgaaatatgtatccacgacaaaaatacattggccaacaagtaactttaaccattggaccatgaacaatactcaacaaccactctggatatgaattatccttccaagtatcctccacctgattcaatataaaaagacacatactatattataagctatcaagtatttatctcatataaaaaaaaaatatcttacatatttttttaaccagcttgaatattgcttttctctaagctcatttagatctttttcacttatcccaggattagccgcgatcaagctctcatcaaacaacctatatatacatatataaccatgaaaaatatttacaatgtcttttactaattctacaaaaaaaaacaaaatccatacagatgtccaaattattttgtcatacctttcaaatggtcttaattgatcgcagttccgcaaaatatatctatgtgcgatatggtaatctttatcttggagccatatctcactttctttcccactgtctcttcctgcctgagaaaatatatctggaactccatcaaactcatgtgtatcttcttgattaccaccatcatagtgtcgatctcctgctcgattttttgtcttgatgtgtcgatcaaaataataagtacaaaaagtagaaatttcttcattgatgtattgctcaacgatcgaaccttctacttttgccttatttttcacctttttttttagatgtcccatgtatcgttcaaaacaatacatccatctaaactgcacaggtcctccaagactagcttcgtgtggcaagtgaattagcaagtgctccatgacatcaaaaaaagaaggaggaaatattttctcgaggttacaaagaaccatacaaatatttttttgcaacatttcaataccatctttgtgtatagttcttgcgcataggtcccgaaaaaataagctaacacctacacatataaaaaataactgttatatgaagaaatggtaaatattctcaaaacaatatgaacaaaaaagttaatgataatttaaaaatattctcatatctatatgtttttttatctctatgagctatataattatgatttttttaaaaaaaattaaatgcagaaaattacaatcatgctcaccttccaatttaaaaattaatagattcacataaataaaaatatcgctatcaacggtcttaattaaaaactaaaaaaaataacataaaaatgcagagagattaaaataaattaatcgaatgttgaaacttactagatagcgcatcgtgtacagatttatccataagctcagcaaaagctattggaaagagtctttgcattaaaacatgacaatcatgacttttcatccctgttaattttcttcctggtagatcaacacagttagctaaacttgatgaatatccatctgaaaatttaacatctttttcgagccatcgtagaaatatctctttggcatcaggttttagtctaaactttgggattggtgccttgccctcaggtgttaagtgcaaatctttgcgattacagttctcttgcaaatcaagtcgtgatttgatgttatctttcgtttttccctgcacattcagtaacgtcttgatgaaattatccaaaacgtttttttcgatgtgcatcacatcaagattgtgtcgaagttttagatctttccaataagatagctcccaaagaatgctttgcttatgccagttatgcgttttaccgtatccttctaatcgtccatggtttcccccgcaatcaactgtttttggtaaacaacaaacttcattataaagctcctcgcctgttagtatctccggtttactatcttccacaacctttccttttttgaagtctttcttattccctcgatagctatgattaaccggtagaaaacatcgatgacaatcaaaccaacatgtttttctaccattctttaaccaaaatgcaccggtttgatccgaacaataaggacatgccaaccgaccatgagttgtccatccagaaagcataccatatgcaggaaagtcgcttattgtccacatgagcacaacttttaagagaaaattctgcttagtagaaatatcatatgcttcaacaccgttaacccacaaatctttcagctcttctatcaatggttggagaaatatatctaaacttctcttaggatgatttggaccaggaactagtatcgttagaaacataaattcttgtttcatacacatctcaggtggcagattatacggtgtcaatattacaggccataatgaataattatgtcctgacataccaaatggattaaaaccgtctgtgcataaccccaaataaacatttcttggtttagaagcaaaatcagggtgtaccttgtgaaaatgcttccatgcttctccatctgatggatgccccatttctccatcactcgctaagtgttctgcatgccatctcatatgttttgcagtattatgagattgatataatcttttcaatctatcggctatcggcaaataaaacatttggcgatatggaatgctcttttgcccgatcttctgagtaggacgatatctatcttttttacagaacaaacaatactcttctttttcagtctctttccagaatatcatgcaattgtcttgacaaacatcgatcttttgataaggtaaacccaaagaccgcataagcttcttgatctcataatacgactttggtgagttgttaccttcaggcaaatattcttgcataatctgagcaatcgagtccatacaattttgagacaaattattatccgtcttcaaactcataagtcgagctgctaaggaaagttttgaaagaccttctttacatccatcataaataggttgttttgcagcatccaaaatatcataaaacttttttgcctcaaaattaggatcttcttccctcatctgatcaaactctgattctgtactaccaaatgcatctgacaccatttccacataaggatccactggttctgtgtgagactcaaacctaacagtatcttcttcagaattgttgtttattaacatattataatcttccccatgagaagtccaaacccagtagttaagcataaaacctttgttgaacaaatgtgttgccacgatgtgttcttcttgttgtcttcctccatttccacacttaatacacggacaaaaaagttttttattctccaaaaataaaggctgactttttgcaaacttcaaaaaattgtccaatccttcataaaaagcttgtgatactcgattggttgtaggatcgattctttcatacatccaatgtctttcagcatatatattcctatttgaagacatgaaaacctaaaaatatagttgagaaaataaaataaaatttctggatggaagacgtaattcaatatgacacaacaaatcaattcacgttactactccggttaaccaattaaaccaacgttttctaataaaccaataattgaccaagctatcatctccttcacaacaaacaagaccattcacttatacgtgacaaacaaaaccaacaatagtctcggtttaacgattcttatctatttaggaattataaaggaattattagactattatacgacaattatacgacaattcttatacgaaaacttttataaaacttttatacgcaaacaatgatattagtacctgcaactaaatagataaaaataaaaccgagagaaatacaatcaacaatagtctcggtttaacgattcttatacgtgacagacaattcctttataatcaagttttcgtataatagtctaagaatctgttgatttaatttggtttgtgcttggtttatgttagggttttattttcatatcaacctaaatcattaacaaacatgagacatgggtttgttggaatacctttctctccaactttgacggattggactgatggagcgaacaacgaatacgtttcaaacggcgagacgggatggacacaacaagggccaacgtggagtttattaaagtcaacctatagaagaaaaataaaaacagatcaatgataatcgaataaagaaacaataaaccaaataaaaacagaagatgctattattgaaagaaggctacgtctatatcttcgacgccgactataacttgttcaattttgagaatatgtggggatgctaaatcctatttatagttttattagtatccacaaattttatttgactaaatccttgttaaatttcttttcctaaatttaagcaatatctattgaactgacgaaaaaaaagaatatctatttaactaaacaaaattcaaaactcttttgatctctcacttccatttgctgatttattttggaattcctctcattcctctcactcctctctacaaactccgaaaacatgtaagttgttattaatttttcttttgaatatatgtttatgttagattaagttgttaggttttggggtttaatttggaatatatctcttggcttatgtggttttgagaaggtgtatcatgttttgttttgatattaatttttgatcatttcatgtttatagaaaaaatgaaacaagaaacgattcaattggaaaatgttcagaaggtggaagaagcagaggttgttcaagaaacggagaaaagaaaaaaagttcatcatggatttgatctaaacaaaacgttttattatgaagatggaggagagtttcaccctggagatggatttgttcaagaaacggaaaaagacaaaaacgttcaacctaaattcgattcaaatggatttacagtttttgcagatggagagctagacccaaataaagaaattcaaaaaaccataatagatatgtataaaatttattggccacacgtctatggagaatttcacccaaaaaagtaataaataggtttgcttaattagtttttgtttattaatttcatgctgaataagtttttctagattgcatgaaatagaaaaacaagtttttattgtgatttaataatcatatcaatattcaggttttattgtagtcgaactacgcctaagtgtatgctggtccggggagctattaccatagttattatagccataaaaccttccactcgtctaatatttaataagaaagcaaaacaaattctcgataaattattcatcaaaatttacataataaatgtgtatttgtttttagaacttataaatggatataacaactatagtagattcattatagttaccgatggaacatcatgtaggtgaaagaacggagaagaacagtaaggacaatgatattgtgattgacgacaacatggacaaccacaatatcagtctttttttctctgaataaaatgaaactaataatgtagtagacaaataattctattttataatatgtgtgattaggagtgattttgggagatagttggatatcccctgaagattttgtggtgagtttcatcatttttttaaaacatgttactcttatttatttatgattaaattctattcatatgatttttattgattaattgttacagttttcatggggacctcttctcaagcatgtctctaggcttgatgacaatggcttggatagctctaataggtctttatcttaatacaaaatcaatttttctaatacgtaattaatttacctctctaatctatatagtttacttttttttggagcagcttagcagagaagattaaaagacaaattaaaaatggtgaatacgttggagcgacgcaaacatggatggacctcgaaaacttgattagttccaaatccaatttcgtcgtaaattatttctcctcttatttttaaattcattagtatgtacaattataaagatttgatgataaagtgagtatttactataggttacagggtaaaaaaaaaataaagaatcagccattcgtgatacaacaatttgaatatatgttaagtcattagaaaatatgtttgaaatttttgattgaatgtttttaattcacattttaaaaacaaaagaaagtttattaaatatttattaacaaactatatattaaaaacacacatcttatctcaaaattggctctaatacaccttaaatttacttaaacaaaaataatggtttagaaaaaagaagtaaaaattctaaattacaaaatctatgggctcaccggaggaagcggtggaagtagcggtggtggaggaggaggaggaggaggaggaggaggaggaggaggaggaggaggaggaggaggaggaggaggaggaggaggaggaggaggaggaggaggaggaggaggaggaggaggaggaggaggaggaggaggaggaggaggaggaaaggtgagatgctaagctcgaagcctaacttagaacagaaatggaattcgatgagaagagaataaggtaagagaaggaagaaagttagagtaggagaataatatgattttcaaaagataaggaaaccctaaagtttgggatccatttaaatacaactgagtttaataaacgacatcgtttaacacaattgtacaattgaaacagaggcttctcgacacttcttctttatttattctttttattttttttttgttcaaagtctctacacttcttcttttcttcacttctagccacttttcacccatgtttcttctcccatttacgagccctccttccactggttctcatcttcttcttcatgaaagctaagggtatcttcaacctatcagagtcgaattggtttatctcggatccgttcagctccagctacttggattgaaaccctactcgaagaagatgaagaagaaggtttaaaacctaacctttgtttaacatagcttcttagagtgataaggagtcgtgactcgttcgagttcccaatttctgttgattgtacgattatagtttaattgggtgtttgaattgggttttgaattcacgattatagtttaattggatagattgagtgttgtctctgatagttggtgaatggtactgaacaagtagctattaagatactctcccattcttcatctcaaggatataaacaattcaaagctgaggtaaattcacactttcatcattatctaattgaaacaaaagcatcaatgattcaaatattttgaaggatatatatctataacttctgatttctggctgggtatttaggtagaacttcttcttagagttcatcacaagaatttggtaggcctttgttggatactgtgacgaaggagagaacttggctcttatatatgaatacatgtccaatggagatttaaaagaacacatgtcaggtaagacaataatgactaactgtattttatcagttctatagtgcgaatataagactttagcatttatctcaaagtgttctttttaaacacaggaacacgaaaccacttcattttaaattggggaactagaataaaaatagacatagatttttgtaatgatggaaatgctattcttcgtgagctggattttcatttgtctcttacttttgtatgcttatcgtttatatttggtttaatattctctcttctcttcaaagctacaggcagaaattcggctgttgcacacaagtcaggatctctaagtactccagcaacttctactggacaagcaggggataataagtctttagtagtgcatggtgtcgttccacgagatagtgatattgggaaagactcttctgattcaggaaaggaatccatcactttctcaaaaagtttgtgctagatgatttgcagtaccaattctgtttctatctcattcttgttttgtcattaagcttttctctgttcattttgttaggtgagaagaacgtgaataagtgatcggattaggaggctgcaagagcttgttcctaacatggataaggtacatttcttttacaatgcagattggtttaaagtttttcttggaagtaaaaatattagaattaggaaagtatttagaaattcttagttaattctgcgaaaaatatgcaaataagtatagtaaatatttctacgagaatattctagatcctttggaaaataattacaccattagcgccttaaactttcccaaaaatacctaaaattttcattaaccgcttaaattttgccaaaattttccccactcaataagaatccctaaatctgcgtcaaaactatgtaaccatctccctctatctctcagaatcgttctctacgctacttccttttttttagagagattggtttgtcttttacttcagagatctcattgaaaggtatttttacataactctggatttttagaagctaatctagatgttaaactgcaaatctttgttctcctactgtctttcaaatctccatgtctctagttttgtatttttttaaaaattattcatgttagtcgttgtaaataaatttctgggttttgctaatagttctcaacttggattactatttctgaatatagataagaaatgatgaaatctctaggttttttattatttgatatgagctttctaagttttcgctttgtagaattcaagattgataacttctgaatttacatgtgtttgtagtgtacttatggatgagccatatgtggaccgttcaagtttacctttgctgcatccttctcgtttgaatggagctaaatggtatggatttttccctatatttctttgattattttcactgaatcttaaactcattaactaattaatttcaatgaaacaggtttaaacaccacactcaagtatcaactgctgtaagaaaggtcattcaaagttgttttaagggaccatggtgttcttggaaaagagtgccacccttctacaaacgatcatggttttctctgtttaaggtattctttgtgctctatttcatcagattattttcgtaagtgatttcaatgttactcatcatgtgtgatatactttgtttttcagaaaagatttaactgggatgattccatcaactatcaagttgaaaaagagtttaataagcttgctgcttatcgcctcaaaggaatgataagccatgcaaaaagtggaggagaaaaaccagattggatattgtctgactactggaccattatgcaaaggtattgggcaactgaaaaagtgaaagcaactagtgagaaggctcgtgcttctcgaatgtctgatcgcaacggtttaggcccacattcccatcgagcgggttcacgctcctttctcagagttaaagatgttttggtagttatatatttcctttcttgttaatttctaatcgtgataatttttctgctgtttcactttggcttattgtttcttttacaggaagcaaacaatgaagactactcttttattgctgtgatgaagaaaacacatcagaaacctgatggctcgtacgttgatcaacgagcgcggttggttgcagacacttatgaaaagcatgtacaagaacgcttgggtcaacttgaatctgctggggaagagaatctgagagctgaaactcttgacaaccatgagaaaaatgaaatttatatcaaggtaataattctaaacattaggctggttttacactcactttaggcttgttagtctatagttttacattcactttagccttgttagtctctggttttacatttatttgttcttgtgatatgtgtagataaaactatcgttttataaaacttgttagatgtttagtgttgtttgcttcaggtttagtgttgacgtgttttgtgcttgcttctcaacggccctaacttttatcattttataaagcgtgttttttttacttctcaacaagtacgttccttttcattagtccggtttagaattggttatcaaatttggttcctaaaagatatccaagttcacatccaaaaaaaaatatgtgcatatcgttttatcatttgttctacaagccttgttagatgatatcgttttatcatttgttctacaagccttgttagatgacttgtagtgttttctgtttttgctaatatatttagtctttcattctaggctgctggatcatctaaacatggccatatatttggacttggagcactaatggagactctaccatctgttggtgcttcttcaagtgcaccacaagcttcagaagaagtagagacgataacgcatcggctacaagagatggaaactgatcttaaaaagagccttgaagagaatctgcaaattcagaaaagacttgaagctatggaaaaacttgttgagacttttgcaagtcaaaatgtctagatccaaatccaccaccaagaacgtccacttaatctatcttatgtatggttccttttagcctaagtattgtttagtttgtatttgctttaagttgtgtttctagtttgactttatttggatgttatttgtttgtttggatgttatggtttgttttatttgcattaacctaagtattgtattttgtttatttggatattgttttatgatttctataaattatggtttctattagtcaatttgtttatcggatgttgtttaataatttctataaaatatgttcgttataattttataaagagaatgactgcaattagtaaaagcaaaaaaaggtaatcatacgtttgtgaccaaacgtccatgtgttgttcatgaaactagttttgtaacaaattgatacgagtttagtaagaaaaaatgtcacaacataaaatcaatttgtgacgtttgtgtgactataatcgagtcactaattgtgacggatttgtgattgtattttggtcgtaaaatgtaacgggccagtgacttaaatatggtaataatctgtgacaagtatgttacgattttattgtcactagttgtggcatagttgtgacagtatcgttcgtcacgaattgtatccgtttttgcgactataataacgtcgtcacaatcagtgacaaattgttactgttgttaatcgtcacattcgtttgtgacctttttgagacatacatagatttgtgacgattttattgtgacattttaaaatttgtttcagtttcgacacaaaaaaattattgtgaccgaatatctttttattgtaactataataatcgtatcaatattcagtttttattgtagtgggggtgatcttatgacttacaaagaagtgattcttggtcgtgtagacatatcagtgtcactgcagtttaatccctcccacataaactgccgagggacacatggatctccttgccagctatttctactaatttcataggtggttttgatgttttggacagcaaccactgacataacatgttttagtttatgatacttgagttaacacagaaataatttgactacctttctaaacataaaacaatagtatagaccttatatgcataacataccgtcgttttcatttgtttcgatctgcggaaactggataactgtgtagacctcaaaagcgttaagcaaaggtggaagagttgatctgttggttcttctcagctgaaaactgcattttcctccttcacaagtacttggtgactggctaaagatagtataaatagtgaattttggaggtattaaagggtcggcgatgacttgtctattccaaaacatgttaaattcccttgtatcgttggtctgcaactcttggatctcagcaaaatgtccatacaagtaatattggttattgacattactcgaactccattccatcgtcaatggtgcagttgaattagtagatattgcagcagttttgagtgcttcttttggtggaaaatatttgtttgaattgctcacttccagggtggtggaaatgtgggtccattcattccttgaaaacgtagtccatacacgatcatagacatcattccggtaccttgtgacacaaacaacagcgcatgtatgaaataaacataaacggacatgtaaggcaaataaaagctctggttacatgagaagaggtctttagtgtgcaaatataaaaatggtatatgactgaaacaaatgagtaaatgtattttctatcgaaaaacacaagaagactaggaaaataatctccggacatcacaatcaagaacttgaatagcctaacattatcctaagaaacatatgtaaatttcttggtcagacgatataggcaacttggtttttgaaagaccagttcaattgatctcaactgttatatagtttatcattctatagctaatacaataagaatgttcatagagagagagcaatacacacggatttgaatttgtagtggtctctaacttgaattggtccatttttccatgttttctctaatgaaacaagctttgacaatttcctttcacaataatagcttcgaaccaagaaattatagacagatcaatcttgaagctaattcaaagagcagcaccgtggtaaaacgtacaaatagaagtggattaacatgagaaaaaacaattccagagtgcttgaaacgcagtcgcgggaaattcgcgttttaaacgcaacggtcattagtggccttttacaaattaactagaagacttattgggcctttattgagttttggatagcccattaaatatccagaaagaattcggatccagtaactattacctatccatcagtgttttgttgtcactttcatctgtctctacgcgaagcagtctccgactcatccagataccaaagtttagagagaagaccaaagagaacaaaaagagaaaaagagaaagatgaggttgttcgatccatggccagtgttcttcaagagagaatggaaacgttgttggccgtttctcaccggattcgccgttaccggcgttctcatcaccaagctcaccgctggactcactggtaagtctcttcagatctgaccaatcgtcatcggaaatgaaagagctaatcctcaattgatccgtatttgtggaatcggatcggatatattgatgtattgtgtctcagtattgattgttggatcgctggttgtgaaaccctaattagtaaatgtattgactcattttgcagaggaagacgccaagaactccaagtttgtccaacaacacaggcggtaatgtctttctctttcgatcatatcaatgttaaatttcgatttggaagctgaattcaaatctgtatgtgatttctctgcatctgttaattgaatcttattaagtcacctacttcattcagatggcttagaattttattgtaattcatgattttgatatctggttttctccaatagcctgtacaaaatctcaatgtgtaatgtttgatttgtcttgcatctgtttcttgagccagtttggttctgtatatattttgtaatgcttgatgcattgtgagccatacatgagtttccaacatcattcagattaactaagtgtgtttgatcagactcttgtaataacaagatttgaatccttgatagatttaggatttcacaggattccaacacacttaccattctctatgtttgttcatgttctgttgtgaaatctcaggtgatctactgacgtgagttgtcgaagctgagaagccgaagcgttcttatggaaactactgagagtgcttcagctttcaaacctgttctaataacatgaaagagaggattatagacactatcaatctctcgtttccttttctctgtgttttcacaactcttgaacagtgcaaattctactctgtttatccaatttttttcctttgcaatgaatttcttcttctctttttgttccccaataagaatatatggttaagtatatagcctccacttgctgatcaaacatccattgttggttaaaatatgcaaaattactaaatataaatctttgatgcaaaaaaaaatagaataactatcaagaaactattgtttaaatataatttaagtatgacactctttagcaaaatgaaaataagaaaacttgaatataatgttcagcaatagcagagacgaagttgattatataatccatcaccattactcattaaaacatgcacaagtaaaggaacaagcttgagtttttctttctctgagatttgagtaaaagagtgttgttgacgggaactgtatttatagatacagggttacagtatgtcggttttcctattccttaggtaaacgtgaaaagctcttatatctagaaatatattgaatttatctatataacttaattaaccataattgagaataagattaatttctcaccacatgtacaaaataattatttcatgagtattaaaccaactaagaaaaacattttaatataacttatgggattattgcaagccaagatctttcttcaattgagcaagagttgcttcgatctcatcaatattgtcttctatactattctttgtgctactattattcttcccggaagatttctctgttgagccttcttcaaaatcaaatctttctccgtttttgcttgatccttcattgtcttcgtcgctaatgttaagttctttctcaagaaactccacaaattcttctccaatttcctgagagataagaaaaagaaatatgagaatcaaaaggagcctagattggttttagtctatattcatcagaaccaatcttcgtggaaaaagttcatatttgacacacattgaggactccaggttatcagtagtttgatattattggacttaccgatagttcttcccaaagacttttcggttttccttgtgaggacgcactagcttcccagtttttatactcttcttgaagatctttgaagaaatcccctgccaatagaccacagaaagtgagcctctaaacaaacaattaactacaactacacaatgtgctgtgcataaaatctctagacgtgcaaaaaacaaagacataaagataataaaattcacagattggctctaccgactgttatttggacatccctcacgaattcacctgcataataaagtgtgctgtgcataagatcacactgacctcaattaacctaagtgccccaaaagaacacaacacataagagagaataccgcaccacacttctaaccacagtcattaaatggagcctagcattcacaatatgtcaataagttgtcaaactctgtgaacattttcactaaccctatttaacattggtgttcaaaaccctttaacaatgcttctacactgtgctcatacaaaaattctcttccctaattatgtcaagccatagtttaacattaaacttcaaagaaacagttcctattttacacaataggatcctcaaatgaccacatatcaatttcaaccaatatatggtgctttaaggggttagggttttaccaagtccatagaaatcttcctcgacttgactgttgccttttcgacttgtttgacccgtcgaagaaccagtcgcacgactatctgaaccgtacttacgccgtgagtcagagtttatcagagtagtgtatgcatgctttattttcaaaaacttctcttgcgcatttgcctatacaccaaaaacagccaggggatgaatcatgaattaaactttcttccacagggatagagactaagtaaaccaagtccatcagtaggtctacagagatacacatacatatgaaagcaacatacaaagtctcaattccgtgaattagtaaagacaaacatgtaagcattaaagcatccatacatagttccaattccatgagttagacacaaacaaacctataatcaaccatacaaagctccaattccttaaactccaatgaaatagaaaccataaaaaaagtacctctttattgacatctgggtgatatttcagagcaagtttacgataagctctttttatatcttgaggagtcgctgatggagacacaccaagaatctcgtaaggagaggatctagctctggttacgaagattcgatttctccgtctttgtatactactccgtcgtttatataacgaagcgagaccaatgtctccaccatagcagcaacttgttacaggaaaacccagaaaatttatccgataaaggaacgaaattggaggaagatgatgcgaaaggaagaaactttgtggtgttggagacagaatcgaagatgttgcatacataatttgctctgcttcattggattgaattccccctttttggacaatcgaatccggtttttgtttaaccgctccttcgatttccggttcagtattaaccgtaccgtttaatctggtataatcgctaactctgttcttccttgttcgttctctgtcagataaaattgggagcttttattacttccgtcactgaaatctaccatcagtaatgcgggttttgataaagtttgaagctttgattcttatccatgaagaaacttaccatcgttcctagttcttttcggttattatcaatcggttcttatgttgaactcatcgaagccaacggtcgagatcgactgttttgtagaggaagagtgcttcatgctcatttagtgacatctggtattgctcgcttgacgagaattgcagctaagcttgtaactttttatgttgaatgtgggaaagttctagatgcgaggaaggtgttcgatgaaatgcccaagagagatattagtggatgtgttgtcatgattggggcttgtgctcgaaatgggtattaccaggagtctttggatttcttcagagaaatgtacaaagacggtttaaaacttgatgctttcattgttcctagtcttcttaaagccagtcgcaatctgcttgatagagaattcgggaagatgatacattgtcttgtgctgaagttttcgtatgagtctgatgcttttatagttagctcgcttattgatatgtactcgaagtttggggaggtggggaatgcgaggaaggtgttcagtgatttgggtgaacaggatttggtcgtgttcaatgctatgatctctggttatgctaataatagccaagcagatgaagcattgaacttggtgaaagatatgaaactactgggaataaaacctgatgttatcacttggaatgctctaatttcagggttctcgcatatgagaaatgaagaaaaagtatctgagattcttgagttgatgtgtttggatggttacaagcccgacgttgtgtcctggacttctattatatcaggccttgtacataattttcagaatgagaaagcttttgatgcttttaaacagatgttaactcatgggttgtatccaaactctgctacgatcataactctattgcctgcttgtaccacacttgcatatatgaagcacgggaaggagattcacggttactcggtagtcactggactagaagatcacgggtttgttagaagtgctttgcttgacatgtacggcaaatgtggcttcatatcagaagcaatgatcttgtttcgcaagacgccaaagaagacaacagttactttcaactcgatgatcttctgttatgcgaatcacgggctcgcagacaaagcagttgagctatttgatcagatggaagccacgggagagaaactcgaccacttaacattcacggccatcctcacagcctgcagccacgcagggttaactgatcttggacaaaatttgttccttttgatgcaaaacaagtacaggatc

SEQ ID NO: 931 - DNA, 84325 bp, Arabidopsis thaliana
atcatgagccatagcacatactaacctccaaaacctgagtactggatattcttgtcattttaaaacgttcacaatggcctatgattgaattgcattggaatgactcaaaccctgatctcctaacttcaaaattagtttttcaaccatgaatcatgaaaccatattcatatttttttacgtatgacttctctacagataagatgaggataagcctacttattaagagcatcgaggactctggatattcattctcctgaatcctgatcattatctcgtaacgttacgtacgccattaataaagatccatctatctatgggaatattattacaccaacaataaaataatgctactttaggaaaatcacatacaataaaattcatttgtttttttggttagtttaagagataagattatttatttttatatagcgacatcttgaaaacctttccaccgctaattatgagactctgtctagtgaatatatatgatttttatcttcttttttttaattaactccactaattcaccatgaataactccaccccacacatatcaaattatcttagataaatatcgcattatttcaaattaataattatcattagaaatgttgttcttggttgaaacggtcaatccaatatgatttcttgcaaccgatttaaagtaggtcctgacttttaaaatttaaaatccaaatttgttttccgtcaacaacatataatatacaaatttaaatcttaatgatagcatatgctaaaacaaaccaatagattacaatttttagatttatgatttttgtattcaacatgtagctgatttctaaactgtaaaacccaaacatatgatttacacatcgttgagtctcctatagacggaccttaggatattccttaaattgtgtaatatagacgggatcacgccatcgtcacttgccatattagtaatgataatctatttgttaatgaaatactataatgaataaaaaggtgttatccaattaaaccagtcactagctttagctttcgtgattaggtggagagataacgctttcatcagccttattcgtatacgatcaattaacaaagacgcgtatactaaaacgaaactctgtgtctgtgacatgtactactactttctttttttttggtttgtttttatcttaaatcatatatgttcatgactaagcccattttaagcaaaaagaagcccactactataactatatctacccgttaacttaacgggtcgatatttacccatttaagtctgattaataaatgttggcagctacttttatttcttgctacaagtatctttgctctctgaatccgtaataattatgctatatctaaagtgttatgtgcatacacaccataatacaatatagtaaacaaaattgaatctgtttgtttagatttttgtagtatcattgtctcttttgatgaaaaaaaaagaaggtagacatgaatatttctgaaataagatttgtgtgataaacaaattacgggattagatacatcgaactcagttgctatgcaacatagagagacttggtgcgaaagctatgcatttttgtcgttaactttataagatcactatttagcttttgttttccaaagctttccaagctcgcataccaattccaatacatcgcatttttagacacaaccccaaacacacccatgcacacgactacatttttaatgtaattttgatgtctatttaaatattaaagactttgaacatgtctccactatattgaaacgtgtatgtaattaccatccaacagtttaaccatactgtttgattttttactatctgcattactgtttttttcttatatatctgttgtaacaattcacaccaagaatctctgtagtaaaaattattaacttaatagagtatatatcttataaatttataagttctgaagttttcgtggtttcttttctttcttcatttattagcccaatgaacctgtcatactataacgattaatagagagcaattttttttttgaaaaaagggtttgaggcaaatatttcgttccattataattcagtttccaaaatctttttacatcctcgattgggaataagcttggtatcttgtttgacacttcacttaccagggaactggtgtttggggctagctagagtaacaataaatggaagaaataagaatgtattggatgtatcaaaacagtcaaaatgtggataaataagcaatatgtattatgtatatgtttgaacccccacgtgaaatggaaatagaaggggtcatgggtgacttttattatttggccgttaagttggacgaccgaccgcatttttgtcagctttcatattcgtcacctccctaaagcacaaaaaaaaaactttgtaattcgaagtaatatttcctacaactaaattattaatgcttcctaagattatctaaaataacaaccaactgacatgaaaaaaaaaaatcaaaaagaataaacacacatgaatttctaaattgatgtcaaatgatgcatcaatggttctattgatctattagagttcttttttttctttggtcgtatgattaccatttagagccataaagtgtacttattatccaaattcattgaagaacataaaatgacaagaaaaaaaaaacaaaatccgaagaaaaacaaatgtggtatgtttgtgtattaataagcgaaacctattgatatctctcagtcatagcaggagagtcgtcggatgagtggaagagaatatctggattttatgagcgtatctatgtccagtcaccgtatacatttacattttgcaggtgatgagatcaacttcttaaatttgatctcaaccgttcatcacaaaatctcttcaaaggaccacaattatctcgagtgtccgtgaactcctgtcatgatacctcatgaaaagtaaacaaacaaaaaaagtcaaactataacctttaagacataatcattcaaatgaaaagggcatccaaataacaaaaataaaattggatttatttcttgtcaacaagttcttttctattaaattcatttgagccccgcataagaaaacgtaggtggaacaatcaattcgtggtgaatattaacatatctattataattatctattgtaaatttgtgaccaaaacgttataaatagcccaagttatcattaaactgttttatactaataagcaagcttactaattaacgttaaagtctaaatttttatgcctaccgtgttttactccgtaaacactttttttttattactttacagacttacgaaatgtgtgacacatggcaaaggcccgagtaaaacaagtttatgaaacggacataacatttaaaatcatcggtttcatatttcgtagtcaaagttaggtatgaagagaaactacgtggactcgtttagtcaacttgatcaccattttaaaaatatttactcctttcatttattgtacgcaaatcttacttacatataaaaattttagacacgaaacgacgtcgcgcttgactcaatgtttgtattagtgtaataaattagttttttttatatttttgttgttattcgtaaactatacataattcagattagtttggtttattactttattctatccttctttcttctttggggtaaaaggctcgtacgaatacgcaaaatgaatattgatctccatatacaaacattttatttcgtattactatatgtaacttagaaaattataaaactgacaggaattcaaacggaacagaagtttataagatcatttacttgatgatattttgatcaaaatagagtatatgaaaatacagaaacttccaactgacttacacaaaaatatataccaatatttaacaataaatagaccaaaatggcattattatccaattcgttttgaaaaattgagcgttattctattgaatacctaaagtatagtctagttcaaaaaaaaaaaagaacttaataagaatctctaccaatcttataaaattttcaaaatttgaaaacatactccataaaaagccagaaaataattcaattagtcatggccgaatttaaataaaattgactttggttggaaatgctttttctactggcgcaagtaagagccgatacatgtttatatcagaaaagccagaagagagagagattgagagcaaagtttcatttgttgtgtagccctttgtctctcgcatcctcatttttcaaaatctcactctctctttcctctctgctttcatttgctttctataaatccaaactcttaaacaaaagattttgtctttccatcaacatcaactccctcataaactcccacaaagactctcactttaaaactccttcactacttcgtgttcttcgtctctttttctttttttctttcacttttccataagcaaagaaacaaaaaggatgagttcaagagtgttcagagcaacaccagataacaactatttggtccccaggagatccaaagaccaacaagacaccagtcccgaccgtaaccgaatctggtctgagcctcgtcttaaacccgtcgttaaccggaaagtcccagtcgtctattatctctgccggaatggtcagcttgaccatcctcatttcatcgaagtcactctctcttcccacgatggtctttatctcaaaggtaataataaatcaacccaaaaactgatgaaaacgctttttcaagaaagtagctttttgagttcaaaaggttttcaaactctctgttctctttggctttttactctttattatttctgaaacataacagtgaaaaaggcggcaagttttcgaattgtatctttatttcaaaatcaagaacttcattgagcaactaaaaaagtttaaaactttaatttggttttttccaaattctcagatgtgataaaccgcttgaatgatctaagagggaaaggcatggcaagtctctactcttggtcttcgaaacggtaaacgattctcctccaccgtcggatctctataaagcctcttccttttaaaatctcttgacatttttttattgttcaggagctacaaaaatggatttgtctggcacgatttatcggaggacgatttcatcttccctgttcaaggtcaagaatatgttctcaaaggctctgaggttcttgattcttgtcttatctcaaacccaagaagcctcctcgaaacgtcgtcgtttagagacccaagatctttaaatccagataaaaactccggcgatgatatcccggcggtgataaatcgacggaggaaccagtcttggagctctatcgatctcagcgagtacaaagtgtacaaagcaaccgagtcaagcgccgagtcaactcaaagactcgctgcggacgcttctactcagactgacgatagacgacggaggagaagaccggcgaaagaggaaatagaagaggtgaaaagtccggcgagttatgagaatcagagtacagagctgagcagagacgagatatctcctccaccgtcggattcaagtcccgagacattagagaatctgatcaaagccgatggacggctgatattgcgtcctagcgaaagcagcaccgatcatcggacggtcgagagtttatccagcggaagaatgagagcttcggctgtgttaatgcagctgatatcgtgtggtacgatgtcgtttaaagaatgtgggcctgttttgttgaaagatcaagggctggcgttgaacgggcgtagcgggtgtacgataacgcgaggagcagaggataatggtgaggagagggtagataaggaattaaagagttttggaagggtacaattggaagataaggagtattttagcggcagtttgattgagaccaagaaggagcttgttcctgctttgaaaagatcttcttcttacaatgctgacaggtaaaaaaataaaacatcaagcagttcgatttctctttagatgaaacggcacgtagttctattttaacttttatgaatttacccgtacattggcaattattggttatggtgtgttgaactgttgattgaaagagctgaaaatggtaaagtttgtagaagtacattttggggtgtctttcaaacgtcttctcaatttttaaaagttctaatagttttttttaatgaaatgaaaggttataataattgatatttgataaattttattaggtgttcaagaatgggaccaacgacggagaaggatgaggaagaagcggttcgagctaagtgcattccgagaaaaccaaagccggtggctaaaaggaacaatggtgggcagcagtaacaaaaacggcacgatgagtctaacaagcttattttgggtttaagtagaagagaaaagtagaatagggaatgatgagtttgtaaagcattgtgaattgtgtaggtaaactataacaattcctttgcatgctaaaaaaattaagagttaacatgatgggtgaatatataatatataatgttgtagtctgagcctaggtgtcttttgaggttaatttcaatctggttttcttttataaccccaatattactttatcgtagtgattgggaacctaaattacaaatttcagttagttttgaccatttttcatacttttggggtttcattgatagctcctttcagtttagagtaaaatatcaaatgatcataggaagcttctttttccaacatgcatagtagtagtactactagtaaccatagaaattaaggtgtagatatttacgattttggaccaaatacataaagaacaacaaaaatatatagatttgtagggaaaacgccctccaacaaattgacttggcgtgattagtttacagaaattaccagaaatacatcgaaaacatttatttatatactattgaatactccattgaaatgtggtaaagtgatagttttccttgaaagtgtaaatagcttagagtcaatgttggggtggtaccttgaggctacaaattattcagggaaaagtctctatgccctttaattctggcctatttggcttttgtggcgtcaactccaatatcaatttgcagcacgtacacaatattttaaaaataatcgtaccaaaaagaaatttcaataaccaacaacaatgttgtcttttgactttgaaatcttagaagtttccacttacccatttctagaagtcttaaatagcactgttattcaaaatctttttcattgtacatcattaaactctatgcaaaaggagaaatacattataaattcccacaatctgcattcattagtatggaaaccagacttttaagaatttggtttattttgtcaaagttccacatcaaaaaaggaattaaatatagaattacacatacaaagcatatgataattcacttattgatatttgcttttgagttaaaagtaaaggttgacaaaaataagaaaaaggttaagaccaaattcaaaataaagtacactgtattatatttgacatatatctagtctattgcggtacattcaaggatagatatagagataattatataaatatacataagatcttgcagtaggtgactgacttcattgaagtgaattcatacatattttggtaaaaagatctgtgattgcgtgtacacgttgtgcttcacagttttactacagttaacattattttttctacagtttcacagcaaaaaccggtgaagagaggtaattatatctcacatggaatacgatataattgtcatataaaccctctcaagtctcaatccaagaaaccaaggtgagctactagctttaaccgttagtaataacgatggactctcataatcgaaataatcttgtaaatttctatattatactcgtgagaaccacttggggcgtacacaaaatgttgattttcatttatagttagattcatactaagtatttggcgagtatgtttaacgaggagaagttgttaatacaaaaattagagaggaagcacacaaaatcattcttagacaaccatttcacatcaagcttggaattttgaaccattatttacaccttactacagacaacttcgaattttaagtccccaaacttaatatgagcactaacatacctgcccgaataaccaaaatccggttcacaccgaatatgaaattgaaaattttggaaaagccggttatttgggtcagttataaactagaccgaagtatgaacttgaacagactaccgactggaattagctcttgttaaccgtaaactaaattgacaaacctagttcggttaagagcggtcttcgatcagtgaaacaaatgcctcggaccatgtatgtttaaccaagctagagacattcgatccgcgtacattcgcagtgaacatgtttccgccggaaccggtaagaacccactttactttcttcggtgggtttgggtcaataacttcgctctgaaatctgataccattccggttcatcagaagctgccacagtcaaaccgttacaaccttgtatagaaatggttcatcttctttacctctaaatgatgtaaagcttaaaatcaaacttcatctatctttaagcttagaaaacttacaggaagccgctccgaatgcaccatagaaaccgagtcaagtgtaatgttcccgactgatatcaagtatctctcaacggctgccatggaacggaatttattccctgttcctggctcaatatatgactgcaaacaacagtactaacggtattgaacgtttggactatatgacacaaaccaaatataaccaaactacctaagtatcagatatgtaccctgtctatatgactggaacttcttcgcggtttctcctcaacgatccatccatcaggtaacctgaaatctttggaatggccacggcgattctgtaaaaccctaagctgctgctctatagagttccgggattctcttaagtatctctcaacggaaacaagagaacggaagcgctttcctgtttttcgctcaacataatactgcaaagaacaatactaacggtttagccagagattcaatcctaaaaccaccaattcaacgtatccttttcacattctgctcttctcacatcccacatttaaccgacctcagttgttagttatgtgactcagtaacttatgcatagggtctaaaatagctatagcaagtctctacattagtaccttatcaatataatgagagtttttcctcggaacctcctcaacggaccatcctctaggcaatcggaaacctttggaggcatattcaactccgcagtgatcctgcaaaagcataaacacactgattttaagtatttgatccaagaagaaccatatgcttctgtaatttcaaatcagaacaaaggacctgtttggttcttgatccttcataaacccttgtcttgtcctggaaaaaggatcctgctcgagtcaagcgtctgtcatttacttctccagccaagtgtctgtgaatagcttctagtgatgaaaactgtctaccagtccctggctcgataaagtactgcccacaaaacaaaacaaaaacaagtaaagatgagacttttcagaagagaaccacaagatctatcttcaactcaagcatatacccaaagaaacgactcatagacctctcaagcaacaatcaagagctctgtggcaacacaatcactaatctgatccaagcattacactttggtcatacatatccattgcacaaaagacataaattagctctaattgttcaaattctgagaaaaagctcaaattttgtttcacatttgcttgatgtagctcatatttaccgtatcaacaacaccgttgttgctagatcgcggccgattcacgacggtccaaccaggcataatcttgccgcaaaacgaggtgggatccgcgatctgcaactgggtttcgcggcggtggttagccgaaggagaggaagaggatctcgtctgcatcgcttcgttgccgggtctaacccaaaagcccgagacgagagtgtggtttttagtttggtcgtccaagccacacacacttcttatttctctgtcactgctttcacgtaacgacacgcaaaaagcaccatatgtccacttggcaaatttttaccttaatacaaattctgtaattagaagatgattaatgaaaaataaagttaataatcacatgcaaatcaaatatgctaatcacaaagataataaaaataatcaatgtttttggtttactagctatacattttattttaggtaatgaattatatgatgccgatagttatttgttaacatcaaaataaaattaaactgttttaagaaagaatgtgttttaattcaattttttttattttttttttgaacattaaaatattatccaaacatataaaatgattcatagaagaaaagtgagaacgatgaagtagaatgaagaatgaggctagcttgaaagttggacgacgatgggactcctaacgtaatgatgtgaatcagtccacgtcagctctccaaaaacgtagcctgaaggcgtcactggcaagggacgaagagtcatctgaaatatcttcacttcaccagttttgttgaacgtgagctgttttggctccacggagacgcgaactccaagtggctctcggaaacgagcgttgtaggtagcaggtggtccaacgtttttgagttttcgggtgacggtgatagagcccgtgaggtttgggacagtgattgaagggtagttgaagtcgagaagattggctccttggcgacacgtgtactgtgggtcctcggcaaagagttgaaccacggtgttgttgtagccaacggcgcagaggaagtccaagtagtctcctgtggtgagatcatagacaagaccaggatgggcggctttattgggttggacatggcctgaaccgtagctgaagggatttgctttcttgaaggattcatcaaccatgggcttacgtctgttgtttctggttcttgaagttgtcatgatggctgagcggatagctgcaggactccaatgagggtgaagtgttttcaaaagaccaacgacaccggagatgtgaggacaggacatggaagttcctgattcggtgttgaaaggagttcttcgattgtcagagtctaagtctgtagggcccgtggcttccgtgaaggcggctatgatgttgacaccgggtgcagtgatgtcgggcttgaggatccctggtgtgatggtgtttggtcctctggaagagaaagaggccatgaaaggagcaggctttgtgttcagcgtagcggtaggtgctttgatgtaacctttgggatcttttgtggaacttaggtaagaaaacaaagtttcaccatctttgtagtcaatttgtgaagcaggaagaacatgagcgtctgagatgatttcgtttccactcgccttgtcgttgcatagaaccattcccgcagctccagcagcagccgcttgcattcccttgtccacacgtgcgttgtctcctctcagacacaccaagatcttccctttcaccttcttcgggtctaggctacctttcttgcatagcaatctatgtaaccatcactagttaattagtacttacttaattatacacattccaaaaaatagatatcaagcgtttacttacgcatctgtcacatttccattggctacattagcatctgcagcactgatgaggctatacatcttttcttcaggcaaaggctttgagaggcttgttccctgcttttcaaaattaattacttgtagcacaagaaagaaaggaaccaaaagtgaaagaaaaaaaaaagaagacgaggtcaaagtatcaaaccttgaagctttggccgtttttgagctcaacaaaagcttgaaactcccgatccatggagctagcaccgactgtaataacccatggtgcaacgtttgagacagtgccagacttaggacctgaatttccagcagagcacacaaccgtcaccccgtttttgacggcgtggaaggatccaatggctataccatcgctcatgtaatctccagcatctcctcccactgaagccgagagaacatccacgccgtcttcgatggcagcctcaatcgctgccaaaatatcagcatcaaagcactccgcgccatccacagggggccagcacaccttgtaagccgcgactctagctttaggagaaccaccactggctgttccattcccgataccaaacacattggctccgggaacaaagttaccagccgcggtggaaagagtgtggctaccgtgaccatcgtggtcacgacaggtttcataggaggcgttagaaggaaggcctgtgtaagctaagtaacctttgttgaagtatctagcaccgatgagcttcctggttacatgtaacgaatcaataatcacattctctgtatatttctatatttgcagaaagaagtcaactaaattaagatgagaacctgttgcaaggaacatccttgtggcatctacctttccacctagctggaacagctccatacccttcatcgctgaagctttttgactcaggccacacaccttcatcaacatacatattttatatcattcataactatgaaagcaattatgatgaccaaagcatacccttgttttgagatttacctgtgtctaagttagcgatgattgtatcctctccgtatcctgctttattccaaagagaggacttgtgaacaacaccatttttcgcaaggagcatgaaattccatgaatgagtggtatgaagttttcttcctttgttggggaatacagagactacatcaggatgctctgcatacaattattttaaaaaatttgttaggttaaactaaaaggattgagaagcatcaaaagcagaatatgaggtttgatgatctcactggcgatttctgcagcttcattttcgtcaagaattgcggcgaagccattgatatgtctcttgtatgagtaaaagatggcttcttttgcattctcatggctgcaatagagaaggcagttagtttcttggtgtgtgtataagaaaactcggactaaaccggccggtcggactagtaaaccggcagtccaatagtaagtaaccggggcattgcactaaactcaatttgggtgaaactaataatactttttaaacctagattttagtccctcgcttaaacccgggaaaaaaacaatgtcccgcaaaatttccacgaacagcctcgtacgtaccaaatgaaatcctaatttttttgtttcggtttgaaattcaacattaaaaatgattattctaatttttctttttacttacctctaattgagtttggttcaagttgtgttttactaaacacagattacttttttgttcaaatacatttaacaaagattttcttacaaaaaacatcaatgtcatattagagatccagcgatttgaaatatttccgcaaaaaattcaatgttattaacctaatatgtcatattagatgatccagcaattcaaaatacttccgcaaaatattcaatgtcattaacctaatatgtcatattagatattgatccggtgattagaaatacttcccggtttgctatttgatcaaatctttaaaacattggtttggcataaataggagtaatggtaccttccaacgaaagaggcgagaaaagtgcgatgtgagtgagcaacaccatcgagatgggcagaagagatttgaggaagatgggcgtgagatcccaagtacactatgtaggactgtaacacagtaggaaacaaattaatgcatatcgatcttacgagcaatgtatatagaaagtgagttacataagaaaaaagagagagaggacctttttaagagcaaaagcaggagagaaaaagagagtgacgaggagaagaagagatgataaactttggaggctcattttgtttgagtattgagtactcgaatatcttctcgtcatactcatatacaaaatactagttctccataaatctccctctctcgctatatttgctaaatagatcgaatcacgctcagtctcagtctcaacttaattacttttaaagtttgttgagtgatttcagccagaactctatctcttccttcaactgttatctaattcgaaaaaaaaggtaagaggatcttcataatcttctttccatatttatctccctattatttggaattaaactaaaattttgactttgtgggtgatttgtttgactgcagctgtagaattttgtttatattaattggttgtagttgtaagtttttgaatatagatattttattctattaaatatggtttgtaaagttagtaactgacagattgtgccaaatgtaaactttcatgatcagatgtttattatctctttatgtggtattgcaaacttacacttatgttttattttaaaatgtttaaagcatgtaatcataagtgaaaactaaattttttattgaaaaatatcttataggatttaaattttcaattacttaattagaagttagtatattcttaactcacttaaaattagtttgcatgaagtaaactaatgtgtaatttatctacatttttaaccctacgaacggaggtgtgttgaaccttttaggctcgtaaagaatataatttgatgatttaatcttagtataaacaacataaaacgtaactaacttagctatctttctacattttaacccctatgaacaagaggtgggttgaacctattaggctattacatgtgacccgctaaatagccaaatgtgggtaaccacctcaaatcactacaaggctcatgtcaaactctcattaccattaatatccgggaatcaagtttatcagaaaatgagattgtcttgcattcaaactaagaaaagaaaaagaaaaaaaagcaagaagcaatggagatgagtaacgcaatgaatgagtaatagctcaatgtctacataattggactcgtacatatgaactcaataaaataaagcaaatggacccgatttgagaccagtaatggttttgaaatcatatatttccaagcgtaccaaaatacacttacgattaaaacttgaattttttttggcaacaaacgaattatatttttgttagtattaattattgtattcaacgaattacatttgattggccgtatactctggaagtgtgtaagtataatattttctttggcttacaaagcaaaacaaaaatttgatggagagagtcaaacaaaaaaacaaaagaagtaggtcatatgtttatccattcatacgttggttggtaatcctaaaaaccaacaaacaatcatatatgtatacttgtccaattatgtaaactactccattgataatataattgttaattattgactcgacttatctactgattatgaaactaccaacaaatgaagaaagtaaagggagtgtgaaaacaagaatcttaaggtataacgaagatttgttccgcgtggaaaaggcattaaaagtgccacgtcactctctctttttattttatgattttcgtatctcttcttctacttgcttcccacgtttccatcaagtttccgtacatatcttcttgttatctgatccacgcgatctttcaacgcgtacttttcacgtatttgtgttgtcatgcctttgctgggattgtgttagatgctcattgctgacggtagtttttagagaacattctagaaagaaactatttttctaacaaaaccacgaactttgttttctagttattccactttctagaatacacctgaccaaattagaattctagaaatgaattttaaataaaccaaaacacctaaacgaaaagcaaaccataggtttttggttttaacatatttcaaattcataaaagtgaaaccaacctacaccatattaaccaatatttattagagtttttatatgttttatgatattgttcaaaacttcaaaagagatttattcatataacatacctataccataccaatgaatattaaaattatgaattagtatccttatattatatgaagtcaatcaaaaaacttagaagcatttcaaacggaatcaaaccattcatatatgaagtattattattatatctagaaggtgttgattttaaactattccgtataatatatctagaagacggctccgcgcgtggggaatgcatcaaactcagagagtttaatagctttttttggttgacgtcaactactcaaaagagtttagtttttgatgtgtatatatccaaataaaatatctttaaaaagaaaataataataataaatggtttcgagaaaacacgaggaagattctcatccaaccgaaacgactctttcgtttttagtagtctcttaagctacgcggtgtcgcaaatcgtgaccacataacccgttttttccttcttttaccccttatctttccacgtatttacgttaatacctacactcttcgctgccacttccttacccaccaagtcacaagggtatattcgtcactttccacacgtctttggtccacacaaactcggtatctatatatagttcccaaacggacacgaacacatcatcacaactactatcacaccaaactcaaaaaacacaaaccacaagaggatcatttcattttttattgtttcgttttaatcatcatcatcagaagaaaaatggttgcgatatcggagatcaagtcgacggtggatgtcacggcggcgaattgtttgatgcttttatctagagttggacaagaaaacgttgacggtggcgatcaaaaacgcgttttcacatgtaaaacgtgtttgaagcagtttcattcgttccaagccttaggaggtcaccgtgcgagtcacaagaagcctaacaacgacgctttgtcgtctggattgatgaagaaggtgaaaacgtcgtcgcatccttgtcccatatgtggagtggagtttccgatgggacaagctttgggaggacacatgaggagacacaggaacgagagtggggctgctggtggcgcgttggttacacgcgctttgttgccggagcccacggtgactacgttgaagaaatctagcagtgggaagagagtggcttgtttggatctgagtctagggatggtggacaatttgaatctcaagttggagcttggaagaacagtttattgattttatttattttccttaaattttctgaatatatttgtttctctcattctttgaatttttcttaatattctagattatacatacatccgcagatttaggaaactttcatagagtgtaatcttttctttctgtaaaaatatattttacttgtagcattggagatttgttatgagattatcttacttagcatttagtgaataatctattagcctattttgccgacgtgaaaataccattttctatttaattttgattacttatcaactactattaagctgttattttcccccatcacgaataaaaacaacccaagaaatagatatttatttgaatttgaaacttacctataaatttagttgagctaatcaaaattaaattttaaagcatgatcagaagtggaattcttgagagtgttgtttgtgatctgtcaacatcttctgtccaaataaatggattcaaagaacatggttcaacaccatctcagtgtcacctttgcgcatggctcatgctgctcctaaggtaatatatgccaatcttcgagcagcgaagatgcagagctcattggttctcctgtaaggctgtgatcttggaaaaggtaccataatgcagtctttatctcttccctaaaccaatatgagcacatcaaaaacactctataccaaatcaaatgctgaaatgctcaaatatagaaaagatatgtccctataggcaaacaagatgtattgttaaggataatatgtatctccacacaagtagttggaatagcgcgccgagtgactgtgaggctagcttgaaaggattaataattccaatatctttactatccactcaattgttatttgttaacttagctcttcttcaatccaagtaaagcatagcccaccgtttcgttagttctaaatgcatcttttatagtcaacaattacctcaatattgtagaagcttcatttggattgttgattgcattagcttcaaaagcaggcagcctattcacaaggaatgaaatatcacatatcttcaaatctgtatcttttgtattcaattttttagccgacgtaaaatcttttacgccatcaatttcgttttatcccatttcattttagagctcattagacgaatacttttttactactttcatataattcgagtatcatattagcccgacattaaagatcataaaaaccttggggaagtttaggtactatttcacataataactaaactttaaattttagcatcatcaataatattgaagatatcatctctttaaaaatgttgtttttgtttcatggtgaaaatttgataaaatagtgaaaatttgataaaatgaaaagaagaagttggtgcccacaaactcttaggggagatgaacggtcacgattagacatcactcaacacagcgtaagataagcctcgtggaaaccgtaacatcagatcatgcgatttttgctttatgcttttttttttaaaaagagcctagctgaagcaaaattcgggtgcttctcgcgcaccgtatatcatcacatccttctccgttactttcttccccggagaaattaccctctcccttaccggcgatctagtttccggctatcaattcaggtaaccaatcttctgatttctccaattttcagccattccaacctcaaggagctttttatattcgttcgctttcagaattttaacactctttacttagcgattaggtttcaatttcaacaatctatttctgtgaaaaaacagttttttcagctaaaggtttgatttttcgaaattcgaatttctggggaaagtagaactcgcactcgcacttgctcctggacaacgtgagagatagaatcgaatcgaaaaggacgaaaaaatggtacaattctcaactttgccattagggtttatgtttccttgctaatgggttttagaattcacttctgattttgggtcgatattatttatattgtttgcagtcatatgaaagcaaaggtttttgggttatgaagaataatgagcatacaagtgaggaagattcagtgtatgatcattcaacaagagatgattcaaagcgtcctcatccttggtttgttgattcttctcgttcagagatgttcccaaacaagaaacaagctgtgcaagatcctgttgtaggattaggaaaatcaaatgttggtcttcctttgtgggaaagctcatcggtttttcagtctgtttctaaccagtttatggatcggcttctaggagctgaaatgcctccaagacctcttttgtttggtgatagagatagaacggaaggttgtagccaccaccaccagaataagagtatagctgagagttatatggaagatacatctgttgaattgtcgatatctaatggcgtggaggttgctgggggttgttttggtggtgatggaaatagaaaacttccggttagtcgggttaaggaaacgatgagtacacatgttgctttagaaggtcatagtcaaaggaaaatcgagtcgtcttcgatacaagcttgtagccgggaaaacgaaagtagctatataaattttgcactagcgggtcatccctatggcaatgaggactctcaggggatcacatttggtgaaataaacgatgaacatggtgttggctctacttccaatgtggttggaaactatcaatcatatgttcaagacccaattggaacattggatattgtttatgaccaagaaactgggagttcacaaaccagcagcggagttgtaagcgaacaacaagttgctaaaccgagtttaggatcacttccaaagaccaaagcagaggccaagtcatcaaagaaggaagcttccacaagctttccttcaaacgtcagaagcttaatatcaaccggtatgctcgatggtgttcctgtgaagtatgtttctgtctcacgtgaggtaaaaactaaatacctcagctcaactgttttgtttcagtacaccattttccttaagccttggaatttgttattgcattgaaacaacttaaaattaggagcttcgaggagtcatcaaaggatcgggttatctctgcggatgtcaaacttgcgatttcacaaaggtaagtcaacaaaaaagtttttgctttctttatctggttgcggaacactcactggttaatactttgctttgactcttaatcattcaaggtgcttaacgcgtatgcattcgagaggcacgctggatgtaaaacaaagcatccaaacaatcatatttactttgaaaacgggaagacgatttatcagatagttcaggaactgaggaacactccagagagcatactgtttgatgtgattcagactgtatttggttctcctatcaaccagaaagcatttcgcatatggaaaggtacaatctttttctttttcttcatcttcattgatttgcattttcttcagacttttctataatgttctgttttcggtttggttcagaatcattccaagcggcgactagagaacttcagcggatctatggcaaagaagagcgttccttctgaatgtataatattatgtggaaaatgtaagattattaacatttttgctggatcttaattttatcaacttttctttttgcataattttgtgttgtataaagggataagctttaagaattgatgttgtaacagagaatgcaaaagataagaagagacttgaagagttatgcgtaaaagattaacaattcagtcacagattcagcttctgtgacatcgaatctgtctgagaaggaaaaatttcttaaaagattctattaccctcatgaacaaactagaagaagtcaaataagaacaaataatcaaaagaaaaaaaaatacaaaagcaccccaagataaatctgtttttcacttcacttcaactttggagccttttgggactgattaacttccacagcatgcagacttctgtgtggcctgtccggctccagcagcctggtctgtttggctgatcttgatcgttgcaggctgagatgaacgattaaattgttacaaaaaagtttcttttaagttctttggacaaagaaatgttaaatgaaagaagagctttaggaaaatgtaacaagtaactaataacctctgctctagagtcagtatcagcgagtctctgctttatgtcctttgctatggagaagaaaacttcttccacattcagattagttttggcactctgagatgtgaagtgacttattagctatgtaagcaaaatgaatacgaccaatgtggtttgagttgttcgcataagattcaagatttgagacaatgattcacttactgtttcaaagaacttgattccatattcgtcagcaagtgcttgaccctttgattttggcacagcctgaaaaatgtgtcaagaaccaaaaccgctattagtttgattagttatgacttatgaatcaggaggtagggtaatgtctgtgaatgaaccatctcgtagtgtaattaccctcttgctctcgtccatatcagctttgtttcctaccaagattttgttgacattatctgaagcgtgctgttcaatattacgaatccagtttctaatgtctgcaataaggtcaagagaaaagatccagaacaaagcagaaatgtaagactaaagatgttatgtatagagagacagaagaaaatttactgttgaaggatgactcgtctgtgacatcatacaccagtaaaatccccattgccccgcggtaataagctgcaataatgccaaaggaaaagagtaactgaatgttgactcttcaatctaatgttgcaataaaagaagcttatcaatttaaaaaactatatatccccaagcacatcaactgtacaaaagcatcagccacaaaagataagagcatcaaattgtgactcttaatcctctgtgagacaatgtatgttaagtacactgtgagagcaagcagctcatatgaaaagaagatcttcactcaccagtggtgatggttcgaaaacgttcttgaccagcagtgtcccaaatctgaagcttgatacgtttgccatcaagctcaatagttcttatcttaaaatcaatactgcatcaaaagccaaaagagaacagaacaaactcagagacagagaaacatacatcacagtctctaatctcttaaaatggttataaaatacaaacccaatggtagtgatgaagctagtggtgaaagagccatcagagaaccttagaagcaaacaacttttaccaacacctgcaacaagtaattgtgaaaacacattgctaaacatctcagaacagagatcgagagcatgtaatcaaatttgccagacgaatacacacacaacgatctttagcaatgaccagattgatttcgacagagtaattgaaaatgaatagattcagttaattcaaaattttatcgattgtatcgcttgggatccgtaagagagaagacgaaccgctatcaccgatgagaagaagcttaatgagataatcataatcggctctagctctagcaggtggagcagccatcgaatctaaatgaggaaaacaaacaaacaaaaactcagagatcaaaaaccaaattgctttgtgtcatctgaagacaacagagatcgaaaattgaagaacctaaaggaatcagcgaagaatgcgtaccggatcaaaatgatgcagagaggagaagagaagagaagagaccttgttggttatagtaaatgagcagagaagaaacgagagagagcgatggaaatggcggacggctaaaatacgccagtcctgatttaacttctcttctggcctcttcttcgcgtgcacgatattacctccagcgtaagttagcaagatcatagtccgatggcccagaaagaatgaagccttttattggcctttcttctttaatgagtccttgtgggccttttctgatacgctcgtaaatataaatcaatcttatggactaaccagaaatagacacgtggtatggatagttatagttccgcaaaatgaaagtcaaaaactcaaatgtcacacaaagcatatatggaaaataaatggcaacttggctgaagtatatacatgcttataagctactctttgccaacaaattcgcaacaatgatttctagaactataatcagttgatgggggaagaaaatgttgaaagttgtacaatgaatcaagttaaagttaaaatacttttttcccgattctctgcaggttacatatatgtgtatatacacagtatgtgaatgatcaaaaagaagatttaatatatctaagcatgcagacaaaaacctattgctaaaaagatttctaagaaccggagaccgtttaccaaacaaaatatgaagttgaattcatcccatttgtcactcgattagacaagattcgtcgaacgaagatatctattaacgatctactaactttagttaaatcgtgacaaaacacacatcattcatatttgatagtgaataagtcggtggtccatcgttttaactttgattgatatccttaaaattgatgcatagctttaaacaaccaatactttcttatggattgtttttcttccaacttctctaagggttttattttagaaaattgattataagtattaaatgaaatctaagagaaaaaaaaaaaaaaaaagaggagaaagatgtagaagttcccatgcctttagattcggattacgtgtgtcactctttttatagctttaacgcgatggtcgctcaacgtgaacgacattgtcccactaagaaaaataatgatcatttcatgtgtattttttctttatcaaatttttaaattatatatacatatctaactttgataacaacaacaagaatctgtaatacaattatacaacggcacgcaaacagcagaattagtagatattctttaaagcaaatttaccatatttgtaacatttctattagtatgatatgatacaaaagtttggaacatgatttgatagaagctaacgtcaattccatttctttaataaatggtaaaaggtatataaacagagtattagtcctcaaaaacattgtaaacatattgttttaaaacaatttaccagtatatattgacaatagtttaactgaattgacgtgcaagtcaatattattaccttattagggggcgttattggttcttaatttacaaggaatttagatgatttcaatcacattctataaagtattttaaagtattgttagagagttttttataatcttgttgattagtttttcataattttgtaaagtttttcaaacaatctctctattttaataatacttttcatgactttccatgactttattttgtgaagaaaaatgtaaaaagtcatgaaccaataacataataattgaaatcattaacaatgagaaatttttttgttttaattgaataacacaaaacttttaatgacttgagtatgaatccaataacccaaaatttatgcagattttagaatacttcttataaatcttaaatgaataacacaaaactttaacatacttttaacaaatcttgattgaataacaacagattctacatgacattttaaatcactaaaactcttttgaaatcataaaccaataacaaccccttagttttttactatttgaattctgacgtacttttttattagttgaatttctataaatgagaaaacattaattatttcttaatctttgaacttaagccccacaaaaatcttataaattgggacagatggactagataacaagcgtttcacctactccaaaatttccctataagtaactctttttgtaacctccttttcttcccaaaccatcactccttttgcattgtgtgaaaccttcgagttttctcttcatcttctcaaagtaacaaactttctccaaacagattattattaaaacaatctcatcaagaactacgatgaaattcccggctgtaaaagttcttattatctctcttctcatcacatcttctttgttcatactctcaaccgcggattcgtgtaagtatacacaatgcattttcttattttagatacttttctcattagaaatttagctttcttaataaaattgtattgtgatgatggattaattagcaccatgcggaggaaaatgcaacgtgagatgttcaaaggcaggaagacaagataggtgtctcaagtattgtaatatatgttgcgagaagtgtaactattgtgttccttcaggcacttatggaaacaaagatgaatgcccttgttaccgcgatatgaagaactccaaaggcacgtccaaatgtccttgatcatgttcttaagattatccttatagacacaatatcttgaaatgttaagattgtgcttgatgcctaaaataatgagcttgagatacttctatgaatgaatatgtgaaagattttgacaataaaatgatttgatgtattaaaatattcttagtgaagttatatatgtataaatgaagtatgaaatatacattgtatgttgctttacatgagaaagataaatctacaacaatccaatgtatgaaaattttactaagttaactgatcagaaacgttaattatggtttagaatcttgtggagagatgattacttttgtaagagaaattgattgtttgttgtcaatgaggataaagtaagaagccatttctcaacacatggacttgatagcaaactaaacaaggctcaagcattgaaattgaaacgtctcgatagataagattggctcaagaaaagcaagtgttttttgttgtagaaaacagaaattgaaattactgtctactttgcaagtctttaacaacttttgcgcaaaaaccaaaacgaacaaaatggcatatcatctaaagataacaaacagaagaagacatcaaaaactctactacccttaaacatttagctcaatcggaatcctcttctcaccaaaaggagaagcaaagtatcaccaaccataatgattctcttcttcaagacttgattcagtaaaagaagccaagaaccttgccaccaacattctttctcctggcttcttcgtggtccataataccagccgaggtcgtaagaacaatgtacccaaactgcacaatttaagaactcaatgtaagatcactgaatataagattgctctttaaaaaaccagaaccaaaatatgaacaagacttaaaagacagacctgtctggaaggaagaagacgagcggtccagccttcaatctccttaactccaacatcgaaacgaggactgatgactccacatttgttaagtcttccattaagctcgaccacgatctttccagacctgtggtcatcaacgtactcaaactcaccaatgtaacctgcagtttcatcaaaaatgttaaaacagttgatcaaacacagaatcaaggttattacaaaatgtgaaaatgagctaaacaatgcaggatcaacataccgtgtttctgcatgacgataagaaacttgatgatcactttagaggaaggcctgatcatgacttgcctcttccctctcttctcagcattgtacatactcttaagagcatcgttaagcacactgattctcaccatttttcaaagctcaaaacctgataccaaattaacaacaaatctgagccgataccaaacgtactaatgctaacaccaataaacattgactaatcaaatttagtctcttttgtgttaaaaagaggattcatgcttcaaatgcacaactatagtggcagctaaatcgacaatcaacgaacttgattctaatattgaaatgaatacaacaataaccaaatggcaatcaacgaaacatagaactataagcaaactttcgatagatctaattgtattctggtccaagaaactaatgttaatcgatagcatcgagctcaaactatgaaactacgagaattttcagagaattttaaaagcagatttcacgtcatgattgagcagaaatgaaagcagatcctagaaaggaaacaggaataaagctcgtagctgtggagatctctctaacctttggaaatcgaaaatggcagccgcacaaaaactctggagcaaaagacgaagaggcaaagtttaacaagagaactaaatacaagatgcgaattagggtttttgctttttattggggcgccttatgaaactttactagactggttaatggatcattataatgggctttattttgggcctttcttaatatctcgttaacattatcacagcctagatcgtctatatccaagcgccgtcgtttaattggaggtaagactctcacttgtgtttcaaattcaggtttctttctttcgtcagcagtatgctacaactttgcacatctccagtttttctgcttttctcagtttttgaatttttattctcaaactgttctcttgcaggactctctgcttacaccacagatcaatcactgaggcaactgtttgcgccttttggtcagattacagaatcgaatgttttacggctatgattatgtgtctgaactaattgtgtcgtttgtatgctactgtcttatagctcgtcttattaaggaccagcaaacgcagagacctaaaggtttcggattcataacttttgagtctgaggatgatgcacaaaaggctttgaaagctttgaatgggaaggtgaagatccatttcttcaatcttcactcactcttgaaatgtagtatgtatctttggctttgatatgaaacaaaatgaatcttaaatcagaaaatcgcttgtttggcataatcgtaatcgattcacggaaaaagtaaggaaaatattcagcattggtgtgtaattaattgagctcttttggaaattatactgagctttgcatttggttgtttgttttcagattgttaatggcagactaatatttgtggaaactgcaaaggaagtagaagcaccaacaacaagtctgaaaagtaacaaggattgaagagggcacacacactgtccttacacaacaactaaagactcttcaccaaatcattctagagttctacactgtcacaactctaaaaagtaaatgcatttcctgagagatctgaagtaccaattaccttgagaattcgagaatcagaagaatcatttcggattctggtataaacttcttttaggttgagcatattcgactctgatgtttcttccttctaataactgaacaaaagacagcaagattattgtatgaacatgtcttttttttcgataaaatgtatttttttggattggttttgtgtacaaacctgattgtccatggaagctaaggcacttgcagcagcttcttctgaatcaaataacacaaaaccataaccttttgatttcccactcttgtgatcgcatattactttcactgaactttcacatccaacaaatacaaatcaggaagtgcattggttttaagcatggaggaatttcgtagaagactaataactttcttggcgaatcctaccttctataatctcaccatacttttcaaactcattcttcaaaacaggttcattagtgtcataagatagccctgcaatggtgttatcacattcagtgttctccttcacgcatttaatcaaacacttagagtgcaatttcgcatcacggaaagaaacataatagaccctttgtgttctacggtagacagattgtctaaaacaattctaatgacattcgacacaaaagtcaagttaaacaaccgaattgaagagagacaacaatacctccgacgaataatttagaacaagatcctcgaatcgcaaaacatcgtaatggagatgttatggaattacaacgaacaaagagagaagagaacatgttagatttggcttcacctaaaagaaaaatttagcacagcgaataaaagggttcgttaatgtcgatgacaaagttgtttattaaatattcactaatgacattacgacgagtggaccaaaagattagacgaagcgtataatagatagatcataaattcttatgattaggaaaaggattttgaacaacattctaaatcaccaaatacatagaaactaagatccaaaagcttcaaatttctacattcaccagagctcaaacacaaactagcaacgaaaactctagcagattaagctttctttggagacttgactggtgatttggtagccttttcttcagctggtttagtggcagacttcttaggcaatagaacagagttgatgttaggcaaaacaccaccgtgagcgattgtgacaccactcagaagtttccccaattcttcatcgttccttatcgcgagaagaagatgcctcggaattatccttgatttcttgttatctctcgcagcgttaccagcaagctccagaacctgagatcaataaattcgaatcagaaaattgattttgaaatgtaaaaaaaaaatcttactagaaaatccagatcgggaaacacttacttctgcggcgaggtattcaagaacggcggccatgtaaaccggagcaccaccaccaagtctctgagcgtatcgtcctttcttcaggaaacgagtgattcttcccactgggaattgaagaccggctttcatcgatttcgaaaccgatttggtttttggggcaccaggtggttttcttcctccgaaagctttcttcacttttccggtggattccattgctacggttatcgattactgaaattgagagtttagagagattgaaagtatcggaagttgaagatttgtgatttaaagttgaagggtactctgtgatatttataggtaaatgaaaaaaaaagaagggagaggattattatccgttggatttagtctatcgacggtggatgttcaaataaagcacgatccgcgtgactatgtattaaccaatcaaaaagaggtatgctttttgaaacggcgccagtttttttgtagcattttaaaagtttagcgcttgctttattttgggtttttggataatttcttgcaacttacactaattttcggtagattaattatatgttaaatgtaaagttagtcattgacatttaaatgtttaatgatgcttctcaagagtctttgaagccctaattggaaaacaatgaacaatattttagaatcaaaagattaacaattatacttataaagatattttggggtcgcattatgttttgacattcacaagggagtcctaatcaaaagtagcctaagagaatttgtacatattaaaccctagagtttaatagtttatagacttgactcaatcattacattaaacaacaatgtcaacaaaacttatgcaaacccaattaattcgaacttttattttttctgaaagaattatatggaaaaatataagagtatatggagtgggttttttctcgaaacggcgccattttgcgctttttggtatgatctaattaattactttggtttggtcttgaaaaataaaaaatttgaaaaaaaaatgagattaaactttgcaatttacacttaataaatcaatcagattgataagtgaaaagtggaatcaatatatacattttcttaaattttggttggttagttttacatgctcgttacgttattgaagttttaagttgttaacattggtaaatggtaatcaaccatccaatttaaactaagtttgttttactttggatatgaactaacaaaagtttctacataatagtcagaataagatgacataattcttgtagacagtgaagaactttacatagagcttatcatttatctcttatgatgacttagtttggttttatagaacaaaaataacaaaattaagtattaaatcaaattattcggtttaattatatagtcaaagtttgaaaaaatcataataatttaagagtttaagtatatatcaaccctaatttagttgaaattttttcaaactaatggtggttgtgttgaactggattggttatgttgccgaatataaagtgagatttgatttaaaatggattagaagagttatcatcttaaaaactaagacgaagttaattttgagacgaagttcatgaacattataactaaccttaatctgtttctgtttctgtttctgaagatgattacctaaaatcctaagtctcatacttgatacttatctaaagtatactactagaaaacaaaagtttaccctttcaatgaagatagagttataaaaacgttttcacgagatatcgctttgatgtgagatagcaaagagtcttaagacagtaactcttttgagaaattcctaaatgcctttcgagataatgatttttttggttcatttatcttagagattgaaaacaaattttactttcttgtttgatcaattatatatgtttggtttttgtgagatttgatatcaatgtcatgtagagaatcacgcattccaagttttcaactaagaaaaatacagatgggcttgtgtccataatattctttggacttggaattcttgacactatatctatgtttgtttttaatatctatatatacatttttgcagccattttatgaaataaatcttgtagttgggacttatttacaatggttgccattggattttaatatttgtttttgataattagaagaaaattcttcgaattaaatatttgacatttaacaattttcctaaaatctctctacattaactacacgattggttaataaaataaaactttcaaaatatttaatatcatttaattactacaaaattatcattattgatattgtttttctgcatgactattacaattcaattataatcatcaaaccgcagagatatttgatagcatttaattactacaaaattacaaaatatttagacaatgattcataaacatatgataaataagatcaacattaataaaataaatgaattttttttacgggacgggttagcgggacgggttagcgggacgggtttggcaggttgttacttaataacaattctaaactataaaataaaaatattttataaatagttacatagatagttacaaattgtaaacttttatatatactacctttaaaatataaattgtctccgcggtataccgcgggtaaaaatctagtaacgcctattatggtttgaaatatgattcatcacatattatatatatttttatttgtttgtagttttgtatgttttggggttttggctatgtttttctataaaaatcaacacaatactaagttgagtaaaataaattattgaaccagtcagcgatacaaaaatatctaataaggaagaccaaataatcagcatgaaaggtcgacaattaatgaagaaagtcattttgtagaaatgcaagccttttgataccagcatagcatacgggcttctaaattctaatgctcacataatgtcatttattgtttaagaaatatctaatatcgctcgaaatatgagatttgttgttgtcgaaaaaacataatccaaagagttatcaagaatctaaaatcttgtgttatcaataatctataatctcgaaggaagtatgctttggttcaatcaagtaacacacgtcaatcttaatcctattgaaacaatggtatagaaatatgcaaatacgatcatatcaactaagatataccgaaaccaaatatattgggatctttcaaaaggacacgatcgggaactctaactactgtttgagactttcctaaagttatatcgataactaacggtcaaatacctgcaaattttggatatatataaagatatataccgagtttgtgtataaacatgttgtttctcctaatcatacgttattggaaacattaacgcggtttgctttatgcaactttgaaacatttgctaatttgttgatataaaatttggctatttatactgtttagtttagtaaggaattaacacaaatgttttagcgcattattgcacatttgtgtgaaataatatactattttcgggaaaatcataatcgaaatagaattccaaaatttccacgtggcatattatgaaaggaatattccagctcgggtaagctggcctccatcaccggttatgatgaaaggtgagccgaaagtggagccaacctgagatgccccgcatgagagccatatgcttcttcgacctttcattctatattctttccttttaaagatagcaactattgatcaaaaaaaagaagaaaaaagataggaactatagaactatagtctttttttttcaacgaagaacaaatatatggttatgaactattcttaatggatggtcaaacagattttttgatttttttctaagaaattttgcatgtgaatacataactacagttaattccattcaactgttacttttctttgggtgaaacaataggttggcaacttggcatagatatcaacatcagagttttgaacaaatctatcatcatttaagaaatgatagaaaatcaagtattgtttttcaaatcaagaaatatcaaagaagaattctgtattaagtttagttctcatggaagccatagaatatatcagaagtttgaaacaaacagcaaatatatggaataaaaaacatagttattggaataaatagaatagttatttttttttgtttggcataaaataaagaaaattatttgttcaacaaattgttacagatttcacttatgtatattttgaactaattcttatttttatattaattaaatcaagattttacttttgaaaaataattaatgaatttatgaaacaatctctatgtaaataaaataaagcaaattaaaacgctcacacatgtttacttattcggactagagagcttccgcataaagctgaggaaaaaaaagagagaagacgcacaccgaagaaaacacacaagactccattattctcctgcttcttcgtctcttcaattattttctctgagactagctttgattcaaccatggtgagctcaagtctaatttttctctcttatatagttctctttctttgttctctatggcttgatttgaactttgcttctcgattcgagttccatttcatcttggattttcaattcttccgatttaagttctcgcccagagttagatatgattagatctgtagatggactcgtttctttgtttagatctctgagattttggatttgtatggttagatggactgatctaggatatgaatcggccgatagtaaagtcttcaatttcagtgtgcttgtgttggttttagccaattgattttgaaaccaggaagaataatagtgttccatgtggttttcctttgattttagggttacgtctatcgtttgtttagccttttccttttataagatattgttttctcgcttctttgagttattatttgctgctgttgaagttttcagatgtgtgtttgattctgttgatggtagagtatcatccgattaatatgattcagaactgtaaaatctgtcaaattgatattatgatagctcaacatcatcgttcatatacgttgtgggagtcatccacgtcttccctttgatatacacactaccaagatctgttcatgattcattatgtttgatctctgaactaatgtataacccgaacgccgttttaaaagatgggtatagtgtctactaatatgtgtattctgaagagagttgcatcttaatgttctatgttttgttggtaacaggctaatgcagcatcaggaatggcagtccatgatgactgcaagctgaaatttatggaattgaagacgaaaaggacacaccgtttcatcatttacaagattgaggagctgcagaaacaagtgattgttgagaaaatcggtgaaccgggtcaaacccatgaggaccttgctgcaagtcttccagctgatgaatgccgctatgccattttcgattttgattttgtcagttctgagggtgtcccaaggagcaggatttttttcgtggcatggtaactaactaactatactatctctgctaaaacctgtctatcttggtttcacattcttttcattaacatttcttcttgttttttttttgccaggtctccggacacagcaagagtgagaagcaagatgatctatgcgagctccaaggacaggttcaagagagaactagacggaattcaggtcgagcttcaggcaaccgatccaaccgagatggatcttgatgttttcaaaagccgagccaattgatgaaagaaatcccctgaaaatttcggttgaatcaaactttttcgtactattactcagtgatgctttttcctaaagtttgctgtgacggtaccaacctgaacagcttcattttatcagtttggtctttgtctttgtctttggtctcctttttgggtccttatagtgttgtcttaaaacttaaggaatctggcttgtgctctttaccattgtggaagaaatcgaaccctttattaaacaagaatcctattggcacatcttgtcttcacataatgaaaactaatgatccagggattaaaaagttgtgaaagttttataggcaagttgatactgtgcaaaggtaatatacattttcaaacataaggatctctggattgatagaatttcatttcgtacacgactattcacatattcgtcaatgcgactatttcaggttcaaagtattaggaatttaggatagttccaataacgagaagagttgctcaatcgagtttggtccaataagataaactgaccatcaaacataaaatcctaatcgatacttttgattatttggaaacagatccaaccattggcagttgtccattgctcattctacgcaatctttcaactgtcaaatcttagcccaacaaaaatacttagatgattattatatgttgaccaaaacaataataatatgcttaccatatagtttattaattcataaataaattgaagaatacgaaattacgaagaaaataaataaaaatacaaaaagcaggttcttctctatatattcggaatttagcttccaaataacgcagaagaaagtaaagagagaagaagcaaaaagagtcatattcgttgaaaacatcattcactcttctctgcgtctccttctttcacccgaaattgtctctgacaccgttttgattcagccatggtgatactacattttcacttcttcttgttctctttttgtttatttcagttcttcaatttttaggctcgattctcgatttttgctttcgtctcggattttgaataacgattttggctcactagatctggtatatggatttgttttctccgatttagatctttgagattttgtgttgatgtgatcagagttagtgatccacttgtgcttcgtaagttagaatcgaaatcatgaaggaatctgctaattttgtgtgtgtgctttcgaagtttcattaactattgaacgtttctacgaccttattcgattgtttgatccatcaggcttgttgtgtgttgaagttgcaattgaagtctaaatcgttgctagagatgtattaacgagtttatgtgtgagctattctagttttagaggtttcaggaaatttctaagattcctaaataagagattcttggcttttagtattgtgtggattcaattataggctagctttgtgggatctgggatgtgaatcttagtgcttctgttgttttattgaaatcaggctaatgctgcgtcaggaatggcagtccatgatgactgcaagctaagatttctggaactgaaggcgaaaaggacacaccgtttcattgtctacaagattgaggagaagcagaagcaagtgattgttgagaaagttggtgaacctattctaacttacgaggactttgcagcaagtcttccagctgacgaatgccgatacgccatttatgatttcgactttgtcactgcagagaattgccagaagagcaagattttcttcattgcatggtaacataatttcttgttatctgctaaaaccatgtaacctcatttctctattcttaccttgttgttgttgttgttgctgctgctgccaaaggtgtcccgacgtagcaaaggtgagaagcaagatgatctatgcgagctctaaggacaggttcaagcgtgaacttgatggaattcaagtggagcttcaagcaactgatccaactgagatggatcttgatgttttgaaaagccgcgtcaactaaaagaaactctctttgaataagcttccgattatattcgactattatgaaatggtgttttctattctcttacagtctcttgtgactgttagatacacttgacacccttcattctatctgtctggtctgttctctgtgtctatgttaccttacagtgtctcatctatattcaaaattatcacaaggtttgtgctgtgtttgcttcctttgtttcaactctaccaaagcttaagattaagatttgggtaagatgattcttttaagcttccctttgttctctttgttacagagggtataaaaaatgcaaaaactattcaccaaaattatttcttatctataaatggttgagatgtcaaagaatgtttcaacttatacaattaccaaaggggttaggatttagaactagtgtcattcgaagtagttgttctactggttttgttgttaggtatcaagccttgtctcaacatctcattcctcaactcggtcgccttccccatttctcccgccacacaacaaccgtgtattagggtgttatacgctactctatctggccttatacccttttccgtcatcgagttccataactcaatcgctttcttcacatcgtttctcctacaaagctcattgatcattgttgtgtaggttatacaatcaggggaaactccatcgcctatcatccttgtgatgagctcagaagcttcttctattctcccttgtctacaaaaaccgcggatcaacatattatatgtagcggtgtttgctaaaagccctttcaagattgcattatggagctccacagctttctgcatgtctacttctcctttggtgagaatgtcgagaaaacaaccatacgttacttggttaggaaccgaactgacaggctgcatttttgaacaaagaacctcggcttcattaacaaacccggctttgcataatccgttgataacagcagtgtacgtgacttcattaggtacacacccttcgtttatcatcaaatcccatattccaaatgcttccttgaaatctccggttttgctctttgcatcaatcatacttgtataaatcacatcatcaggctttagtcctctatcatgcatctcctttaaaagtccaaaaaacaactttcgatctttgtgctttaaacttccatctataagaacaccatagcacacaaggtccaaatccacccctctttgtaccatctcctgacaaacgcttaacgcctcttctaattttccttctctgcaaaatccgtgtaagagtccggtataacatatctcattcagctcacaatttcccttgtgaaggccatccacgaacactttggcttccgaagcttgacctgtgagacatagcccgtgtatcaacggtctataactgtatgtatcaggcacaatacctttctcggtcatttctttcaggaactcaaaggctttagacatgtctccttcctcgcaataaccttcaatcatgacattataagtcactctgtttggcttaacattccattctgccatctcgttaaacagctttactgcatcacgaatcaacccagcacggaatagacccgataaaagcgtggtgaatgtatagatactcggcgcaatacccttccctgtcatctcatgatagagcctaagggccttgtttattttccctttgctgcaatatccacccattaatgatgtgtatgttaccactgttggctccaactttttattaatcatctctgccatgaaaccctctgctgcactaatgtcaccgaacttgcagtgcccgttaatcaaagaattgtatggatacacacttagtttcaaacccgtatcaaccatttcccccaggaaactaagtgccgtatccagtttccctcttctgcaaaacatatcaatcaaaattgaataggtcacatcattaggacgcaacccaattttccccatcctatcaaaaagcaactcagcttcgtggaactttctacctttgcacaatgagtcaatcaatgcgttatacacaaataaattaggtgagacaccaaaatctactactcttttaaccaagttaagcgcctcttcaatctttcccctcttccttaacccctctaccaaacttgaaaccgcagcttcactaggactgaacctcaaacataacatctcatccatcatctccaatccgatctcaaattcttgcactttacataacccgtagactaatgtacaatatgtcacaacatctggtttcagatcttttccagctaaatccttctttatcccaacagcctcccaaaccttctgcttcttacaaagcccatctatcaacacattatatggaactatattcacatcacatcctgttgcctccatatgagcaatcatttctttagctcgagagagatctttcaactcacacaagctacgtataactcctgtgtaaatgtaaacatcaggacgaatccccacgctgaccatatcgttgaacaactccattgccaaaccaaaatgcctaaacttaaccaacccatgtaaaagagcactcaaagttctcacttcaggcagtaaactaactttcgttatcatcatcttaaacaccaaaactccatctagaactctcctacttcgtacataatgctgaatcaacaaatcaaaactcgagcttgaactaagcttacatttttcataacaactaaaaagcacattaaaaacgtcacttggcttcagcgcacgaagcagaagcgtctgcaacagtgatgaagcaggccagaagagattagctttgaccagagcatggatcaaaatacaaaacgacgccgtggaatggtcgaatcctcgatgcaaaccgaggaaattgaaaaacctcaaacccaatttgggatcatcaatggttccaatcagaatctcttcaacatgaacagtcttcaatcttctcgagactagctcactgctcaatgcgatctcccagctccgtttccctcgcacgattcttttgacagcatcgacgaattgcttatcttcagcgattctacattcttcttgtgcagaatcgatcacagagctcacatttctaaagctattgcgaaaatgagagcttgttattgatcgaatcgtgcaagggagcttcatcaaagaggtccaccgtgaaaatcagaaccagcattggtctgtgttagtgtcgcaacaacgaaccgatatctggggacccggacgggtcgggtcgatctcactggttataattgggcctacaactgggctcattacaatacatgggccgatgcagaatttttcgaggatggcgggaatggaaaatttcactagatagcgccaatctgggacacgtcaatagtcctggccaccaaatgtatccaataagaaccgtcacgtgtgagagctttcctccttttcaagattccttttcaaccgtcgatatcattctattaaaaagcagatcaaacggtacagatatcgatccgcgtcaacttaatgtatccaatcatatcactccataggatctatataaaagcaatatctcaattttttctaggtcatcaagcaatccaaagcgattaaacctactcaatctcagatctcgttaaacctagaaacctcgagaaaaaccgtatcaatggcgccgaaagcagagaagaagcccgctgagaagaaaccagcttccgagaagccggtggaggagaaatcaaaagccgagaaagctccggcggagaagaaaccaaaggccggaaagaagctcccgaaggaagctggtgccggaggcgacaagaagaaaaagatgaagaagaagagtgtcgagacttacaagatctacatcttcaaggtgcttaagcaagttcatcccgatatcggaatctccagcaaagcgatggggatcatgaacagtttcattaacgatatcttcgagaagcttgctcaagaggcgtcgaagcttgcgaggtacaataagaaacctacgatcacttctcgggagattcagactgctgtgagattggtgcttcctggagagttggcgaagcatgccgtttctgaggggactaaagccgtcacgaaattcaccagctcttgaataattgagttagggttcttatcatatggatgttgctctgctttagggttaatggaatttggaagatctgagttagggttttagaatgtcctttaagtatctctgtttcgtttggaatttctacgttttgtaagtactgctgctattgataatgtttggagtctatatttgctctttgtgtcccaatcctgtcgtattgagagttgctcgttgttttactcgtattcaatctttgccttgcagaaattacactgtgatctagtaaccacatttcagtaagtgccccatgaattgggttcgtaatatgaattgtaagtggcattctgatcgttgtggattatggattccaacttttgcttcgaatttgatttttagctgagagttggtcttagacttgctagattattctaaagcattaatactcgtttagtttcatgttgcgaactatgattacattgctagtctcatgcttgatttgttcttagttttggtttagtttttgtaattagttttgtgatgtgaaatggagtaaatctgacaatgcaagaaagagaaccaaaacatttaagtttgtatcgtttcatgtttcaatatctattgattgtcaactctctcatgacacaaaagaagaggaaacttctgtttgactcttcctttcctacgacgtcttcatctcttttgatcgtgttctcttctcaagctgagttccattttaccaatttgaggattgaacaatgactagattccaacatccggatcccttaacattaaaggcatgactctgaatctcttgatgcgttaggttatttggttagtttgaagttggagaagaaaaaaacgtttaaaagcatgagaattgtattacagggcccaatcgaactagcaccacaggaaaatagttttttttttgtttttatggtatgaaccaaacgagaacagttgtacaccaacttgatgacgattattgatgggatacaccaaccacccaatttatgtagatcataaatataaaataaagtcttccgtcttcacttggagatctcatcaaactaattaacaaacccctttgattcattcatttgtacccgatcaaaagaatggctacagaagcagtagacctaccaattcatgagcaccctctttttccttcggctcgatgtattgatgatgaatgtgatggctgccatgtaaatggtttcatgtacgccggctacttttgcaatgaaccttactgttatgtttggttccataaggactgtgctgaggccccaggggagatcagccatagttcccaccctgaacatcctctcctgctcaccaatgactcgaaagatggtccatgtgatttgtgtggacaaaagctattgactccctgttatagttgtcccacatgtgagttcaaggtggatttgacttgtggtatgaaaccgtcaccgcctgctatcgaacatccgctgtgtcatgatcatgctgtcgtcttcttgaagatacgagaggagaaggttccttgtgaattatgcaaggagtctattgaaggtccatcctattcatgtcttgaatgcgatatgtatttccacgtgaactgcgtccatctctcggaagaggtaaatcatccttgtcattctattcatcctctcaagttaatcacatctgagtcacttacggatgatgccgagaaaagttgtcttttatgtggaaatataccagctgaaaatatgctttatcattgttccgtttgcaatttcacatcgtgccttggttgtaccaaaaacccaccactccttgttattgagcatatgaagacccacaaacacccacttactctcttacctagaagaatctcatgtatctgtgacgtttgtgggaagaaatgccagtttacggcgtatgtatgtcttcagtgtgattttgttaccgcaagaaagtgtatcgacaggccccgtgtcatcaatatcaatcgtcatgatcatcgcatatatttaactcatcatctcggcactgggtattcggaatgcggagtttgtcacaaaaatgtaagtcagtacaagggggcttactcttgctctgtttgccctaactatgctgttcattctacatgtgccgtgagaactgacgtatgggatggcgtagaattggaagggaccactgagatcacagaagacatttcaccattcaaggtggtgggtgataacttgatatgccattttagtcatgaagagcatcaattaaagcttcacaaagaagacgtcattcatgatgagcgcagacgctgtgaagcatgtatccatccagttcaatttggctccatctatgtttgtgaagaagaggaatgttgctttgttctccatgaaaagtgtgctaatcttcctatgaagaaaagacttgtctttggcaccagaccgtacacattaatgaaagaaactaccgaaattacacactgcgagttgtgtggaatattatctgatggtttcgcgtacagctcccatgagtggtcggatgtagatgtgcattgtggttcccttaatgagccgctcgtccatgatggccatatacatcccttatattttgcaaaaaaagaggaacacacttgcgatggatgccaaaagagtatagaagattatatgcttcgttgtaaagcttgtgactttgatttgtgtttgtattgtgctactttaccagaaaagatttggcataggaacgatgggcaccctctcactttatgttgtggtgagaaggaagaggcgagcggtaaatattggtgcgacatttgtgagaaggaattagatccaagtatatggttctatacatgttatgattgtggagtcaccttgcatgctcagtgcgtactaggagatttctcacgtctcgtgctaggacaaatctactcctttggggaaaaagaaatcgagtttgaggcggttcctaacaatatcaacactcggccattttgcatccagtgtaactctcgatgcaaggtctccgtcatcctaaagatcctaaaggattctgaagatggttctgatgatggttctgatgatgtttctgatgatgtttctgatgatccttctaatgatgtttctgatgatacttctgatgatgattctgatgttgtttctgatgttgtttctgatgatgcttctaatgatgattctgatgatacgtcggatgatcacaatgggtatatctgctcccgatcatgtttatcgagttatttgggtgaagaaatttgaacttacgttttgatgataatgagtggttctatcttgcttgtattatttcattagcgttcctatttctctttttatttccaagaactgatatgtaatacatagtgatttttgttttctaatggtaaatgctggttattatatattatacaccaatactgaaaaagtcacagatgcacagattgatcaaaccggcatataagagcatcaaaacgaatcataaaaccaatgaagaacctaaagtaaatcaatgaaattactacgtgatcattcccttcgttatagaagtctcttgtatttgcttgtgtataaatcaatgaaaaacaaaagaaaggtagtagtctaaactaccattgaagaaatcttgcttacacaaacacaatgttatttgagagcatgcatgatcacttaacttttcttttctttcaaacataccaattttgttgcaaatacttgagaacaatactcatgtttctcatacacttggaatgtgtactacaatctaaaaagcagagtaaatatcaagggaataggcctttgaggtccgcacatctgttggcttgtctttcttgaaacaacgagaagagaagacacaaagttcaaaaactttttagaatcatacaaagttcatatacatatctggttattgattatgaaatccaacttgcagtttttttctgaacaaatgactattgttgtttgctttatgtactgttttatccgctgattttgtttcagtagctgagaattgtttggtattagacttgcaagaatattccggtatttttggaatagatgactattgctgtaagctttgtctacttttttatccactgcttttgtttcaatagctgagaattgtttgtgttagacttgcaaagatgctggtttagtttctaaagctctgttccatattgtcaactatgattacattgtatgtttcctcactcttgatcattgctttagattgacatatgtatatatgatgcatgatttgttcttaattttggcttaggttttgtaaatagtgtgacgtgaagtggagtacatcaatagtattacagcattcgatttgccataactgatttgtattctgcatcagtggatctatcttttaaagataagatcctttacaaaggatgaaaaatcattgaatgtgttcacttatgaaaaatcctctcaaataaaacattacacaagaataatcaatcattcttacttttaagttttcaagatttgcatcatcgaccatcaaaaactcccaatacacagacaggggaatctaggcaaacatgtgatgactcataccagaggtttcacttgcatcagtaaaatcctatacagaagataagcgacttcattagaaagagaaaccatcatcccaagcgcaagtgatgcagactgtaaaatcaaagagacgacaagtgatgcaattaaggaaaactaccaaacaattctcacagaaaatgcatcaatatgtttatacatgcattttcaagaaactagacagaatcaaacctcattgttatactagagtgtgatcggctatgaacatgaaaagagttagatggcttatgtttgctaaaaaaagtgtgatggtgtagaacataattgaatggaatccatgagaatgacaaagatattgctctgttcaagttggtggcttggtgattacttgataaagaaattccagccataaaaaacatactaaagctcaagaaggacgaaagtaaacgatctgaagcatgtgttcttcatgtcttttcggatccaatatatagctgtgacctgtgagcaatgttttttcattattaacacataacctgcgctaaaattttcaggcttgagattcacaacattcactttctctaactagtaaatatggatccatagtttagatgggcttaggagcataatcatttagtgaacggtttataagcccatttaagattcatacccttaaaaatggcttcgtccacgctattcgttagtagataaggattcaattttactctatttgccatttgggcttctaggcattttccttctacatcagcaatgtattttgtacgagtctaggtttcaccgtcaacatttcacattatggataggatctggttaattagcaagatttgtttaatcacaacgtgtccttgttccctgggagctacaagagttgggggcatgatgagaattttttcatgtgggcacgaaaattcaggccgtcagcacagcttgccgcacttattaattcgagaatcgtgattaacatcagattaataggaaatccacttggtttattaaacaaaacagcattaagtaatcgcatcaattagaagatgattgaagactaatctcttagctgttcgctagtttgacctttcatttaattttcagtgacaaagaacgattcaaattctggacgatatgacgacttctatattcaagaaaaataaattaattaagacttaatttgtggaacaattatttaaagttcaactgcctttgagaaattaaaaaaaggactatacacatggccggtcctattttgacgtggccaaaacgttttaaaaataaattggctctaactgttgtttagataaattcatttgacttctaggatgttataggattttttatatgttttatttaattagatgttttgttattttctatgtaaaatttaagtgcatttagtagtcatttctattttttgtcaaacaatagtcatttctgttatgtaccgatttttatgattggttgaaattttataaatttatatatgggtattaataataaatattttttatttaaaacaaaatcaagatggattattattttagtagaatctactagttattgaacattttagctgtccagctagagctagtaatttaagtatttaactgtatgtatgtatattaggaacgattcaaatcttaatgaggaaaattatattccaaccacgactaagtcaactaaattatagaataagaaacgatataaaaaattaaacaatgtttaatgtatagtatttaagctcttcgtacataggttattataattaacaaaacagagtatttttttttttttttttttgttaaagcgtacagagtattttcagaaactaacgttagcagtcgaagatttattcacatcgagttaataagaaacgccacttgagttattaaacaaaaccggtattaactagttgagatccacgacgatattttctttaaaaaaatgattcaagcttcaagcatgttagctgttagcgaaaaaagcctcctaacttcacatgtgagacacagaggaggaccttgtatggcacggaacggacaatatgttccggtatactatataggattagataaacctctataccaagattttttttaaaaattatacaaaaaaccacgattaatatctaaatcgctagaaacctttccaacttttttttttttttttatccccacccaacaccccaatttgtttttggtttgcgaaggcaacatatataacatacatttttcatatttttatttatttatatacaagaagataaatatattgctgtcttccggttcgacttcgtgatctcaccaaagaaacacgcaagatcacttccatcgatcaatacatggatacatcagcagtacaactaccctttcgcgattattctcttcaacctgctcctcggtacatcaacgctagatgtcatatctgctctgtaacaggtgccatctacaacggctacttttgcaatgatcctattgtttggatgcataaggagtgcgttgagctcccatctgagatcaaccatcttttccacccccaacatcctctcttgctcacatatgaagagggatggtggagttgtttctgtgctttgtgtggagaaacaaagccagcgaagtacttttatagttgttccacatgtaaaatcaaggtggatttgacttgtgggatgaacccaccaccgccagctattgaacatcccatctgccatgaccatccacttgtcttcctgaagaaaagacaggagaaaaccccttgtgaagtttgcaagaatagaattcttggatcatcctattcatgtcttggatgcgagttgtacttccacgtgggctgcatccatctctcgaaagaggtaaatcatccttgtcactctgatcatcctctcatgctcgtcgaatctgaatcacttacagataatgataagaagacttgttttctatgtgggcaacaaccgcatggtattctttatcattgttctatctgcaacttcacactgtgcattggttgtatcaaatcaccaccacctcttgttgtcgagaatgtgaagacgcacaagcatcctcttactttctttccaagaggagtctactgcacttgtaacgtttgtggggtaaaaggacttatactctcttatatgtgtcttcagtgtggttttgcggtccattgtagttgtgtagacttacctcaagtcataaacataaatcgtcatgatcatcgcatttctttcacacagcatcttggtcctgggtatttgaactgtggagtttgccgaagaagtgtatgccaattcaatggagcttattcttgcttagtttgccccaactatgcagttcattcacggtgtgcaacaagatatgacatatgggatggtgtggaactggaagggaaagctgagaatattgaggatattgcgccatttaaggtggttggggatgacttgattcgtcattttagtcacagcaaacattctttaagactccacaagaacaatatcatttatgatgatagtacacgatgtgaagcatgtggccatccagtcgaatttggtcgaatatacaattgtgaggaatgctgtttcattcttcatgaaaagtgtgctaatctccctatgaagaaaaggcttgtcttttctaccttaccattcctattactgggaccgggtaatgatgtttgcaaggttttagattgcaagttatgtggaatgttttttactggtttcgagtacaagtcccaagaaaggaggcaaagcgatatcgatgtacattgtggttcccttacggagccgttcgtccatgatggccatttacatcccttatattttgatcaaaagcaaaaggagcttccttgcaatgcttgtcaaaaaaccataagagattatatgctttgttgtgctgattgtgacttcaatttgtgtttatggtgcgctagtctgccaaaaaagataaggcatagcaacgatgagcacattctcacgctatgttgtggtgaagaagcaaatggaaaatattggtgtgatatctgtgaggcagagttggatccaagtaaatggttctatacatgctttggttgtggaggcacattgcatgtggaatgcgtactaggagatttctcacgtctcatgccaggatgcaccattgactaccgggtatataccgtggaggtggttttcaataatcacaacacgcgaccaatgtgcagccggtgtcactctcgatgcaaggtttctgtaatccttaagtttcgtgagggtaacattgtatattttttttgttcacgttcatgttttctgatgcatttctcatattatctgtgaggcattgctacgatttttcatgtgagaggaaaaggctttgatgttttattctaaattgatgagtgtatcttttacggtggtttctcaattcttcccctatttaatcttatgaaaattattggtgtgatacatgcgagagagagttagatccaattaaatcgttctataccagtaaatcgatcgatacagttactttggagacttatgttattgttcccgttcatgttttgtgaagtactttgcaataaaccggtggatctttcttggtggtttcacacttgaaaaaatattcgcggtgaacctttatttaccgcttttattccagttaattagaatttgtcacctaataaaaaaaattaaatttatttaattataaaatcttttttgacagacggataagaccatgttttacctgatttatgggcgggcggataaaaccatcaccgcctgccattgaacatcttatctgtcatgactattctccattcactagtctttttgaagaagcgagaggaggagcccctttttgaacaactacttttgacaatcaatagaaatccaaaagctaaatcgattcatatcaaacaatattgctaaaatataatatcgaacgcaacaataacaactacagcatgttgtgcaatgtaatatttctcggaaatagatagtcaatgctatcaaatcatgatttataagtttagaatatatatctaaaaagtaaaaacatatttcggatcaaattcgaatattttgattttgactttaaaataaaaatattacaatcctgatctggaaactctgtatcatatttgttggaagttggatgggatcaaaatttctctaacctccacgttcagcttccatttctcctaaagaaaaagagaaaagaaagaatctcattcacatacatcatacatggatacaggagcagtaaagctacccattcacgagcaccctatatttccttcggctcggatcgtttttagtacatgtaaaggctgcggtgtagaagatttcgtctacggcgggtacgtctgcaatgattctgactgtaaagctcggtttcataaggagtgcgctgaggccccatctgagatcagccactctttccaccaacaacatcctctctttctcaccaatggcctgggagatcttccatgtgatttgtgtggacaaaagcgattggaagccgctggttatagttgtcccacatgtgagttcaagctggatttgacttgtgggataaacccatcaccgcctgctattgaacatcctatctgtcatgaccatccacttgtctttttgaagaaacgagaggagaaggccccttgtgaagtttgcaaggattctattggtggaccttcctattcttgtcttggatgcgatctgtacttccacgtggattgcgtccatctctcaaaagaggtaaatcatccttgccaccctagtcatcctctcaagctcatcgcatctgaatcacttacggataatgctgagaagatttgtcttttatgtgaacaacaaccagaaaatatgctttattattgttctgtttgcaacttcacatcatgccttggttgtactaaacgcccaccacctctttttatcgagcataccaagacccacaagcatcaacttactctctttctaaacggaatttcatatcaaggttccgcgctgacatataacagcagagcttatatgtgccttccttgtggtttcgttgtcaatgggaatggtatcaacctacctcaagtcataaacatcaaccgtcacgaccatcgtatctcttacactcatcagcttggccctggatatttgaactgcggagtttgccgcgaaattgttgacagggattgtggggcatatgcttgtgtcgtttgcagtaactatgcagttcactgggaatgcgcagtacatgataatgtatgggatggtgtggaattagaagggacatctgagatcacagaagatattgcaccattcaaggtaatgggtgataacttgataagtcattttagtcatgaacaacatactctaaggctgcacaaagaaggcatcattcatgacgcgtacgcactatgtgaagcatgtacatatccgatcggatttgatccgatctacagttgtgaggaatgtcatttcattctccatgaaaagtgtgctaatcttcctatgaagaagagactcgtgtttgcaaccacaccattcaaattagtgggagcaagtagtcgtgttcgtgatgtgatagactgtgggtactgtggtgaatgttctactggttttaagtacgcatctcaaagagggtgggagatagatgtacattgtggttctctttctgagccgttcgttcataatggccatttgcatccactatattttgattctaaggaaaatcactcttgcaatgcatgccataaggtaacggttcatatgctttgttgcaatgcttgtgactttgatttgtgtttaagttgcgctagtttgccattaaagataaggcatagaaacgatgagcaccctctcactctatcttgtggtgaaacggcgaatggaaagtattggtgcgatatatgcgagacagagttagatccaagtaaatggttctatacaagctttgattgtggagtcacattgcatgtggaatgcgtactaggagatttctcacgtctcatgccaggacgcatggttgatactgttgggggaaagaaattttatgtggttcttaacaatcacaacactcgaccattatgcagcatgtgtcgctctcgatgcaaggtctccgtcatcttaaaagcttgtgatgaagacaatgtatacatatgttctcgttcatgtttttctgatatggtttcagctagatcatgttgattgagtgtttaatttgtttaattttgtgtggaaaggatgaaacttcgataccctttatattttacaagatgagtgaattattcatggttgcattcgctagctgccctacaagtccaaattcaatatctgattttaatttgaacttctttactttgctcgtcttgcaacataactgagttgtgatttaaattctaatagatactgttaagggtttccatgtctctatattttatctatataaagatatgcctaagagtttataattccatcactcataagattaatgcaagaaaatatcttagagactacaaggttcaaagatatttgtttattcttagttatgttttctaagatttctctaaattttgcccgaattcacaacacagctttaattatcattatactcttccagttttatctgtaagaaactagaatgcaatcagactcattgttatgcgatagcatgatcacttatagttatgaaaatcattgttatacggtaacatattgaaaatattgaattgctatacaccgaatggccaagtatatataaccaaggtaaaaatatgtcaaaataatggcttcgcccgggttcgaaccggagaccttcagtgtgttagactgacgtgataaccaactacaccacgaaacctacatgcttctttctaacctcaacaatatatatatacatatagataactgtttaatattgtaacttgtaaccagtgtcggctaatttcgacttttgtagatctttttctgctctttctctctctctctctctctctctctctctctctctctctcttgtattatttctatctcccccgccgtcgaaagagaaacgtcgatcggagaacctttgaaatgtcgactggattagatatgtctctcgacgacatgatcgccaagaaccgtaagtctcgtggtggagccggccccgctcgtggaaccggatccggatccggaccgggtccgactcgccgcaacaaccctaatcggaaatcaacccgatctgctccataccaatcagccaaggtccaaatccgttctacatctgttctttcttcttcttcttcttctctctagtttcgccggatctttcttctcagatctgccgattcataatggaaaatagactctgcgttgacgttttctttaaaaaagcttttggtgttgatcaatctctcaatacgtggaaaatatcaaacaacggattcatttggttgtataggcgccggagtccacctggggtcacgacatgttctccgatagatctgaagatcaccgatcgggacgttcctccgccggaatcgaaactggaaccaagctctacatttccaatttggattacggtgtcatgaacgaagacatcaaggtgcctaaattgttctttaccctaattctttgttaatctgcatagttagggttcctggaatctagcatcgtcttacctgaatagataccaaatataatggattcgatcctgcgaagtagttaatatgaatatgtttgttaatatgcaggaactgtttgctgaagttggagaacttaaacgctacacagttcattttgatagaagtggaagatcaaaggtacttgtgaattgtgatgatagttttgtatgtctccttcctcttattgagtcttgatgactgaagtattgtaaactactttattaccattagggaactgctgaagtagtgtattctcggcgtggcgatgcactcgcagctgtgaagaagtataatgatgttcagctggatggaaaacccatgaagatagagattgtgggcactaatcttcaaactgctgcagccccgtctggtagacctgcgaatggaaactccaatggtgctccatggaggtgagattaagcactgctcattactatgtgttatatgtaaaagcttcttccatcttgtgaggtgtattgaaagtgtgtttgtcttactgggttagcagaggaggacaagggagaggaggtcaacaacgaggtggtggacgaggaggcggtggccgaggtggtggtggtcgtggtaggcgtcctggtaagggccctgcagagaagatttctgcggaagatcttgatgcggatcttgataagtaccattctggagatatggagacaaactaaggaacgtgactgatcttctcaaaccggtaggggttttaggaggaagagaatcgagaaaatgtttgccagaggctttaccacttagcgcctttttggctgtgttgttcatttgtttcattagaatgactttacagaattgagaatatgtgttatttaaagttgttgtctatcttaataccctcaagtgaaaggcagaggaaggaataccaatttcgtttacagatcatatgcaggcaaaagagttttcagaaatcaggtttagttacttgtattgtgtctcttatccaagccatgccttgtggtattatgagcgcagaattttgattgaatattgttcatttgcattaaagtatcaaaccatttacgcaaaattgttcaatagtgttactccatgcatgagaggattttcagaatctatcgttccagttctgtatattgtgcgagtctcaactttttaagtttctctctctatttctaagcatgtcgaattagtaatatacacaacgttggatgatatcatggtccatgaatggtgaaaagtttaagggttcttagttcttacagatccaatacaactaaaacagaaggccgaaatggtttatcttctacacaagaagggtttctggacacaatacacgtcctctatagcaaaataacaattttaccaatgacaacaaaacaagtcaaaagcttatccatgggatctttcacaaaacggagtttatcttctctgtagacagtaatacaggtgaaggtaaggttcactggtttgcctctttgaccaaaaccacattatatacacaaggattggattcctgctgtaagcttcatcaaaagtaaaagctattcagctctgccttggcttttctcgccgtgaaaagatgagccttacgatagaatagagtaccgccttaatgcaagaaaccacaaagttccagcatgaggatggccagtaccacggatatagcagcctgaaaaatagactaatgagatgcctcgggtaacgcccaacctgcaagacaagagcatcacaatgttacaagccaagcctatccataatgtgatctatatgcaagtgttaaagacatcaaacgagcgaacttgagcctgttttgctgaactttgggagctttcagatttttaggtgattgcctaaaactcttagatgatgtttttgaaacccatacacacttacactggatcttgcaatcaaaacaatgggcctaaacctgaactttttacaaggtaatactcacaggaaagagggaatccaaagcatcccaggctgcatgacggacggctcttgtcgggtacattggacctccaggagaggtaaaactgtataaacacgcctttaaccttgtgctagtagtcattctcagttccatacctgcagatgaaatcaaacatttcttataactttgattccatgttagatgcagaatctagacaagttcctaaaggagagaaatgtaccttgaagaatcttcatctgagaaagataatgtagcagcactggttccaccttcagtttttgcagctgccgcaataaaataagaaatattagatgagtgatgtgtgtgatacaattttgagagaaattgaagatagtcataaagcttttgcttctatacctgatcagttagttcgataacaaggaaatctccaggtcctccaatcaagaaagcatttggaaactctgggaagttcctcaagaagctatcgagtttatccactggacaacaatttgtcagtgaaagaagaaacgctttggttccaatgataacttttcagagaaaaatgtcttacctgaattgtaaaagaaaatgaacctagagagtaagagatacagttccctctgagcctgaaaataggtatatgggaaagtcaatctccaggttctccatcagttgaaccatcatgagaatgaagaaactcacctgaatgggaatttttttcaatcgtatctgctccaaagcaacttcctcaaggagatactaagagaacaaagagatgttagttacagtggcaaaattgcatggcgatttgagcgtacagtaacaacccgatttgacaagtacaaagcaatatttattgcctagaagatgtataagaggcattaaacaaagtaacatcttagaaagaggatgtgatgatctctagcatgtgtggtttacatggtctagctggaaggccagtaattgggtttttgttgagaacatagtcttccttaatacatcaaagtcacttgattgataactaaagttccctatatacgtacattatccaacaaagaagatgaaaatacgatatatctgaggaaaataagatacccgaaagagactttggaagcgcctcgtatttgtctggatgtctatcctgtaattaatatgagtagaaattatcacctgttacccctcataatgcttggcaatgcaatattaagtagccagagactctaaaaaactattataccatttcttaacaaactataaaatcattagttaaaatatgccaatgccactactacagatccaaaccacacaattaagcctagtgaggtatacacactgaaccaagcgagtcaacaagagtgaagatgctaatttgctatgccaaagttcataaatttttaccagaacacatttgttgctccctgcaccagagccgaagaatatcgcaggagtatttcttgattgtcaagctcaacctcaaacagctgagaagaatatagaagaaacacattaaacattattgactcagtcgacaaactaatggactgaagacaatgcaaagaaccttggggattgaaaataacactaaagcaaaatcgtaagatttgcaatacccatttatggaacagtagagagaatatatgtgatgcaaaggactggctccacagctgcaccatcaaatcaagtatatccttccccctctcagacactttcacatagtaatcagcaaggacatcgaaaaagcataacggaccatcagcatctgcttcatcagaagtaatcaaatcctcttctttgctaaggatcacatctgcttcaaattccagctcgaaaagttaaattccagtggtaaaaactgatttgaattcaaaaaaatggggacatgaaaagtgtaacctttggctcgatcgtctacttcgagagctatatcagcaaataagtcttgtaacaagttgcgtgtttgtgctggagagacaacagcctatacaaattccaaaatcaattttatagtctcaaattgaagatgacaaaatccagaaatctagccgtgaaaaaagctgaaaacaggtatataacatttgttgattgataaacattaatcagatttgctgcatgacattgatctcaatcggaaacggtagattcaaaatgaatcaaaaccaaaaaaaatcgaagaaaccatttcttaatcagaatttcgtggaattatctaatgcatgtgtctcgaattagagaaatcgtgttttctgggcaaaatcgaaacccgatcaatacaaatcgagaataacgaagaagaaaaagagcaaacccgtgtaagcttcttcttaatctcttgtgtaagagcttcaagataagcagacctccgtgaaaaagaggaagacggcgacgaaactttctccatttcaaaaaccactgatccaaaaaggaactaccacatgcgatcaacagcgtcgatctattatcgctagtatgagaaatcgagagaatgataatgattgcttcttcgttacgaattattttattcaatcaatcaatgaatggggtctcctctggatttaaaaattagtcgtaattaggcgtgaacttcttttctcttttgctactgtgaactccgataaagacacgagaggaaaaaacgaagatatagtttgtttcaaaacgacttcgttgcattctggatcagagagatgacgtgttggttggctgaagacacgtgtacctcttcaggcccctgtttatttttcttttaatctttttttttttctaaaagtaatcaacgtcgttgtggtagaatagtttcggaatgagattgattaatgtcgttttgtatcttttcagaatttgttatgcaatacgacaatttattcatatcaccttcttttagatctgtatccaattatagaaattggatgatttgattcatcaaattcaaagaacccttaagataccactatctcctttttaaaatggatcaagacctcattatccactaccactcgtggcaaaatgaaaactatataaaatcaacacaaaatggagggaaactaaaatttacgcgctaatgagtaaagttggttaaagcttctttactctcaacatttggacctgacgtcttgtcgtcgttatttatgggcttggtgatgttttattgggcttaaattttgtacattttagtgcaaataaatatttcgttctaaacaataataacgaatcgaaaagcccaagacatgttatactcgagagccaacagtcaagctgatttcaacgtatctcgtcacgccacgtagttgattaacagccgaagatcgccgctgataaagaactagattgacggctgacgagttaatacgtctgctctactgtcaaattcacaattcaaagcgaggtagaaaattagagtcagagtcataagagattatgagtaatcaaacgaactttcaccaaattgcgtgtttccattgttgagaatttagcaaatgaaaacacattacaaaagcgaaatagcaaaaaaaggaaatcaaatcttgctacatttactaaaatacctacattgaaattctcaaatctaatttccagaaacagatctccaaacacaaatctgaaaaaccctgattaaccgccgaatccgtagagagtccttccttgcctcttgagagcgtagacaacatccatggcggtcacagtcttcctcctagcgtgctcggtgtaagtgacagcatcacgaattacgttctcgagaaagatcttgaggacgccacgtgtctcctcgtagatgagaccactaatacgcttgactccacctctacgagccaatcttcgaatggcaggcttggtgattccttggatgttgtctctcagaaccttcctgtgacgcttggctcctcctttacccaagccttttcctccctttccacgaccagacattttctcgagagaattagatttctttttttcgctactgtgtgaagaagaattgcttttgattttcagatattgactggacgtgtttgtttatatataagagggcttttgttttcaaccatccgatttaataacccatctaacggctgttaagctcaatccttgtcaatactgatatgacatgatagccgtcgattgattttaatcaacggttattaattgtgatccgcatgataactacataagtgttcttcagagcttcgctttgtagttactagtttgcatgggctggcttactttttaatgggccggttatggatcgaaaccaaacttctcttattttcgaatacgcaggcgtttcggtaactgcctcatacgtcgtcggttgcatagtaaaataaatttatttctttttcttctctttttttttttttggtcgtatttatatttcttctcctaaaatcggtgaagtatctaaaaacccgttatttaatgcttaaaccctaatcggaaaatctctccgccactgttctctccgactcactaatgggattcttcgatcttagcattccgtacaatgagccgccacgatcaggtggtaaggaaatcgccggcgggaaaaccttacgattaaagctcgccacgaaagccatggagctaggctatgttgggatcgcacataaccgttcgatcaaaggcgtaatgtctgacaaagactcttgtacgatccctcttctcactcttgggtctctaatcaaagtcgctccgcggttagcttcttctgtcggattccatcgcgatttactcggtgttccgcgaactactccgtttcggcagtacacgcgtctcacagttcatgtggagagtaatgctcagtgtcagagtttgaattctgggaatccgattctaaagagttatgatattattgctgttaggccgatgaatcagaacgctttcgattatgcctgtgagaaagctgaggtttgaatttctctctttttctgttaaaaattcaatctttagtttttgtagctcaattggagtttttttagttaggatttaactcttagcttgtttgttttcataggttgatcttatttcgatagattttacggacaagatgttattccgattgaagcatcccatggttaaagctgctattcaggtttgtgatttcactgttagaagaatctgtgtgtatcttattctttttatttgcttcaccttaatgaattttcttatctgcagcgagggatttactttgagattaagtactctgatatccttatggatgcacaaacgaggagacaagttatatcaaatgctaaggtgagattctgtggaaaattttattgtcaattagttgatcatgtgaaagttttatgagaacttgcttatactgtcttgtgatatggtgtatctagttactggtggattggactagggggaagaatctaattatatcaagtggtgctccttcagtcacagaacttagaggtccaaatgatgtcataaatctcatgttcttacttggactctctgctgaaagagctagagctgccatttcaaaaaattgtaggtatgtatcaaattcgtctagcaattgtgttatttgatgctgctaagcgtcattgagaatggattttaaattgctttcaggaatatgatagccaaggttttaaagaaaaaacggtttcacaaagaagctgtcagggttgaattactttctgctggtgatacttttagcctcgaacagcctctgtctgaagattgcatgaaatgggatcgcctttcgagcggtgaaggtgacatgcttttggatgatcttgcaaaggcttttgatgccacaaatgttgtggcgcacaaatcctcgaaggcgattgatttcacctctgttcttgatggcttgccaaaacatggtttccgggttaaggatattgtaggaactgaatcagtgactcagccttctgcagctaaggtgattgacactcaggtgcacagtagtaatcaagtttctgaactacgtatggccacagcttcatctgatgataaccttcgggaaattgaaaccataagccaaattgacatgctgatgtctgaagatgacaataaggtggaacctactacaaatgtcctcaaagaagaagcatttgccctaaggaaatgcagtgccagccatggccaggggattttggtgcaaaatcagacggctactccctttacactgacaagatgtacaaagtcagaagcagcgtcggatgttagcatgaatattgagtcgacttccgaaggtggatcaatgtcaccgtcaaaaagcgatcatgggatcccacaaagtcctgttgaagtgaataacatgggaaatgctgcttttgaagaagaagcctcagtggacgaaaacagcaaagaaagagctactactggtcatgctagtaatgatgagatgcatatcactgagtctggacaccacgcatccattgatgatgagaagcatatccctgagcctgaacacctcacatccattgctgatgagatgaaaattgattgttcttcggaagcaaatcacgacgagtacatggaggtcacaatggaagaccagatgcatgaaacaggtgacagtaagattattcttcctaacttatcctctgagactaccgatttgctaagtgaatcaggtaaatctctcagtccagatgcggttgtgcaagaccatgacgaagcatcaagactagagtccgatgagacaaagctcgaggaagaggcatcagttccaaaccacaacacctttgagataacaatggaagacaataaggtcgaagagttaacaattgaagacgagaaggttgaaaagactgaaaccgaagctagtcaccaagcccaagtccaatcctctgaaaataacaatgacacaaaatcaggtacgagatctaagtttcctcatttgcaaatctaacctaacacataagtttggagtatagatttcagtctaatgttatatcaatccataatgtaggtaagacgcaagctaagaggagtagagttcgtttaccgcaactaaggcctttcaagccttttctacttcaatcaaggttcaaaaggatcagtaaaaaaagaaaacattgaagagcttgatcattcttataagtacaagttttgtccattaatttatacccacgcaagtctcgtggtttcatttttgaaccgattataaaatgggggaaagaaagaatctaatttattctctagagttgattctttgtgtactcgtgttcaagaaaaaggcttttagttaaaatattaaaaaggaaaaaaaaaagttaaaaagatttaagagtggaggagtcggtaaatctaccgccggccgacaaaagtcggggacaatgtcgccggagggcctacatctccctccatagccattgctaaagaagaaagactgctctctttcctttttcaaaactactttatttataatctaattgagaagcattattcttcacattattactaattacctacttgtgagaaaaattattctcttattactaaagatgcctaacattcaaattattttcacttttaaataaaaataaatgatttttgttactgttggaaaataatatagtcttacaatcaaagtaacattttttcttgcaaaatatcaaaagtgctgagaaacttttccatagcttttttttttggcaaaaataattgctagtatgttttcctctagctttttttatatactgacttatgagaatgaatgtatgggttgattactttaagttagtttatttgagtggaagcttctttgatatcttaagaattcttaaggtatataatatatgtttacctttggagattgctagtacttagcacgatgtgtaatcaacgtgagagtattatgaaatcatcaaagtaacatggccatgtgttcattatatgtttttcaatgctaaaagttatcatctttgtactttctaaatacttttgtaaatcaagttggtaaaagaaaaatcagaccattaaggaacatactaaactatacattaactatttaagggtccatatacattaacgatgtgtaatcaatttgttttagttggagttcgatatttttaattgttttatgtatatcgtttgcaactcacttatggactaccgaatttaaatgacggatctaatacggcgacgacgttttatctcaaatccactttgttctcaataggtgaatatcgttttgttttgcctttaacctatctaaaaccccatttatctcacttatagaactcagtgccatgctaagacaattgcaatcgtcaattgacaaagtggcatataccactcatgcagaattgtatggccagtgaaaaaggattagtttgcaaatatctcagatcaaaaatacaagatatgttattcttatatacaaagataacacaaaacctacacatgagtttagcaacatggggaaatcttttaaaccaaaacaaattaaagtgccatatataaacatatataagaaaaacaaacatagaagagattaaattagttgaggaagtgattagcagagaaagaatcaagaaaagatgcccacgtgtcgacatctcctaccacggcttccataacatcaacttgttcttgttgtgagatctcatcatttcttgcaaatctccctcttattcttggcctactgtccgctaatgtcttcctgcattcgtactaatagaaagataaaagattattattaaacctgtcccaaagtattgtgatagtttttagatcattcacaagtcaaaacttgtcggtcaaaaaattataacgcgagcagaaatatctcattgagatacggtttgaatatgttagtacatgaatactccaatccgatctttaattagcaatgaaatatatttgtggaccttcttgtaagaaaaaactaatggagaaaaaaacttgtagcaaccttggagcttgatgtgtctatctcaaaggattccttagacccaaatatgatgtgacagaacattaattctcgttcacatactcatatatatcagatgaaattctatttatgtttgaagataagattgaaaagaaaaattcaatgttactttttagtgataagagtgattgatatgatacattgagcctgtttttttttttttttttggtcaacgaaccatttagttttgtattaaatgtgaaaaaaaaacagtattactaagaaaagatatcttatacatttgattttaagaaaatagacatttatatatgctcttgtgtatgaaattatacagaaatcattattagttgattaatgaagaaatttataggaaattgtatgcttgattagaaaatggttgcatcaatatatgtgaaggtgcatgtcactgttccatacaactactgtacatgtcaagtcctcaaaagttttccatgcgacacatatatacacatgttgaatatataatataggttaggtgtacatggactctatgtgatgaagaacaatatgaatcaaatgataaattcttatatgttaaaataagatataagaatttatgctaacaaacagtttagaacaaagaaacaactgtaaaacatttataaaattaccttaatcctcttgttgaaattcctaaggtttcgtttgctacgatatttctcgatcttttctttcttctcctcaggactatacttgtaggctttgctcattccttctattattgcattgctctcactccacaccgtactgctctctcttctgctactcctctacacacataccaaaacagtgtcgtcttatgttatgatagaattattattattttcaaataaaaccccaaattttagtatgtttagataatttatttgtgttttggtgttttcattttacactcttgcaaaaccataaaacaaaccaacaatataatgtttcgttttataaaatgtgaaaaatttcatacgtaaacgaaaacataaaagttaacgtttgaaatctcgaaactgcaagtgtgtatataatattacttacgggtagatctccggcgctaagggcccgtctcactggcccatcatcatcgttaacgaaatcatgggccgctgtgtaattaccggaaaagccattatggctactaacactcctctgcataacaagactctctccgccactccccatagagcttggcgagtcgcagctgctgcttccaccaccaccgttcatgccggaatcaaagtaaccgaaccctgaaaccgcctcggccgcgtatagagagttttggctcatcataagaagcgccaaaggcggaggcgggaactgatgatgatgatgatcaagcagctgaggaggagccactatgtcgtcggagtatagaaaacatggacagttgtcgccggaggttatagaagtgctgacgtgtccacacatggtgggttttagtttattgtggtgtttatgtgtctttgtgtgtttgtttatgtgtgtgtgtgtgagtgagtgaaactcgaagtggtttggtttctatttaacagaggaaggactgatgctgacgtcattaatcgtcatctgaagtcaactgacttaaccgttgacttcttttgactgactaggaaaaaaggaatctttaggtataaaaagagttgcctttcgttttcaggtcgcttctatctcactctcacccgttattcttcaaacgacatatattacacgaaattgaatccgacatgtattatacgaaggtgaatttggatagttgaacaaaaatgataattattttttcatttaggtttaaaaatgttttcattaaaaatagaactactactaaaaacaaaaattcaaatatacttacttatatataggttactgattaatatgctatcaattataaatacagaggaagaaagctagtgacaaataattactaattataaccaagtgttgttaattcaattagtaaaaaccctagacgaaacttagagatcgccagttcgaatgacgtttagaacaaaagtaatattatatgctgtagtttcgggtacggagggattacgggtttcagtccaaaacctcttggtattcaaaaaaaaaaatactaattatattgaatttcaaaaaaattgttattatattgaattttataattagtaaactctttcttttttttcaatctctttaacacatttacgtttcaaactaaatggcgttataacattttttaatgtattaagaatttcacaacgataattgttgtaaaatggaaggcataatcatttcttgaaacagtaaatttactgatattttcgtaagcaattgtgttttaacttcaagtccttgacgaaaaaaaatatacaattgtgttttaaaatagtagatagataacatctcgtgcaacattcataaatcataacagcaaaagaacaatgtaaagaaaaataaaataaaataaaggacacgacttagctttttagctcgaattgtataggagagacaaaaagatggttaaaagcattatttcacgcaaacccatgtgagcagcatacaaatctacttttttgcctaattaatcattaacttaatcaacagtaataattaattaagctcagatacttgattgctttggttatgttcacattaaacgggtgtttagtccggtccggataattaaccagacaagacacgatagtactgctctgtatatgaattgtatatctgttccaatccatgattagtcaggttaattagccagaattttttgtttggaatcaaatcgatttaggtaacatatcgagagaatatctcaaacgagttatacatagctacccctacggtaaagtatataaatattgtttttttttatagatattttgtttacgattagttacattccaagaacgaaattcgaatagtaggatcactgcatatataccaatatattgtaggaacacgttgtagtcagtcactaaattggcctactcatcatcatcatcatacataatacataatcactcatttaagaacaaaacaacttataatttcctgtttaagcctcactccataatgaggatacataatatcaacccaactcgtggtgtttgtttagtagaaaaattaacccacatatcacattattactactagatgatattgattatatttatctaattcagtccaatccaagtttaaactaaaatgattatatatctatatgtatccaaaatatttcatttggatgatggtaacaaaccgaaccaaaaatgaaaaatcaaatttgttacatctaaaacctaaatttgaaccaaaattaacaaaagtgcactaacttagatagtcttcctcctgaaatgtgtatacaatcttcccttgtattaggggaaatgattgttcttctccattacattctatatatacaatatgggtccgtcgataaatttatttgaagaattttttctcgtcgatatcacttctctaagccaaatatataattttattttatttatggggtacgaaagcatctttttcacttaagaggatcggaatgtaggtccattagaatcaacgaaataaaaattagttatattttttttctttgattaacacaaactttcattttttatgcgccggaaactagagcatgtaaattagtctcctctaaacaggtcaattagtaggaagagagctgtaaatctcattttgagagagtattttcaaacaacactaaaccatcatctattgggattatctatagtttttttttatcgattactcttctttttatcgtcaacgtacaaacattaatgtcgatttgtgtttgttccgtatccaccactcttattgtaatttctaaatatactagctgtgttttgcaaacattttttagggaacgttgaagacatttcaaaacttaaaacaaagttgccccacataatgtagagacataaataataattcgcaatcgttacgaggacataggatctcgattccaacagtggatagatgtactatgggactaattagaaagacattttgtgtatccttaagggcaaaatagccacaagttgatgggaaaggtcatgcaaaagcaaaatctatagatcaatcgatggtaacgaagactttttctatttggtggtaaactttgtagcataatgtaccaaaaacaaaacgtttcatgctatggttggttcataactagtttcgagttttaacgatccaataagaattgttctttttgtttttaataaatagtgtttttgtttttgcatttcttaccaccactggagcaaattattggttttatactttcgcaagtctctcagtaacccactttggttatttgcacacaacaattatatacctagttgtagtttcaagaaggtcaacggttcatgaaaacgatgatagaataggggagatatatattttagtatttattcctattactaatgaaattatataaataaatataagtaatactataaaatgaacttaaaactgaaattaatataatcgtgtgaaaacgttactactactactacatttggtgaaaatatgaatttgcattttgactttatagcatgaattcatacataaacaacgtatagtatgcatacaaaactttttcatggtattatgcgagatgtttgattttacaatatattaatggcaatatgcaaataatatagtccaagcctatagaaagcaatgataatagcataaatgtaggcaatgagtacacaaagagtttatgatcaaaagaaatgaaatgtgtagggttacttgttcttggttgaaagaaaagtatgttccatacaaatcaaagaaagacggtgtgatttagatgtttttaagtgatcccatcattttgttttattgttttctctattctttttaaattgttaattaggactcgtgcatgtgtttctatgcgtttgtccaatcttctggacaagagaaaaaggtcaacaagcacaatagtttctccaccattttcacatattctccattcacgtaaattaaactttcaaactttggatacttcgtctgtttttggccttggaattcatattcgttacaaaaaaaaacccatcagattaagaaatatctatagatgtctaattttgattttttttcttgttatttgagattataaattcaagtttaatccatattgacatatactacatctacagtgtacatacataaataaagaacaggaagtcaggaacataccataacttacttggtataattaatgtcaacactgcttttatcattttcgctttggatgctattatatatgtataaatgagtggatgtatatgtcgaacaggatcaatattggctacataaccgtaaggccaagattaagagtacaggaggaagaagtaactttccaaaataggtaaaatgggttaggcttttgaagtaatgatatttcttttgatttggtgagtcaacgggatgcatttgtattttttgtaactttgaaatataaaaaaaaatgttattcgttttacctttgtaggtatcaaccaaaaaaatgagcctgtttttcactagcaatttgttgaccacgcttttttgaaaaaagaacagacgcattatataacttacttaattattatattttgaaacaaattaagtttaatcctttgaaatttgaacttttttttttgataaagatgaaatttgaatatatatatatatatatatatattaagtttgctgacacccaaatttatgtcatttataatcactattttcacttgactgaaaatgataaagttatacagtactataaccaccgattatattttcgatttcgaatctagtttttatttactgtcattcattacattgaccttttttacaagttaggattttaccatttacatatgacgtacaaaactattggtaagaaataacatttcaacgaaaaaaatgtcacgactgattgtttaggtaaaaaacaagaatttgtgcattcataaactctatataaatctgaagatcaaaaccaaatctaccgtaaattttatcatcgatagaaccaatcacttattaaacctcggattcggtttatgattccaaatcatcctaaaacatacattttggtttttctatatttataatttagagcactctcaaattaatatatttagcaactaactgagatatatcgagacaatttatttatttatttatcgaaagcactaattcttgtcaagtacatacacaagatcactatcaaatattcaaatcaaaatttgaaggaaggaaaaaaaaagggtgcgaagttgactaacagtgacaaagaaagattggtgtggcaaaatgcaccttctctaagataagccttccccatcactgtccttttctttctcttccctttcttcacatttttagtccttaattttagtaatttttatctatatattctaattattctaccaaagaaataagaaatcaaataatttcttttctttttttctcatgaaattacctctatcttttgtcataaaattatttgctgacagattagcttataagagttaaacaaataatatacacgaataggctaggtacgtagttctaacattataaagaaaatgtgtcaattcattttcttttctagtaattatttaaaacactcgaagtaaagttgaagagtatcaagtctacttgattctgattgataaaaacgtgtgggcaagtcaactaagatctgaccttatagtggttaattggttagatttgagctctttaaaaatgtgaagggttatcaaatttatccgatctgattatatatatcctactggtttgtatatatatacttatgtcttagcacttaaaactttaaaactgtgaagggttatcaaatttaattaacttgttagatccacaatttggtaactcatatgattgctacatcaaattaaatttatgtttttttttgtaaattaaatatcctttgacctttatcataatttttctgttttaaaataaatatagttaaattttttaattttttggacataaatacctaaagcagaggatcgacttgcaaaatcttctctatttcaaggttccaaatttatgtatcatgtctatattccacatttgatgcagaatattgtaacagtttagtacttgattaattaatatattagatgtttcaaaactaaactaaaattcaagtcaacatttagatcagaatatcaaaattcaatttaaattttagagatataataaaagtttatatacatatgttatataaatttgtgtgaaaatgtcaaacaacactatttataatgaatatagttttggtttttccatttgatatgacaagttgaatttgcgttaacgatgcatgtaacagaatttgataacatccactagctttatatcaaaaaaattttatatgtctttatatcaatatatatagagtttggcaagttcacactaaacttgtgtgaacattgaaaaagccaaacattattggagcagtgtacataatgctagcatcttataatatctttttaattttgcatagttgttatttgttcaacaaaaaaattggtaataaaaaatataaatgattttttttttggaaattactttattcattttcctgatgcctcaaacataaggtaccatttgaaaaatataaatgatttagttccaaatgatcggaaaaaccttgtcccagattctcttattgttgttccaacgataaaatccatcgtctttgacaacgacgaaacatgagtttttagactccgtagcatctttgtccgaattgtacaaaacgtacggtgtctcgtgcatcccgaaatgtgcttctctgtaaaacgttcctatgcaagttcttggctgccacggtctagatccttgcgccttctcatcaacagcattgtcgccggtagtggttgggatctctatcagcaacttctgacctaaaggtacgagtttggagagccaaggggttcggtggcacgtgacgaagacaggaacatcaccacgtctcttcagctcgttggacacgagaagagtggcggcacgtgtggttgcgaacgtagaaaataacatcatagtcatgatcgagaccattataagagtgtccatgattttgatttttgtgttgaaagtatattgtcgaatggaaatatatcttcgatttctcaaattaggagtatcaatattttcattacgtttttttttgttgtacgtttattgacagatatgattaatagcacattcagttacgattagagattgtcttggtctactacagtagtagcgagttccgtatcggcctatcaaaagcccgattcaggcccaaaagcaaaacacttatttttcttatgtaactgttttttatcttaacttggaaacatattttgcaaacattacatcagccgcaccttcacggtttattttaatttcatatcatttctttcaagtagcactaagtcaaattcagaagttccattctttttataggtctttgattggtctacgtatgtttgacctcaaaaaaaatgctttccttagaactttctatgtttagtaaacttttcatgtgtaactaaataaacaaaacacaaatgttacaaacgacacagaaatcaatgcctctccccctactttttctcctcatctaataattccatcaaaccaaggaaaaaaaaacaaaacaaaacgatctaacaggaataaacaagatagaattataagatctccgacgatccttagcttcaatcaattattggtggcggagaaagaataaataataatactatgaaaagtaacactcctacggaggattcaacaaaatggatgttagagagtgtagagatcgattcaatgggtgaaagctcctcaaaagaacccgaaattaacctcaacaagaacgaaggtggtctgaagaagaacgcgtcaagaaatctcggcgtgggatcgataatccgaacattgagcgtttcaaactggagaaagagcgggaatctaggctctccgagcacaaggaaaagtggaaacctggggcctccgaccaatgccgtgcccaagaagacaggtccacaaagagtggagaggacaacatcaagcgcggctaggggacttcagagcttacggttccttgatcggacagtcaccggacgagaacgagatgcatggagatcgattgagaaccggttcaatcagttctctgttgatggcaagttgcctaaagagaaattcggcgtctgcattggtaactaacaaaaatactaatatttattacgtacggttccgaagattatcctttagatccacttccatttggtattcgtagtgattttgatctagaacgaaaacttaaatatttcgtttttttttgtatacaataattctttttatattgtatgtttattatcagagatgcatgtgaagcctaaaaaataattcaggacgaaaagaaaattcattgtttgtttaggacgaaaatttaacatggatggtatatataactaggaatgggagacacaatggagtttgcggcagaagtttatgaagcattgggtcggaggagacaaatagagacagaaaacggtattgacaaagaacaactcaagctgttttgggaagacatgatcaagaaagacctcgattgtcgtcttcagatcttcttcgacatgtaatttcactcaatcttatatgttttcatatatacacaaatgcggttatttatttttatttttaaatgcggttatttagtttaaccattgttgttgttgttgtttaggtgtgacaaaaacggagatggtaagctgacggaagaggaagtgaaagaggtcatagtattgagtgcctcggcgaaccgcctcgggaatttaaaaaagaatgctgcagcttacgcatctttgatcatggaagaactcgaccctgatcataaaggatacatagaggttcactttttctttgtaatttttatatatgatagctttctttatctagacaaatatatagagagattaatgttctgaccatttcatagtttatatccaccagatgtggcagttagaaatactactaacaggaatggtgacaaacgctgatacggagaagatgaagaaatcgcaaacgctgacacgcgcgatgatcccagagcggtacagaacgccgatgagcaagtacgtctccgtaaccgcggaactgatgcacgagaattggaaaaaattatgggtactcgctttgtgggccatcatcaacgtctatctattcatgtggaagtacgaagagttcatgagaaaccctctctacaacatcaccggacgctgcgtttgcgccgctaaaggcgctgctgaaacgctgaaactcaacatggctctgattttggtcccagtctgtagaaaaaccctaacgatacttaggtcaacgttcttgaaccgtgtggtcccattcgacgacaacataaacttccacaaggtgattgcatatatgatcgcgttccaggctttgctccacacggcacttcacatcttctgtaactaccctaggttaagctcgtgctcttacgacgtgttcttgacgtacgcgggtgctgccttgggaaatacgcaaccgagttacctaggtttaatgttgacgtcagtgtcgatcacgggtgttttaatgattttcttcatgggattctcgtttacactggcgatgcattattttagaaggaacatagtgaaattgcctaaaccgtttaacgttcttgctgggtttaatgcgttttggtatgctcatcatttgttggttcttgcttatattcttctcatcatccatggttactatcttatcatcgagaagccttggtaccagaagacggtaagataattttgtaaatatatttagtactctgatgcgtttaatcaagttagttctacattatagttttttttttaaaatggtaaattgaaatgcagacatggatgtatttggccgtgccgatgttgttctacgcgagtgagaggctattctcacgtctccttcaagaacacagccatcgtgtcaacgttattaaggtaactagagaaggataattaattgatcaaaatatttattagattctggatacccttaatctcctatagacttataactacgatatgaacattgagtaaactataacatttcgaaactaatatactgtaattagtgttttttcgcttatatatagtaatttttagttaatttgtttttttttgtctttcatgttttctgttcgttttacgatgtaggctattgtatattcggggaacgttcttgcactttatgttacaaaacctcccggattcaaatacaaaagtggcatgtacatgtttgtcaagtgtccagatctctcaaaatttgaatggtaaactaaataatacttcatacttgattaaggtacatcatccattctttaagtgaagtgatatcgattttactttattattgtttaggcatccattctccatcacttctgcaccaggagatgactatttaagtgttcacattagagccttaggagattggaccactgaacttaggagcagatttgcaaaggtaatccttgttacttttttccttataactaaattttcattatagatgttttatcagaggttaaagaacgtcattattacttttaagcgtaagctttttttttttttttttctgttcgtatgtagacatgcgagcctactcaagcagccgctaaacctaaaccaaacagtcttatgaggatggaaacaagagctgcgggtgtgaatcctcacattgaagaatcacaagtcttgtaagtgaatactagactaataactaccatctaaatgcatattattttgcaaaaagattaatatgttcatatcaacggttgaatttgatttgatcgggtcgtttttcggtaccaggttcccaaaaatattcatcaaaggaccgtatggagctccggcacaaaattatcagaagttcgacatcctcttactagttgggctagggattggggcaactccattcataagcattttgaaggacatgttaaaccatctgaaacccggaattcccagaagtgtaagtagtatgaacatttttgtctacatgtttgaggttgaattttgaagtagaacaataataataggtgtctacattttttgaatatttggaaaaataggggcaaaagtacgaaggaagtgtaggaggagagagtataggaggtgatagtgttagtggtggaggaggcaagaagtttcctcaaagagcatattttttttgggtgacaagagaacaagcttcctttgattggttcaagggagttatggatgacatcgcagagtatgataaaaccgtaagtttattgattcatattttactatattttgttttttcataaatggggtttatgaattgctgtaacaaaataatacttttaacaagttctccaaataatgtttaattttattttggcagcatgtaatagaaatgcataactacttaacaagcatgtacgaagctggagatgcaagatctgcccttatcgccatggttcagaaacttcaacatgccaagaacggtgttgatattgtctccgaaagccgggtaagttttagttatttaccaaaaccattatatgagttctccaatttaaatttcggtttaagaacatatataatcattttggagttaacgttaagcactccttaagcagttacaagtatcttaattatattagcactccttaagaagttacaagtattttaattataaactatcctataaaaacgaatcagatacgaacacattttgcaagacctaattggaggaaggttttttctgaattgtcaagcaaacacgaagcttgtcgaataggtaactatatatttaaatagttattgtcaatctttcttttactctgtcaacgttctttattagttcagtatttggtttctaactacaataattcttaccttgtatattttcaggtgtattctactgtggaagtccaacactggttcgaccacttaaagaactctgtcaggagtttagtctcgagtcatccactcgttttactttccacaaggaaaatttttaaacacaattaatattaattaattaaagaaacagattttgattatgctcaatcagattgggagtaaagagtatatgcaggttgtaattagttggtgacataatgtaaagtaattaacgccgtataaaaatgtatagtaacattttgattaacaaaaccctaagtattgtttattttgatccattttgtttttgtatattttttgtgatgagtatttgcttcaattatttttagaactatatataaagtgttgtgaacttgttattgttattttgtctttgtcaaaattcttgaaattaagaaaactctctcatatgcacatacgcttttctaaagtttaccatttttaaatttcgaggttttttcctcctaaatcggataagtttaccattgttagtttagaactattttgttgttgttgttgttaaatgcttaattagaactaattaatctgattacattgttaataaaaagagatggtttcacctcgagcaagtgaaaccatagtgattaagacatatttgaaattaataattggtatgatcgtaagagaaatacttttttttttttcttattaagaaaattacgtaagaaatattttctttgggtgtacttatactctgcttttttctttttgacgttattgaagattggctaatctttggcacttaaggtaaagcatcttaattaatcatcattgatcccttctattcaaaggttaataaaaagaaagttgattatttatatacatatggcttagttctaatgtcgcagtaagattctttggttcctcctaaattatataattggtggatatatacaacacttcctgatataatataggacatggacatacatgatacatttgtacatgcataggcagaacaaatagtataatataatataacaataataatgatcgcgtggctggctaacataacactttctttttaattaacattatcatatggacacatcacacatgcatatatgtcttcacgtggaactcaaaagttttaagagaacttttgtaattatcaccatctttttatattcacctaaaaggtggctagttactgtccgtactaatgtccatatatattcgtataagatacgttctatatatgtatacatacgtgcatacattatagtactatatattgttggagccttaatcagaaatcaagggttggtgtaacaacaatatatgtacatgtgaaaattttaaataagaaaaaacatgtattaatacttcctccaatctaatcaaactcacgtacatgtatgtcttacgcgtatatgtgtgtgtataaagactacactttactacgtagtaattgatatatagtatcaatttaatatgtgtttataacatatatctatttttttaaacatatctatttaagtttaagtttaagtccaataatttcattttactagtaaagatcacaatgtcatttaccgcattcacttaataattgctgaattcacatagtgcctgtaaattaagactaattttaggtttcaaataatttttcttttttacataacttacgatcgatattttaaatggtattggtaagtttaaggtatatagatagtgtgtctaaactagagttcgttgaaattggtctgaggtataaatacctaaaaggttatatatgtttttagtttaatgtaattcgataaattttagtcgaaaccgttaagagatatcagaatttcgttttcaaataatatgggatataattacccgggattaaccgtacctgataaaatatagctctcgtacgtgtcacatgcctaatgcctagttaaacttaaaacgaatatctatatttactgttattgattgtgagttaccaactaaaatattgttaaaagacattgtaaaactacaaatggttcgaactgtatactaatgatgtaaactcgtgtttcatcgttatgtccgatatttttttcattcaaccattattcaatttcaagatttctttattgtctttttttctttctagaaagcctatatatttaattacccactttgcatattcagaggataagttgatacgtacttgttagcaacctgtctagatcatcttttgattgtagatttgactttaaatttctcacaattataaatatgaaaaataacaagcaaagaatttacaaatgtatataattatatacacgcattgatgaataaacatatttagaaaataatgtgttctaaggaaattttgtggcattttttaaaaaataattaaacaaataagaatagtgtaaagttgtttaaatatgtatgtataagtggcatgcctttgaggatacgaacttaaaagggagttaggtaacttgcttgggaaataaaatagccaaccttaatttgaggtttcctcaatgttcttatcaaaaagaataaaaatttcggaaattcccttcatggattttgatatctaaccctaatcgtgaccttctttgatagctacaatctccctctctttgcttattccccaagcaattttagcttacgaatgttttgactaactccacatcggtttatctcttaagttccccacctacaaatatacaaaaaaagaagtaaaataaaaataattattaacaaaccgatgaagtacttatcatttataaacatgcttatgaaatgtattttctaaaacataaccgctaaccagagaagtttcctagagttctgcttcagactcttttggtcgatcaagaagtctccaagagttgtttttgttgggtctaaacaaaacttggccagggaacaaatcaaactatattattaatcttctacatctggtcctaagttccttactatctcatgttaaaatttgaagtctaatatactcaaagctgtcaaagaagcagaacatggaagaggaactgtcatatctgagaaaccaaaattggcaatcttgcatttcatatttagaatctacgccatagtattgagatggaaacaaagagttttcgaagagggtcaaagagtttgacttatctttgacaccactcatacattagctgttcatataatctaacaactagtcaatatcaagtgtctccaaattacggagagtacttctctaccaattatctttttgtttttcataaacattttactaattgttttttctatatctcctgctcaagcaaacacctaactctcctttcctatatatacactaaaggttgaaaacaatgaatccacaatctacagcaaaacataagcgaggcagagtcttcagaaaacttacctgctctaaacaacgcctccgtgtccaagctcacttcaatggcgttacagctactcctagctgtattctcttgtgttcttcttcttcctcaacctgcatttgggattacaaggcattatacgctggaagtatgtgaagattgtttcttctgtgtaaatttcttaaaaaggaatgcagttattgatagaaagtttcgttttcgcagatcaaaatgcagaacgtaacacgtctttgccacacaaagagccttgtttctgtaaacgggcagtttccaggtcctaagcttattgctagagaaggtgaccaggttctgatcaaagtcgttaatcaagtgccaaacaacatctctctccactggtaaacaatcttaaaaccacttgcactatacattaagagcaatgtttgatgactgacagctggctttaatccgtgaaaatctcaggcatgggatccggcaattacgaagtggttgggctgatggtccagcctatataacccaatgtcctattcagacaggacaaagctatgtttacaactataccattgttggtcaacgaggcactctgtggtaccatgctcacatttcatggctaagatcaacagtctatggtccacttatcatccttcccaaacgcggagttccttacccgtttgctaaacctcacaaagaagttcccatgatctttggtaaggatgatgaggaacagaaacagacagagaatctgatgagagtttagaaacataattactgatttttatggttaaatttcaggggagtggttcaacgcagacactgaggcaatcatccgccaagcaacccaaacaggaggtggtcccaatgtctctgatgcttacacgataaacgggcttcctggtccattatacaactgctccgcaaaaggtgatggttgattcctacatctagatttaattatggtttgatgatatatgtccactaatccaagtaatcaatgatgtgaaacagatacattcagactgagagtgaagccaggaaaaacataccttctcaggctaatcaatgctgcacttaatgacgagctctttttcagcatcgcaaatcacacggttacggttgttgaagctgatgcgatctatgttaagccatttgagactgaaaccatcttaattgctcctggtcagaccacaaacgtcctgctgaagactaaatctagttatccgagtgcctccttcttcatgactgctagaccatacgtcacaggtcaaggaacttttgataactctacagttgctggaatcttagaatatgaaccacctaaacagaccaaaggtgctcactcaaggacctctatcaaaaatcttcaactcttcaaaccgatactccctgctctaaacgatacaaattttgctaccaagttcagtaataagctacgcagcctgaacagcaaaaactttccagcaaacgtgcctctgaatgttgatcggaagttcttcttcacagtaggactgggaacaaacccgtgcaatcataagaataaccagacatgccaaggtcctactaacaccacaatgtttgctgcttcaatcagtaacatttcattcacaatgccaacaaaagctctccttcaatctcactattctgggcaatctcatggagtgtattccccaaaattcccatggagtcccattgtcccttttaactacacaggcactccacctaacaatactatggttagtaacgggacaaacttgatggttctaccttataacaccagtgtggagttggtgatgcaagacactagcattcttggcgcagaaagccatcctcttcatcttcatgggttcaacttctttgttgttggccaagggtttgggaatttcgacccgaacaaggatcctagaaacttcaaccttgttgacccaatagagaggaacacagtcggtgtgccatctggtggatgggctgctattcgattccttgcagataacccaggtaagagaaacactaataaaccaacgaaagctttatattagtgtaatctaatcaaggataataaccgagtttacaaatgtttcacaggagtgtggttcatgcactgtcacttggaagtgcataccagttggggtctgaggatggcttggcttgttcttgatggagataaacctgatcagaaacttcttcctcctcctgcagacttgcccaaatgctgagaattctttccccatgattcaagtcctttttctttttgtttcttgtctcttctttcttacaagcttcgcacatttttttcgtttttttcctcggccatttatcggtttgacatgaggtcaattcctgttcaataatttgacatgaggtcaatttctttacaattatttactgttgcacagctctgttttctgcaagtgtagatctatgtaaacccaaaactaatatatatacacaatctaatttgcatgtattgattttatagttatttaatacaatctctgtagcaactagctgttgaagatatacacaaatcgtttgaatcagatggtccatgtaacaatgatacaacacccacatatgacatctacacactgtatatatgtacatatttatgatgaaaattgagtcttgtaaggaataaaaaaaactcaatggttcacatatagacagacagtgcaagaaattttggctatacatccaaaacggttctgtacatttatcccaactttcttagtttaaatttatttttcaaaaatcctaggaatagcccaaagtctaataagaaccataatcacatctgctatacatgggggatcactacgaaaaacccataatctgaagtaatttttggatc

SEQ ID NO: 932 - DNA, 43570 bp, Arabidopsis thaliana
taatgtcttagtaagaaattggattatccttgacaccatttattagctgttcagggtccaacaactggtcaaaacacaaaagaccataatcacagagcttctctaacacttgctttgattttcataaactaataatactatctctggctcatgtttcaaacaaaaacctaccctcgtcttctctatatattccctagggatcaaaatatgcaagagaaagtagacgcaagtttcagtgaagcacctgccaaaccagattgtacaccagttaaccacatgactctttcaaaaattcatggggatgccggtttccacagagttcaaatttttccatgctgtgcgctccttagtcttcctcagcctgcatcaggatttacaagactctaataagctcagagtatggtgaacttacaaatagccttcttatcaataagtatgaatcatgcacagccacttgtcgggtttgaaaatggcttcacttttttggatggaaacaaaagtataagactgatcagtattccacaaaacctcgtaactccaccaacatcgttacctaaaagttgatatcctaatttcagtcctagtcttggtcaatagtttttctattcctctggtttcacactactttttatatctttggcgttctcgagaacttcacatgggataatgtctgtgcaatcaaaatgtttctgttagttcatgaaatagaccaaggaaccaacacattaacagagaaaatcgcatttaagatatacataccggacgatcgaggatcatatgtactcgcacaagttgagttgaacaggacgtggaaatccttcttccttgatacaggaaacgtccaatacgttcaagcaccagactttcaagtgcctacacaaatattgagcttacatataacatttctagtttattccgcaacttcggcgagtagattagagtgaatggtaacgcttcaagcactccaaaactttgcattcaatcatattcaaaatgtagtaaaggataaaaaaaagggttgcatcactctaccaaaacaacaaaaacttcaatgcaaataccataaaactttaacaagagagttccaaatatgaaatccttctcaatcttaattgtcaccaagtaacatcttcaactacacatacccaaaaatttgaaagatttcttagtttcaactacaaaaatttctcaaaccttcagctaaaaccccgaattaaccaacttcaatcatcaatctccttcagtttcctctttttcttgctcttcctctcctctgaacccatctcttcatcactctttctctttttcttactcttcctctcctctgaaacgatctcttcatcactcttcctcttcttcttcttctccttttttctctctccactcctttgctcgtcttccaacttctccttctccttctcatcaacaacatcttcgtctttgttcttctttttctcctttatctctgcgctcttttgctcgtcttctaacttctccttctcatcaacaacatcttcgtcgttgttcttcttgctcttcttcttctttcgctcctttctatctgcgctcttttgctcgtcttctaacttctccttcaccttctcatcaacaacatcttcgtctttgttgttcttcttcttcttcttctccttctttctctcccttcgctcttcgctcctttgctctgcttccaacttctcgttcaccttctcatcaacaacatctgcgtctttgctcttcttcatctttttctcatcacgttccctaccataaactgattccacactcacagcttcactattccggtaacgaatcttccgaccgtcgaattcgtcaatgacattccgctcactctttgcatcggagctttgcttcgtctccgttgatttagtctccctatcggagcttggcttcgtctcctttgatttaatctccctgtggaaactctttaattcagtgaaggcagcggaggctcgccggaggtacgcactaacgtcttgagaggcgccattatcagaggaagcgaatccagagagaagcttagccgcctttgagagggagattggttcagcactaacaactcttccggtgacagtcttcatcggaagaagctcgaaaggtcgtcgcgcctctctaactacacaaattagggcaatttcccctaaaagctgacaactttcgaaataagtagaaaacacaactacgaaagtaccccttgcttgtttttttttttctcacaagtgaacatatcatagatgggccaacaaagcccaaaaataaaaaaaagcccaaacagacaaacaaagcccttccctgttttccttttgtttttaaaggatattaaatataaaaaaactcaagagattatagttatataaaatatctcgtgacctaattaatgttaagaatatatagctccgtggcaaagtgttctacgtcaaccagcctaaggtcacgagttcgattaccaaggctaggttttttgtttttttttctttgtttttgctctctccttggatcatccatctctatctcccgcctgttacttagctctgctgcttcttcttaaaccctaaacccaccttccttcaccgtcgtctttttcaccgtaagttgattcttcgatcggtctcgattttactgtgttttttttgtttctcttacgccgattcaaaacttaagtcgtttttttttttctgggtaattttttttgtagcttttgtttgtagagatggagacgaagatggaaattgaattcactaagaagccctacatcgaagatgttggtcctcttaaaatgtatgttctttcagttttttctgctcaagttaaaccattggttctattgatataatttttctcaagtacgctccttttagcagctggatcatactcattgtgcataaaatttgtttctttttgctaatgtataatttatttgttccaagctctgaaatttggatttgggtgtctgaactcttttgtcaactagatgacatattctctgctaaatgctttcaagagtcttagtttatgtctgtctgtagattttcttgatacaatggatattgtgtgccttagggcgttgttcatgaatctctgatttgattttatagtttttgagattttgatattgtggagcaaaacttgtttgtcagtttttgttgtttttcctggtgggatttttgacactactattatctctgcagaaaaagcataaacttctctgtgctttctgatcttgaggtcatgaaagccgctgaagttcaagtctggaacatcggtttatacgaccacagttttaaaccctatgaaaacggcttgttggatcctcgaatggtatccgattttcttatatacacctactatcttttggtttaacttctcttatgccaataaccatggcaagtattgtatgtcatgtttttgcctcctgcagttatttgcatcagtatatgtgattctaaacattctatactccaagatatttttttcattgtaagaagataagtactaaatggtttgttcattatgattttgcagggtcctccaaacaaaaagtctatatgcacaacctgtgaaggaaacttccaaaattgtccgggacactatggatatctgaagcttgacctcccagtttacaacgttggatactttaattttatccttgatattttgaagtgcatttgtaaggtaacagagttagcagattatgtctctctagtttctgttctatgttctgtttgttgacccttttacatttgttgaatggagaaagtggagaaaaatacagcataaaaaatatttcttgggaagatgcctttcaaaaaaaaaaactggctggttatattgatgtctttgtagcatcaatagtacttcacaaatattgtttttttcttcccacagcgctgttccaacatgcttttagatgagaaattgtatgaagatcacttgaggaagatgcggaatcccagaatggagccattgaagaagacagaattggcaaaagccgttgtcaagaagtgcagtacgatggcgagccagagaattataacgtgcaaaaaatgtggctacctgaatggtataattttgaactgttttttggcttaaactatttagattcgatgatgcttttttgaagttaataatttataaccttgattttttttctcattcctcatgcgtttcatcttaggtgcaaaatttagctcgtagaacattctaataagtttcttaagtagcacaagcagaaaattggggtttttgggaattctaatatctaatgccaaaatcctttaacctctgttgttattggttaatctgaacttatgttatattcttcttcccacccaattcgttttgatatcgtggtaatggttaatctattgataatttcagggatggtaaaaaagattgcagcgcagtttggtataggcatcagtcatgaccgatctaaaatccatggtggagagattgatgaatgtaaatctgcaatatcccacacaaagcagtctactgcagcaataaatcctcttacctatgttcttgatcctaacttggtgctcgggctttttaaaagaatgagtgacaaggtatatttgagtttttatctataatgcacatctttttctacatagcttcctgcgttatgttctcttgctctcagaacatgtgcattggtataaaaggattttcttatttactaataattcagtcatgctgattcttattatttttcctttttctttcggaaatcgataacaggactgcgaacttctttatattgcctatagacctgagaatcttatcataacgtgcatgcttgtgccacctttatccatccgaccgtctgttatgattggtggtattcaaaggttagctatcgttttgtttatctttctcatgtcaattatattttctactgctgaatttttcttgaaagaatgtattttcttgctgcagcaatgaaaacgacttaacagcgcgattaaagcaaatcattctaggcaatgcttctcttcataaaattttaagtcaacctacctcatcccccaaaaacatggtacaaggagtttctattacatcaatgcgtccctgttatatttgtgaatttatgcattctgtactgtaatgtgtttgtctctatttttgttgaatcttacttcaaaatgattttttggtttacgtttttattccaattttctgttatgactatatctggttctgttattatcttctttcttatttgttgagttttttttttgttttagcaagtatgggatacagttcaaatcgaggttgcaagatacattaacagtgaagtccgtggttgtcaaaaccagccagaagagcatccactgtctggaattcttcagcgtctcaaaggaaaagggggacgtttccgtgcaaacttgtcggggaagcgtgtcgagttcactggtagaactgtaatttcacctgatcccaatctgaaaattacagaggtaacttaccttaagtggtggttaattgttgctttttgttatttatatttttggtgtaacttatcacaaaggtaactaaacttttcaggtaggaattccaatccttatggctcagatcctaacttttcctgaatgtgtttctcgtcataatattgagaagttgaggcaatgtgtccgtaatggccctaataaataccctggtgccagaaatgtcagatatccagatggttcttcaaggtaatgtcagtaatgttgttctattaaactgaagaaaacttaatatacctacgtagctagttttcgcagtcaaaatgatcttgagtttcagtaaaattatgtgcacttgcaaatttatgttgactcgtatataggtttggttcatggtatagacacacacaaacaggtaatttacataggtagaaatgaaaacgtgcaagtaacaaatcaaaccactgcgatttgtttcaagaatataggtaaacactattgctgaactgaagtagatacctaataggctaataccactgaaggactgcgtagtcctcatagggtcattggcatgtgtttggctgtttgaccatcatatggggacattaacacatttcatttcaggactttggttggtgattatcgcaagcgtattgctgatgaactggccattggctgcatagttgaccgccatttgcaagaaggagatgttgttctttttaacaggcaaccgagtctgcatcggatgtctatcatgtgtcacagggtcagtactggtttataatgcttagtcataattttctcttgccctcatagcaatcctaattttacatatgttgtcccataggcaagaataatgccttggagaacgttgaggttcaacgaatcggtttgtaacccatataatgctgattttgatggtgatgagatgaacatgcacgtaccacaaacagaggaggctcggacagaggctattacattgatgggggtaccttctcttttacttagcatcatatgaagtttcttgggaatagtcaattatacgttgacaacatttaacactctatatgctcatagtaatgcacacatacatacataagtaccagatgatgacgagatggagtcttgcctaacaaatttcaccatattttcaactgaaccattaggctttcctaagcaatttaaaagatctagattctggaggtgaggatttgatgagtttaaagtgttagaaaaaattcatttgtaatgtgtatatgaacgatctcaatggacagaaaggatgatagagtaaaagcgaggaaattgtttcatctaagctgtgtttgttatatgagctgttggttcttggtctgtttaactgttaatactaattatctgggtgttaatttttccctctgggtgataattgacttctcccttggttggtatctcaggtacaaaacaatttatgcaccccaaaaaatggagaaattttagtagcatcaacgcaggactttttgacatcttcttttttgataacgagaaaggacacattttatgaccgtgcagccttttcacttatatgttcttacatgggagatgggatggattccatagatttgccaacacccacaatccttaaggtatgagatttttacctctgtagttcatcacaactgacttcagagtgttaaatagcaacagcttgttctgttggtgtcaactatcttatatatatttttctgtgcgtgtgttaatttctcattagctttttgctgccctatttcttctggtaatctggcgtcattgattctgaaattgagcgataatagttgggttgtatgacattgtacattattttctttagtcaatgagttcaaacttcaaattctgttagttattgatattttaatctgcgtgggcaaataagttggggacactgggaattcttctgccatttttagcactttctttcctttctattgaatttcttatccagattctatatttttgatgcagccaatagagctttggactggtaaacagatctttagtgttttgctgcgtccaaatgcaagtattagagtctacgtaactcttaatgtgaaagagaagaacttcaagaagggagagcatggtttcgatgaaacaatgtgcataaatgatggatgggtttattttcgaaacagtgagctaatatcaggacagttggggaaggctacgttaggtaagttcaacatggtatgcaatatgtagcaaatgcagcagatagctgttcattctggaacttttctatattttgagcactcgatatttttcctctaggaaatggaaacaaggatggattatattctattcttctaagagattacaactcccatgctgctgcagtctgcatgaatcggctagcaaaattgaggtgagttcatctcttttgactaatttttccttgatctcgcagcaattgcaatttttgtcttgctcattcgtttttctgcttcatgtctataagaattgcaaaagttctccgttcgtgctttgtatgtactgtgttttctatgacctttctctgctatctaacattgctgcatcgagtaaatgcatagttttcttgtctaacaggtagctttttatcttattttgcgcagtgctcggtggattggtatccatggcttctctattggaattgatgacgttcaacctggtgaagagttgagtaaggaaagaaaagacagcatccagtttggatatgaccagtgccatcgcaaaattgaggaatttaatagaggaaatttgcaacttaaagctggtctagatggtgcaaaatccttagaagctgaaataacagggattctcaatacaattcgagaagccactgggaaggtaaatacgcagcttctattttgagttagtaaattcatgttctaaggtacatatgtgatttaatttactaagatacgtgtatgggctaaggtgacgctttgatttgcagtcatttttttttactatttgtttgccttgtcgttccattagtatcttgtttcaaaggtgagttataaattgttccaagatgagtaaggagtaaaaaatctatattgaaggagtatctttgataatttatctactttattcaaaagacaatgaatccagatcctggttacctaccaaaatactaaagcttcatcttgtcattatatgatatacaggcctgtatgagcggattacattggagaaatagtcccttgatcatgtcacaatgtggttccaaaggatctcctatcaatatcagtcagatggtcgcatgtgttggtcagcagacagttaatggtcaccgtgctcctgatggatttatagatcgaagtcttcctcatttccctaggatgtccaaatcacctgcagtaagtaaacggcttgccaaccactccaccaatttctgatatatttctgttaagtttttgtgctattttcatatctcttgcgttgaaaattttcttaagctatttgttggaggtgtctctagaacaagtagaaccatttactcgcctctgaataatttgtagtaggcttcttgggcatcaccttatgggatcctgattacactaacttctggttactactttgagagctaggaccctgatctcatgtcttcttgccatcgcaggcgaaaggttttgttgctaattcgttctacagtggtcttactgccacagaatttttctttcacactatgggtggacgagaaggtctagttgatacagcggtatgcattaatccttttctttttttccatcctggtccattgtgaattatgaaaaagttgttcatagaaagagactgccatgatggttctctgaattgtgacagtgtttgaacatctggactgaagatggtcttcaccttgttgtaacttgtaacgatattcttgtctattgcaggtgaaaactgcaagtacaggttacatgtctcgtagactgatgaaagccttggaggatctattagtccattatgataacacagtgagaaatgccagcggatgtatacttcaatttacttatggggatgatggaatggacccagcactaatggaaggaaaggatggagctcctttaaattttaatagattatttctgaaagttcaggtgcttttttcgacttttgtatattggttttggtctctctttatttagagttttgtcacaatcggtacttgcattttgcaggccacatgtcctcctcgatctcaccacacatatctttcttcagaagaattgtcgcaaaagtttgaagaggaattagtcagacatgataaaagtcgggtttgcactgatgcctttgtgaaatctcttcgagaatttgtttccttgctcggagtgaagtctgcaagcccgccccaggttttatataaagcatctggtgtgactgataagcaactcgaggtgactctctttgtcttccttttttggagaagaaaaatactcggtgcatcatgcatctcagtatttttttgtgccgttccttgattatatatattgttagctacatccagttaacgaaaaattatcacacctagtctctcccgtggatatttctataatttggagaaattttcccatttcttgtggtgttaggacaaaaatatgaaatattacctctgatatatataaatatgcaggtatttgtaaaaatttgtgtatttcgctaccgggaaaaaaaaattgaggctgggactgcaattgggacaataggagctcagagtattggagaacctgggacacaaatgactttgaaaacttttcactttgctggagttgcgagcatgagtatccttgttgaaaatgcctattttctgaatttcgctataaaactagtgcttatacatatgagtagttggttgttttgatttcctgattctggttcagatatcacacaaggagtcccccgaatcaatgaaatcatcaatgcttccaaaaatataagcacgcctgtcatctctgcagaacttgagaaccccctggaattgactagtgcacgatgggtgaaaggacgcattgagaaaactactttaggacaggttctcttttcctctacattttgatctgaattatattacatatccagtatttgattgtcgccgctgcttgttttaagtccataatgtggatagccttttataaatatcaactattggatcgttggttcagcaccttcttgttagatactctttctgtttatcattgtttttaccaatcatgttgtcgaaatccacttgaattatggaccaggttgctgagagtatcgaggtgctaatgacttcaacatcagcgtcagtgaggataattcttgacaataaaataatcgaggaggcatgtttatctataaccccctggtcggtaaaaaattccatcctaaagacccccagaatcaaactcaacgataatgtaaggtccttagatattgttgatgtattcattgtggtgcactcagatcttaagtctctttgcaatgtaacttttgcaggatattagggttttagatacgggtttggatattactcccgtggtggataaaagtagggctcatttcaatctccacaatctgaagaatgtgctgccaaatattatagtgaatgtgatattcgttaaacctctctcttacatatatatccaaaaattctacgactgtttcctaattttgtttcttttagtacaatgtctctttcactgactgagaaaattcattctgttgaattgtcatgataggggatcaaaacagttgagcgagttgttgtcgcagaggatatggataaaagtaaacagatagatgggaagacaaagtggaaactgtttgtggaggggtaagttttctcgagcttcaagagatttgattttcctctgttcttttgtccttcctataagtgctagctaagctgataattccatgtcctcgttgggcatggtttgttatggtgaatccttgatttagttcattaagcagtctttgtttctgtttctggtaagccactgatatgaattcagtatttcacgtgcttaaaccaaacttttaaacaaaacaaaacgctttctagaaacatatacatgtccggtttgaaattcttatttaagattatgaatatttagcttgatatatgtttcagcacaaacctcctggcagttatggggacaccgggaatcaatgggagaactactacaagtaacaatgttgtcgaagtaagcaaaacacttggaatcgaggctgcaaggacaacgattattgatgaaatagggacagttatgggaaaccatggtatgagtatagacatccgtcacatgatgcttttggctgatgtcatgacttacagggtcagttctaacttctaaggactcttgaatctgttattattatcgctactaataactttattgcaatacagtcatgttaatgattaaatgttacttcaatttcttgatcagggggaggttctcggaatacaaagaaccgggattcagaagatggataaaagtgttctgatgcaggcatcttttgagaggactggagatcatttatttagtgcagcagctagcggaaaagttgataacatagagggagttacagaatgtgtgattatgggcataccaatgaagctcggaaccgggatactcaaagtccttcaaaggtcagatttcattcctctctgttttttggggttgaggttgtgacttttgcttatgacattactcgagttgtctgatagacatgcgagatctcatcttgttcaatgagccttttttatatagaaaaaaatgtaaacgttaaacatatgcttaagataccaactaccattattagttcaatttgttccattaatctcgtctgtaaactaactctgtggttaatcttgatctacaggaccgatgatttgcccaagttgaaatatggacctgatccaatcatctcttgaaaagacagaaacaaaggttcacatgccgaatatatatagatgacaagcaacgcaagatcagtgcagatgcaaccaaattcttgggttctataattcaaccacccaatttgcatactgaaggctaagcaaaggcctggtgacaatctgccaatttcgatagccccgtataggatactgcagcaagcatagtttagattcaaactcgaattttcttttttgtctacaaaggggaaagattgtttgccctgagtttattttcttctttctgttctgatcactgttttagacaatatttatcttttgaaccttggtatctcattgaaattcacaagtagtaacagtttaccaaaagtaagaaaacaaagatttgtcattttgagggtctacaatcttattctatattgagttagtcaatagagtgtaatctgcagccgaggctcatcgggctctgtcaagacctgtcttatgaaagctcttctccaccacacctcaaatgctcgttgcacatttggacaatcatcacctttgctcagaaaccgatcaaaccatttcatcagaatcacttgttgttgtctcaacgacaaagtcaatatggtctggctgagtccatcctccaccagtttcctatccagagatctcgaggataaccgtctcatccacccgaaatcatcatacaaagcctctaaccatgtattcagaaccgcaaacctagtctcccgattcaccaagatccttcctttaccaataccaacacatatctgcgcggtgatcttgcttatttcgtgtctgtacatcgttgggatcttggaatgaagattcgctagctccttttgatccgcccatagtttcacaaactcactgcacagtttcttctcaatcaatatatctaccatccacagcatgttatcagcttctctggcgatttctcccatcagagcaccacggtctttccccggatcattcatctgtgtggtcacttcagataagcaaagcacaagagacgtgagacatcgatggcacaaaccatagagtgtgtctctagagacatcataatcggcttcttctctaaccaatttaaagatcaaaactttcatctctcgccgagctttatcatctttcgcttgtagaacaccagtgagaagcttcgaaaagatatcatcagttctagttctcgttgaggaagtcgaaggttgagatgaaactctctgaagaatcaaagtgacagaatcatcaggaagatgaagctcttcaagacaagtcacaacagtctcttcttcatcttctgaccatggtacagcttccaaatgctccaaacatgacataacgccttcatcaaacgagatagctgcagaaacctagccgagaaaatgagattcacacattaacaccatcacaaaatcaaagcaaaacaaaccaataacacagttggacaatatataccttgagtaaagccaagattttgatgacattttcaccgatcaacttcttcttgagatcatcactatacatcaaaacaacagtctctacataaatctctaaatcatcacactcacttatctccaccatgtgagaaactcctttctctcttctagaattcatcttctccataaaaaacctactcttctcagataaaaccttccgatgaacatccatagtgactctgtaaccgtctttgcccaccacagtcagcttaacgtctcctggcccgaggctgtggccgtaaacgacgccgttcttgaactccgtcaagatttgagccacgcgcgcgtgagatttcctccttggtagctcgcggttgtgctcgtctgacatcatatcgaaaagagtcgggtttgagagagtcgattcgtttggtggcggaggaggtggcggaggaagaggaggagaggcggtggagagtttaatcggagatgagattcttgacggagaaaaagagagagaagggtctgcgataaacccttgtttgatcatcgttgatacttctcttgacgccattgaagaagtaaaaattctcaaaactttctcgagagcaaaaaaaaagaaaactttatgattgtaagagaatttccgcgggaaaattagcgaagtttcttcttactggaaatctcaaaaacagacaagaagcttcaacttaagaagaactttaagagaagacaagaaattgtgggaatttgtttcctttcttgggaaaataaaagagagtggacaaagatgcagatttccccacacaagaagaaatgaaactgtgggagaatcagaatccaagaaaatgaaaggactttggatctgtgaatataaaactacaattgcaatggacagtgagagaaaaatgaagacttgtttttttatatatcctttacagatagattgatcattgcctttgcctccataggttctctaaactttcacaaagaaattagacttattggtccttccggtttgattttttgttgatcggatcagtccggtctagcccgagcaagaaccggtttaaaagtatttccatttgagtggggtacacatggatttgaaagctgatggacaaatatatataaattagattttaacccgcggtataccgcgggacgatttatttttttaaagtaatatatattaaaatttacaaattttatttttataaaatatttatattttacagttaataattgttattaagtaacgctataacacgaatccatgagacaattgttaaaaaactgaagttgtaacccctattaaaacagcatattaataatattttaaaattttataaatattgattcaaatacatccaccatataacccaattcctaaataaaacatgttctataatttctttatccgtcccgtgatttttttttaaagtagtaatttttaaaatttaagaattattttttatatataaaagttttgcaaattgtatcattctctaatacatttatattttatagtttaatttcatatatagtaacattatacataccatataacatttttggttttatataatcttttctaaattaggatgatttgatatgtttaatattagtagtcttacaaaataataaattaaagatttaacccgtattgaaacggtggattaattatatttattttttattaatgttgattcaaaaacccgtcactccaaatccgtcttgccaaaaagctatttatttaattaatattaattttattaatgatatgactctgaactataatctaaacattttagctaataatataggagtacaccatatttatttaatagagaaatgtaccatgtgacccgaatgcacttttacccaaatccaccaaaaaagtcttgcaaaaatactatagagataagaaacgatagtcggttttgataggtataagattagcaaatatattagttagcttaaattagttaaagaatacaaattgaaaaggtatattacactttattcgaatatagtatcaaaacttatataacacagagatttgataattttttaattgttgaatacttttttgtgctaatttttatgtgattaagattaattgattttgtatataaaatattaaattgttttacgaacttatttgtttatactttggtaacagatagatatttgagtattaagtatattttgcttaagtttaggaaatctttgatgacccgtctttagatccaataagtcctataatctagatatgaacatgcagtataccgcatgtaggcttatattttagttaaactaaaaacttttattgtaaagatgatttaaaaatatatgatattattttatttgattttaaatgtataataaactgtgagttgtatatgttttgttgatattatctatattgtttagtgtttaagattatacacttgtagtttgattgttaatttaagggtttcacctgtagtataccatcttgtattaatatcgatctaaacccgtcaattctaagattttccagcttgtattaaaaattgaatcacatcatacacataaaaaaatctaatatattattaattattatagtatataagattataaattttcaatataatatgtatgaaattgaatataaatatttcaaattatgacccgttactcagtagaaagttttcttaaatctatttttcactctttataatattttttcatgtattgaacagtttatattcgttttttaaaaattcaaattatggcatatgcgaaaaaactctaattatttttttatagtgatgatattattttttcgcaaaaatagaatcatagtgagaagtgaactataataattaataaaaacttaatataataatttagatataaaatctaatttgttgatttcaatagattacttttttggaaattaataatgtatttcgtttttctaattaaattaaactaactaaaatttagatagcaaatcttaatatgttgattttgattggttattatttttgaaaattaataatgtatttcgttttttaattaaatttaattaattaaattaatatttgactttttaatccttaaagagataaattaatttactctttaaaattttatttttaatggcatacctatgtaattacttacaaaaattaatgttttatttttaatgtacttcccaagtaggatcatctgttcatgtacattagaattatgcgtttgatcaaagcatattcacttggattttatctcttggatcttgagaatcaactaaaaaattttgtccgtttgtcgtctatattggtaagttttcaataaaatttacgtacatattcaatatgaagctcaaacttgttctaccaccgactacataatgtcaattttcgaaaattttctaaatgatatggaaaaaaaacataacaaaaaaagatgttgtagatgttgtgagtgggaaggcaatagtggcccaaagcattaaacgtctatggtaaagcaatgtgacaagaggctataagattttctttcaatcaataaaatttatttctccaattgaaaaagtttggttacctctctctcatggcaaatctacctttagatgttgtgatcatgaatatatgaaatagcaattaatacacatcattgtttataatataaagagagaatagaatcacatttacacattcattaactttgtattccatttgttcttggatattaaacatagtactactgtatacaacaactttctttcatttaaatgttaatgcagtttagtttcaagtcaaaagaatgtcttaaaacgtttgggccattagaattcatggatttggatatagaggattaatttagaactgaaccatagaatttgaggcccaaataattttatgggccaaaataattgggctttatagaaaacacaaaatcaccctgcatatccacgttgaagacaccatcaccgtcgctgcaaatccctctgcttcttcctccattcctataatcactatagaatatgaaacctccggctaaatctccggccggattctgaacggagaaagaacagtcatctccaataaacagagcaacatctcctaagtctctcacttcttcccatctcttctcttctctcttcagattataaactctaaactcaaccacagatttcgaaatatccgatttgcaccaaacggttttcacgtatttgtccacaagaaacacttctccgccggaacattccactagatgtttcttgtgacctcctcctccgaccaaaccttcagccaaatccgaaaccttgaaatccacatcgtaaattacggttttgcccttatcatctacaacgatgcaacgattgtctttgtataacattatgtcctcgtaaatcacattccatgaattatccaaaattttccatttttcatcgtttccactcttcaaaaaccctaatttcccaccactgtgaatcgcaattatcgccgagtcttcccctgaagacaaaatcacaactttgtcggaatgcagagaccagaaacaaggcactgcaccaccaccattgtttgcgtactccatacgataagttctacgaaccaatctcacatgaaactcctgcaagtcgatctttgacgggaaattctcaggtaagaaacagattctgtcgtttgagaatagatccaagactcgcataatccctggagttgtctcttgaagcttaaccagacaagttctcggattcaaaggagcttcaagtttatagacattgctttgtttcagagtgaagaaaccagaggatgaagaagaagatgaccaaaaaggaagatactttgggaatttagacaaacggttgtttttgttggagagaggaagagagagacgccaagtggcacatacagagcggagacagaggagatgaatggtgtctgatgagtcgtggtcaagacgatcggagatcaactcaagaatatctaaaggaagatcagaccattgagaaggaagaagagaagaagaatccatggaagatgacaaaagtgagggattctgttcttcttgggtttaggaattttggatcatgtaacttgtactatatataaatgtctacataatgtcgttatgattcatctttgatgttgagcttaaaataatttggaagttatccgcggataagaaaattgaatatgatatcattgtgtattgctagacgccaatatttcatatatcaaattgatacatttattttagtatattactatatatggttgtctttgtggtttatatgttgcatgatgtctatttaaacatatattagtggtaagtagaccatgctttttgcaaatgttaagatatattatattgttatttacaacattaccaacaacaaaaaaatattgttattttcaatgtaccattgaccaaccatatatagtaatatactaaaaatgtatcaatttgatatcttaaatattggcgtctagcaatacacaatgatatcatattcaattttcttatccgcagataacatccaaattattttaagttcaacactaatttaaaacgttgcatcattataatcataaagtttaacggcctcataaaacattaatggaagaaaaaacaatttttcacgattactcttcgttaacttcttccacacgttagggtctctactttctacatctttaaaagctctttcaaggacaaaacttgacacatactctttgtctctaaatcactaaatagcatacattctcttagttaaaatcccagaaaattccaataaacctgattgtctcgatcttgccatcgactcttttctcgactttctaacattcgaagcctcgattcgatgcataatgacccaataacacatggtcccaagcgtcgtgagcattatcgttgcaccaaacaccgtcacgccaaccgctagccaccgctcttcttcaccaaccaccacaaacgctaacgccaaaaatgccacagatatcaaaacgcaagctaaccacatcaacttgtttatcacagccatcatattcttctttgccttgtgttcaatcgcaaccactgaagtctgaaccaccacaaccgctaaagatataaaaagagcgattgaatcgaatatgaagaagatcgcaaacgcgggtctatccgcgatgttcgcttctccgagagattgtcccggtaagagcgaactcaattcgtctgcatattgccccgggacagtgaaaatggcggcgaaagcgacggttgcaattagaaccgccacgactgtggttgagttaatcgcattgtcaagaccttctacgtgcattttgttaatgcgtttggcgattccttgaacgcgttttcttgtctctcgagcgtgttctagctggtgatgaacttcatgtttgatgtcgctcaccgtttgtttgagctcacgcgccgcgtttggcctagtagtgttgttgatagctttagccgagggaacgccgcgggttttgagaaccgcggcgatctgaggatggccggttttctcagccgtgtcaagcggcgtttctcctgctctgtttatcgcttttgtgcttgggcttgtctcgttgttatctagaagtaattccactatctgcaatcacattaaaatctctctaagttacaatatcaaatatttatccaattatactcattacatttaatttgcaacatataaatttcgttaaatgtcaaaaacgtaatgtttacgtttgcatgtacattttatatacaaaagtaatttttatgttttaccgtttaaaaatagtaaaattttcatttgaaaacaaaaattattggagatgattaacgaaccttaatgcgacctttcctagtagcaacatgtaacgcagtgttccctttagaatcagccatattcaacgaagaccgatgtcccttcattaactcaaccaccacatcaatgctttgtcctttcaccgccatgtgaagtggcgtctgaccctttttatcagtcctcgttgccgtgtccggttccaccgccacaatcgcttttaccacttccgcgtgaccattcctagccgccgagtgcaatgctgttttcccgttgctttttgcgatcgcggctaggctactccctgctgcttctagtagatactctacgacctctacgtgtccctgagctgccgccgtgtgtagagccgtcgtgtttgataagtccaccgtcattgatagctccggatgttcttccattagtactctcaaaacatctataaaaatagatttcaaatttcatcaatgtatcacacatgtaaataaatatagaatattatcatcagtttttctttaattctttccattcaattctttaaatcaaccaaagattaacactttaaccatattttcgtgtaattttttcttcccaattcttaagaacaaacaaagataggtagttttaagttcagttcttaatatcaagcaaacattgaaattttcatcattttggatagaagaaaaccgacaaaattcatacctaattcgccttgtttagcagcaatgtggaaaggatcgaacccatttctagctttggtctcagcgtcttcaagatcatagtacttgatgagctctgcaaccacgtccgcatcaccatattctgccgccacataaagagcggtctcaccgcattggttctgtttccgcaacaaatctcttagttcatcttctgattccatatgattactcaaaatctctttcaccgcagagaaatctccgcgtctcacagccgaaaggagctgcgaatcttcgcgtttcccggtgaattgcttcgccattgtctttttaacaacggttggttttgcagccattggtgctggtgtcgatgttgatgcttcctccattatatcaacgcaggtagttacaaatagattcaataccaacaaatgactcctatatcaaatgggatcaaaaacaacatgaatttttgaatgttaacgctaatagtctacttaaaacaattaaagagacgtggatctaaagataacctaacaaggtaaagcttcttgttcgtttataatatgatcaagagtcaaagatctttcacaagatgtcttgtaaagttgaagaatcatccatctgatcctatttgatttggtggcttctcgtggaactcgaatccaagccaatgcatcgggaaaccagaaagattgtttttgaaagacgtaggatctaagaaaattccaaaggtaagaacttttctgttctgttttttcctctccctcatcttctctcctattttaagaaagtttagtaacagagaaatgaagacaaaagatctcagtcgttgattaacaactattgcacagatggcattgtctcaaaacgttcacaccttgatgttgcttgtctcaaatcatagaagcattaacaaaaccaaccgttacaaaaaatatgtttctgaaaaaccaaacaccaaaaaaaagcctacatcaaaccgcctgattagacttcttatttcgaagtcgaaatcctctctttcaccaggggctcctttgggaccgggaaagctgcagcttcacgaaccatcgtttccacaaaatccatggcaggccgttcaagtgcctgtgggtttatacacatcctcgcagtttgaagtagtctgtttaaaccttcaattgaatacttattaccgagcgcaacatcaactatcataggcgcatactccaatctagtccatactggcattaactgcaaaaaaaaaatactttcgtgagaccctaaattaatacattacttacagagcacgaaacgtataaaaacaaaacttagatacaaagtttgagtcttacccaatcagtgagtttctctttcgcaacaggtctcgccagatcataggctttccttccagttaaaagcactaacagaagaactccatagctatagatatcggacttagtcgaaaccaacgcgaactcatctgcttccggtgctatgtatccttgagttccacgcgtattgaactccctcagcctctcaacaccatcactattgtaaacgatcttagtcgcaaatccaaaatcagtcagcttcggcacaaaatccttgtcaagtaaaatgttttcgactttgatatctctgtgaatcgcataaagcccctggtgtacataaacaagaccttcggctacaccaacagcaattctcaacctcgtgttccaatccaaaaccctagttggcagagtaagaccctgaacctgcctcgcgtgagctacagaaagagaaagagttaacataactggaattggtatagaactaaaacagagttttgattaccaaagagatggtggtcaagagagccattaggcatgaattcgtagactaggacacttttttccatcccataatatttgccgacaagtttaatcacatttgggtgatcagctgcatataacgttgtagtctctgctacggtctcactaagaccatctgtgataccattactatgaatctttgcagctccaacctaattacaccaaagttgctaaatttagtaattgagtttcggatgttaactaaaaagaacaagacttttgggtttataccttgtgaccttctgggaacttgcagcgatagactttgccgtaggttccttggccgatcaaatgtgttatcgcgaagttatcggttccctctacgacatcattccatcgaaatttaactatagaactcggatctgtaaatgaattactaaaagttaagaaagaaataaagataaccacgaacaagaaccctaaatcaacttcacaagatctaaagaaagaaagataaacgaagaacaagaaccctaaatcaatttcacaaatatacaaacatgaagaactctactactttcactcgcagcaatgtgacgataaaaaccagatcaaaactacttgtaattccaaaagaagtaaactcttcaaacagatttgcttgtacttctctaaaaccagagtttcttgtgaaacaagaaatcaaaaaacgagaaattgacgatcgtcatttccataaaaattattgagatacgcattatcccaaattcaccttcgtcgtcagcttcgtcgtcaccttcactttgttgtcccggtgtatccgatgaatccgacgaatccgatggttgttgttgttgcggtagttccgatggatcttgcattactttacttgagcctccgcctcctaaacagcataagaaacgattactcatcgcagcgaatcaacgaagataaatctttcgtgagactttttttctttggattttcccgagaaactttttcccggaaaatgtaattagatagagagagactatctccgagaaaactagagcgagaaagagtgagagatagagagtcgaaagaataacactgaaaagaactcgccgaaggatatatatttatgcgctctaacttctatgcgtcattttttgtattattataaaattatataatacacaaattagattcgaaggaaaaaaaacaattttgaataattattaataaacgaatcaaaattcagagtaaatgaatgtttgtagaacataaatactatatagcaagtacaatgtgacaacaaaaaatgaaaaaaaaaatagcaagtacaatattatatctgaagaaatacgacacttacacaagttttacgtactaatactcatggcaataatctttatagaatttattatcaagataaatgaaaagaaaaattactaaaacagctatatccagtgaatccaaattaaaggccattgaagagaatctcatgttagagagacaatgccactttgcgaaacaatctttttgttcctcagattttctaagtgattctttcttttatgccaaatttgttgctcaaatgtagtcactactcagacactcgtttcctgatttagaatcatccctctttaaagcaaaattactccatgtttaaggcgataacttgtgtcccaagaaacagagagcatatgcttgtttagagctaccatatataaaaagcttctcatggtatatatgatcaagagtcatgacctttcacaacttgactagtatagttgcagaatcatcgatccaatagaaatgattcttgcaccggaaacgaaagagataaatttgagcatctaacaaaattccaataagaacatttatgctctgcttttttcctctcctctcctattttaagaagtttccataacagagaatgaaaagaaaagatctcgagctgttgattaacaaaaccatctcaaaaagttcacaacctaacctgacctcgtctcaaaaacatctcaaaaagtaacaaaaccatccgttacacaaccaagtttctgaaaaaccaaacaccaaagaaaaaaaagaagccctacgtaaaaccgcctgagaaaacttcttatgttgaagccgaacgcctccttgtcacctggcgcggcacttggaccgggaaagctgcagcttcgagaaccatcgcttccacttcactcatggtaggccgttcaagtctctctgcctttatacacatcctcgcagtatcaaatatcttctttaaaccttcaaccgagtacctattaccgagcgcaacatcagctttcacaggcgcatcctcgatcctatcccatactctcaaaaactgcaaaaaaataagaacatccaaacaaaactcagctaatctactaacttccataacacgaaacgtgtaaaaggttcctagatacaaaagttttagtcatacccaatcagtgagattctttttcccagcaggattatccgaataaaaaggtttccttccggtgaaaagcactaacagaaaagctccatagctatagacatcagtcttagtcgaaaccaaccaggaaatctctccttccggtgcaatgtatcccatagatgccttcatcggaatgatccgttgctgctgctcaacaccgttttcatcttcaacgattttagtcgccaatccaaaatctgtcagcttcggaacaaaatctgcatcaagtaatatgtttccggccttgacatctctgttaatcactttcagctcctcgtgtagataaaccaggcccttggctacacccacagcaattttcatcctcgtgtaccaatccaaaaccctaattggtagtgttagacccttaggtcgcggaccctccaccatcgttttgtgtgctacaaaaaacagaatcaattaggtttagaagctaaaacagagtcatcaattagggtttgattgagttttctttaccaaagatgtgacgctcaagatctccgttggccatgaattcgtaaattatagcacggttcctttggccgtaacagttgccaagaagtctaatcacatttggatgattagttgcacgtaacgttgtaacctctgccaagaactcaacatgaccagttggattctgtggattttgaacctttaccgctccatcctaatgaaatcaaaagtttcagactttagaaactgggtttcgattattaagcataaaggacatgacctttgggtctatataccacattaagtcttgagaaatagcagcgatggacttcgccgaagttgcctttgccgagataaaattcgtcccggaagtttatggttccgtttacgagctcacgccatagaaatgattctccacaattatcaggtagaggtggagatactggtaacagagcagcagtcggatctgcaaatgaattaccaaaggttaaagattgaacaagatactactttcacttgcaagaatgtgacgagaccaaaacgaagaagtaagaaagaaactcttaaaatacagagttgcgtaagatacaagaaacccagaaaacaagaaatctcgatttcaagagattgaagaagagaaacgaaaacggaacctgcaacttcacgatcgtcagggagtcggagatgatttctccaaagatgattgaggcgctcgttattcccaaataggcgctcgacatctacttcgtcgttctcgtcgttaccttgcgctgcgttacttgagcttcctcctttgagacagcataagaaacgtttcatcgtagcgatcaacgaagatgaatctttcttgagatttttttcttttgttttcccgagaatctttttcccggaaacaagtaattaaacagagtaagagactctcaacgagaaaactagagcgagaaagagaatgagagaggtttggatgatgagaactaaaagaattcgccggaggatatttatatagacgggagattatgcgctctaataattcttaaaaaaattagagaattaaatactcaaattatattcataaaacacacacactaattaatgagtaacattatttattgaaatgttaatgagttattgttttcagagaagaagtactatagcgacattattatgtttgtagaatagtaatgacgttatttaaacaagactactatctgtttttggaaatggaaaaaaaaaaatgccactttgtgaaattttcttctgttcttcagatattggaggtggatctctcttctataccaattttgttgttcaattgtcttcacttcctgatttatgatcatccctcctaaaggcaaaggactccatgtgagtacattactatatcaggatacttttcgaaacatctagagggagaaatcttggaaaggatttgaacttacttgcgaatgaattgacctttgacgtgaggccgttgctcagctagtttcttcctgctatggtacctaacctaaaggataccaaaaaaaacgttagtttcgtctcaggaaacaagagcttaagcttgtttagagcttacctttttctcaaaacatcgctctttacgtttaaggcgaaacttcatcaaagcagcttctctttgtgcccatcggtcacttccactagactgctgctttaaaggattgtcactgcttgaactcgaacccaacagttttgcaataggactgtcatgaggagaacaactttccacattttcttctggagcctaactcagcaaaagttcaaagtttttgatgaaaccggcataaatttcaaagacagcgccaagcatcatgaaaagttaccttcttagcagaagtagcaccattattgtatctgcatatcacaagagaaccaataactccaaatcagtcacaggttcgacatttcatttgcagttaatgtcaagaacttactttgagaatgcagagagatttgaatgcctcaacacacttcgatcaccgactttgtaatctctatcctctcttgtttttttcagagtttgctcgagtgattgcaaatcttctcggttagatgaaggtgctttgctttctacttgtgagttaccagaagagcgattcagcgtgtcatcattgtttctctccaaagcttgaacagaatactttgcattcttttcaagatctcctggttcttcagctttcttactcatagacattcctgtctgtgatcccgtgcctaatacaatatcatctaaagtcattgttttgaattaaagtaaatcagagagaatctcaaggaattgttccacaagatcagtgtactcacattttaattgactaattaatttgcgttcttacctatttgttccttctgatcttcagcctccttcagtctattaacatgtgcacatccattttcataggttcctttcttgttgggtgcatcgggaaattgatttgaaggcgaggtgctcttagtatcactggctctttttgtccaagaactctacatatttttataaatgcaaaaccaatcaaaaatttataaaccgatttattcagacattgttattatctatagccatagaacagattacctgagttccactcccgttatcactcccaccatcttggttactcaaaccaccactactcccactttcattcctgtgttcatcactgatgctggcatcattttctgacccttgggtgctttcaggtttcaccgacttcttgtcatgtattccactctcacttccgcttccgctagactggtaaatcaataaacgcataagtaagaaaaaaacacagagtaacttttgtaaaacaggtaaccaaatcagaactcttacgctgtgacatcttctccagacatgttgccaaagattctttagttcgttctttctaatgggtttcacgagaaaatcaacagcaccattcgacaaacacttaaagaccagaaccatagaatcatgtgatgacatcactacaaaaagaaacatcacatcttgagttacacaaactgagcatggcatattgaagctggataaacaaaaatttaatcaaggatttgagtaaatacttatgacggggatgttcttaagtgtcttatggctcataatcttggacagcagaccggttcctgaatgcacaggcatgtcaacctctgttaagacaagatcaatgcaacttttctcatcttctagaattctccaggcttcaaggacatccggaacagcagtaactgacaaaaagtttccaaatttacaactgttagtcaaaagcaaaaatgtgattgctaaacaaggatgatcaattcaatataagaaaaccttcatagctgcaattctttaaaagggcagtaacaatatggcgtgttgagtcatcattctccaccagaagaaccttaagcgatctaactgggagatacctctcccacttcacaacatgagctagcggttgctgctgttgttgagaaatctgtacattgttggtatttctagcagtatcttcaactcgaaattcatcttcttcagatgaaccaaacacttgcctctcggtttccacttcatcaccagtttcaatgttattaaaacacatttttagaatactaatatctcatgaaagtgtcaagaccagcctccatgaacaagatagaatagaagcagcatcaagtaacagctaagattctgcagaaacttcccctctacactgacataacacttgcacatttcttctttccccaaacttattctaatcccttcaccaaaacctcagcccaataagaaacgagaaacaaaaaaaaaagcaacattccgtaagaagatcacagtctcacaccagaaccaaaaaataaaaaactgaatttggataaatcatcaaacttgtccaaagaaaaactaaacaagccaaatcaaatttcaatagtagcacacactcagctttagaaaacaatctgaaacttgttgtttctaaaatcaaaagctatcaatgttccaatggaaaattatcacagtacttggtaagtagttaacaaactttgaacacagtttcttttattcattagatgattgtaaagatctcctactttctcaaatttcttataaactctacagaaccagatacaaaatcaaactctaaggctctaagctataatacttaatgaaataagcacaaaattcaaacagcagcagattgtaaaagcgacaagacaaacaaaagcaaacctttttcacataatccattgatgaacaccaccaccaccagaatctctcaccatatctgacttgaaaaaccaaattacaaccaaaaaagaacagatttttgcttaatctgatttgcttagcatttaatcacctaatcattcaaaaatgttttgattcgtatctatttttcttttaccaacaactttacagaaccaaattgctactaaaatagaataaaaagaaagaaaatttaaaaaacttgatagagaatcagaggaagagaagactgggattttttgggaggtggtagaacaaaaaggtcagagaagatattattttggagtttgatgacgtggcagaactaacctacgtgtcaagtaggaccagataaatttacgcatgctgagattagtgacgtggacaaaatcaaaagcttggactgcgaggggttggtttagactttagagattatcgacatgttaaattattgtcgatttacaacaaaacaaattacatatttccatttgtttcagatagattattattatcttcacacaccaaaaaaagatagattaaaatcatgacagttacgaaaatgcaaagaaaaaaggaaaattgacaaaacaaaaaggaaactccaccaaataagtttccttttccttttcctagtagtaatccgagttgtgtaattgtaactagaaaaacaaaagccctaacttttctataaatactctacgcatcaccacagatctctcattcacaagtctctcatacttctcccaaatcacacaaactgattaaacccttttctagagaaatttctgtagatcatcaagagatttatcaatggcagtcgctgataatcccttttcaatgtcgaccatgttcaatgctttaccaaaccctaaaggaatctccggttccattcctcctcctggattcgccccacgcgcctccgccacgcccttgcacgcagctctgttcaacctaatgactgacggcgatggtgtgtcttactttaaagagatgatctcaaattcagacaaaacagagcttcagaggatggcctcgttgcttacgtctgactccgattacttcatgtcgatcgtcacaaccaagttcggctcgagacgcgtgcagaagctcctcggcaaatcagatgacgtggacgccttcttctgtgccgctatcttgcgccgcttcctccacatcacgaccgacaaatacgcatcctacgtgacgatacgagccatggtcgttttcgacaaggtgatgaaaaaggcattgtacgagcgcattctctaccacgctctcgacctagcgtgtgaccagcacggctgcatcgcgctcaatgatatcataaccgacgctgacgatccttactacagagatcagctactagaattggtcgcatccaacgctctccggctaagcaacgatgcttcagggaactttgtggtccaacatgtgcttacactgtatgactcgcgttgcattcacaacatcgccgttaatctttatggtcagtgcattgagctatcgtttaagaagtatggaagctacatcgtggagaagcttttggaggtggaggagtcaatggttgtggtggttgtggagcttttgggttgcgatggagacaggttgatgaggctggcgaggaatgagtttgggaatttcgtggtggtcaaggctctgagattcaccaagatgtctaggatggatctgttttggggtttggtgcagaagctcatgccttttatccgtctcttgcgtagatctcacggaagcaacattgcaaacatcttggactcatttaggcttcgttgctgattataactctgtgtttatttttcaaaccagcttacaatagtttaattgttccggtgttcaatgtagttacataactctggtaagaaaagtgtttcgtcataaactactattttgttttgtaaagttggagttcttatgaagaagagtttacacaatttgaaaaacgaaattggctaatacatttcttcttgtgttcttatttctgaaaacaaaacaaacctaaatcgagagctgtaaacgaatacacattgcaaacttcatcaacaccttatgaaagaaaagtaaatcatatttggtgcactaaagataaaatcgcaccttgctcagttaaggaagcagcttcccttccattccattgtatggctgccttgtcacaagcccaaagtttctgctagaaccattagcaggaaaatcacgaagagcatacagcttatactcagataacaatcttatcaagatagatacaaatgtctcatagccatcagaaatctctagatatcacaaacggatcttcctgctaatggttctagcagaaactttttcacattaacgaaaaataaccaaacaaactaatgaattcaataagttaaaagcttttaatagagtggcacatcagaaatcagctcacagttgtaaaaccagtaagttaaaagcttttctctgtctctgtgcctctattatttaggacagtattgtcattttcttatatagaattgaccgaaacttaggcccatatatcgtgttcccgtgggcctctaatgactaattttcgaaaacgatggcgttttagcagtgtttttttctttttccaatttgaagccctacaagtataacaatagagagaaacctctgttttccaagtttttgctacaaatgttctatgaatacaagtcaattaatgtaaaaaaaaaattaaaactcgcattagttaaaatctttataatttgacattaatgctctcattagcaagtgacaagatcaaatccattttatctagggatcatcgcagttaatctttatggtcattgcattgagctctcgttttagaagtatgtagtaacttctgtatgcggaggagtcaacggtagtggtggttgtggagcttttggagtgcgacggagataggttgatgaggctggcaaagattgagtttgggaatatcgtggtaggcaaggcactgaggttctcgaaggagatgtctaggactaggattgattttttttggggtttgatgcagaagctcaagcatttttctccatctcttggtgtaggtctcagggaaacaacattgcaaacatcttggactcatttaagcttcgttgctaactataataactgttgtttatgtcttaaactagttacaatacttaaattggtcgggggtagtcacatatataataatataactcctgtaagagatgttttcgtctttaactgcttttctaaagaaagttgaagtttttatgaagaagagttacaatgtgaaaaaaaatgaaattggcttaatcatttcttcttgtgttctcttttccgaagacaaaacaaaccaaaatcaagagctgtaaataaaaacacattattactttgttttcaattggtcttacgtttaaaatattagataaagatacttgacaattcctatgtctttgttgaaatcggtataatttaacaatcgcacgaaagaatggccaacttgaacttgccgtgtcacatcgtaccagaaacaatattcatttgctgaataatataaatcgtaaaatcatatggtcatggactttatggacaactatgataatttaaatattatccttgattttaaaataaatattttatggttttattccataatggaatcatagcattatagcaacatcaattctagtgaatctgtacatagcggaaacaaatgttactaatttttagatagacaatcatgaacaagccttcaatcgaaatgcatagattggtgaaaatgaatttgttgcgttctcagcaaaatgaataatatatgatctatctcatgtcttgccacggtaaatttagccaaattgtaataaattagtatcaagactttgccaaaaaaatatatatatatgaaaattatcattgcaaggataggacagcaggcgtccacgtctttaaattcaacctcgtctgccttatatgattaatatattatgatttcacaaagaaatgattgataatatttattacgaaaatgacaacaaaaaaaggtaaataatataaaacagtgacattttaaattctagataaagactctgttttttttcttctttaatgtatcaatatcgttccgtatagacgctttaatgtgcaagtatgtaactctaacaacctaattttcactttgacatttaggcaaaagtaaaattaaggttgtacttggtaaaatcttgataaagagattgaaagaaaggaatgtgggcatgaaaatgaaaaaaaaaaactagataaattgtgaaactgttaaattccctaaatttaaggaaagtaagaatggacatgggccgtccgatcagatatgtgacctaagatggctgagagagtagttgaatggctggggttcaatctctgttgtacacgtggctttatactactcgttaaaatccatgatcttcgagatttttctgacactcttaagttttggcaaccggctaaaaccagtcggaatgttcatttgacctaccccactcaataaacatttccaaagaaaaaagagattcgtatggacacaaagaatagatatttttaggtcattttcattttttcgcccgtaacctgtgttaagaacataatacgttgttacgtacattttatttctatttttaataaacaataatttcctttgattgtaaaagaatccccctttattggcttttgttctttcctatgtcttcttgtactcaaaatatattttgttttagactttcgaaattatccattttggaaacctatccatttctttgttgatctctttgtatcacattgctctcaagctatgtagtagtcttagagatttagacaatactaatgaatacaagataccataagatttgatacaatatgtttgtgttatcaacgtttgatcggatatgtgttttttttctacttatagctattcattcaatgaaaatctaaaagaaaattgagacacagttgatgcagagataattttctctagccttgatagatttttacaatgtgatattgtaggaactaggaaacacatgcttcatttttatttaggccatgaatgtttgtagtttttaaaatggtttttggattttggattttggtttttggtttttagtttttgattttcttggtttttgtttttggtgtagattttagtttcttaaaaaacttgaatggtaatttgtttagattttggtttttatgttaatggatagtattttttttacaaaacaaatctaaaaataaaataaaaaatgtgatcgattgtttttgagagagaaactcccaaaacatagattttggttttctttgaaaaattgttaaaacactcaaaaactagatttcctatattttaggaaaacttgttttctcaaaatcttgaatggctacaaaatagattttagaaaaaattaaaaccaaaaactagtttaaaaaccacactcattcaaggccttactaaaacttggctacaaacaaggcgaagataacatacatcattcaatttcaatagtaattaatgtgtcaaaaccttagaaattaaaacaaaatttcatcactatgtccagtaagaaaaactaaagctatcaaacctgatgttagtgatttttttccccatcatctttaactattttccatacacattcgtttttgtaataataacaacttcttaaaatgatataacttttgttactttatgcatgtaattgttgattatagctagcttctacacctttttctaacatgtgacacatttttttttacatgtgacacatttgttacgttggttggatacttgttatccatataaatcaataaaaagtcatattattctatctcactcttttaagtctttacagatttttgtttgtgaggaggacgtagctgcaaatataggacccgccattaaatgaaaacaaatgctttgtcttcaaagctatgaatatgtgacttcaaagtgttttttggtttttatgtgtcttcaaagttgtgaatataatagtgtagattcgcttttctttaccaatctttgtttgcagattaataataagatatactatataggatacaaaaacgaatttcgtttgattcattctataaatttgaattactaaatcactttagttgagtttgttcaaggataaaaagtgaaaccccaattaaatttgatgattttcagatgtgtttacaaaatgtttcgaagaacacgcttcaaattgatttaaccaagatgaacacatccattaaatcctcattccatgaacaaaatgcacctcattgtccctaggccttaacagatctatttagtactaatactgtatttaataacttatcttggtaaagaaatcacagaaaagcttaacacatacagtttaaaccgtaaatttatcatagtaaaactgtaaaagcactaatcataaatttaaaccaagctaataaaacaaaaacaagtagcacgtttttacttcaaaccggaaacaggcaaaaccggtatcaaattgccgagaaagatggaaggaataaataaatgttaaaatgttcctttgttgccactaacccacaggcttacgtcccatcatcattccccgttctctttttattttctctaatcgccgacgattatctctttcgtccggcgatagctattttgtctcttcaaatccccatagaccaatactcaactcttcatctccatgtctcctcaatctcatttctctccttagtgattgagctttttccttctttctctttggttattattccttctcctcctccgtcgtgtttttgattgatttcagaatctaaatctccgtttgatttctccatactcgtgctgattttcacctatgtaatgtgatttatgagctctgtttatttcaaatcgacggcgatcgttgaatttattgatcaatgtgtaagtaagagcttgaagaaatagtttttgttgttgttgtgaaagctcagagttttgtttgcttttttgttgacttttttgagattgatgctggatctcaatctcgacgtcgactcgaccgagtctactcagaacgaacgagattcgattactgttaaaggggtttctttgaatcagatggatgaatcggtgacgtcgaactcttctgttgttaatgctgaagcttctagctgtatagatggtgaagatgagttgtgctctacacgaacggtcaagtttcaatttgagatactgaaaggaggaggagaagaagaagaagaagatgatgatgaaagaagtgctgtgatgatgactaaggagttttttcctgttgctaaaggcatgaactttatggattcgagcgctcaaagttcaaggagcaccgttgatatttccttccagagggggaaacaaggtggagactttataggtagcgggagcggtggtggcgatgcttcacgggtgatgcagccaccatcacagccggtgaagaaaagcaggagaggtcctaggtctaagagttctcagtatagaggcgtcactttctatcggaggacaggcagatgggaatcgcatatctggtatatctactactgattgatttatcttttagataggtcttagatgagttgttgatctttggtcgaaaatggaagagcttggtttagattttgtattaatctacaagtttcttttttgtcaattttcatggttgcagggattgcggtaaacaagtttatttaggtatggattctaatggctgtactactgtgaactgatttctgctgggatcttagttctctaataaaagctttaacttttgaattcaataggtggatttgatactgcccatgctgcagctaggtaatgcctttggaaatgatatttttttgtttgatcttattgatcactcaactgttttttcgttatgatacaattgtttcctaagttcaactttcgttggtgtagggcgtatgatcgagctgctgtcaaattccggggtctggaagctgacatcaatttcgttattggcgattatgaagaggatctcaagcaggttttgattacagatgtacaaatgaagacatgtacgctttgatttgttcttatctggttttcaaactttacagatggcgaatctttccaaagaggaagttgtgcaagtacttcggcgacagagctctggtttctcaaggaataattctagatatcaaggagttgctttgcaaaagattggcgggtggggagctcaaatggagcagcttcatggaaacatgtaattaacttttcctgggatctaagtatgggcttttacaaatgctatgttatttgtgtttttgtctgaatgtggttgtcagtcattgctaaaaagagtggagtggttcagatgaagagtttggtaatttttcgttagttgaaaagggcttctgttagaaccattagcaggaagacccgtttgtgattatgagttatatatagagattttgatggctatgagacatttatatctatcttgggatgattgtcatctgagtatgagctgtacgctagtgatggttgtaaattacattatgaggaagtcttttatcctgaattattgatctattaggaaaattcatgactaattgctcagattcttatggaattaggggttgtgacaaggcagccgtacaatggaagggaagggaagctgcttccttaattgagcctcatgcatcccgaatgattcccgaggcaggtaatgtaattgatgttccttgcttgttaaactggtcgatgctatgcagcttttgctgtcatcattgatatctctgctcaatatttgaaaagctacgactaacttgttttcctgatcttattatttagctaatgttaagctcgacctcaacttgggaatctctctttcactaggagatggtccgaagcaaaaagatagggccctccggcttcaccatgtccctaacaattccgtatgtggaaggaacaccatggtgcaattttttcttcagtgcaccaaatatgatttactttactttcatatgcgttttgctgcaactgttagtcaaatgtttctttgtcgatatgtcatagcaatctggaactcaaagatactgtctcctttgctagctcgagccctcatgttttttcatttattcatgaatttcttgctcttcatttgatatactcacagatggagaaccacatggctgcagcggcatgtgatacgcctttcaatttcttgaagaggggttcagaccatcttaataaccggcatgcccttccttctgcgttcttttcacccatggtaaatagtaaataccatagcacacatctcgttatatccaactgtttgtcactgcctcacaatttttaccttctgtccagaactaacatacaatatgaaatagaatgacaattttaaatttatcgaactttaccctacctatgagtaatttgtgtgatatgaaattcagctagatgttcatcaagtggttactgttgtgatatttgatcagttaagtacttgagctcaactctttgatatcctttgagaacaggtctatgttgttgcttgttagttcttcttctatgttgtgatattcttgaagatttgaatgaataatcttctgtcctaaaagttaaattcttgtctccaggaaagaacaccagagaaagggcttatgttacgttctcatcaaagcttcccagccaggacatggcaagggcatgatcagtccagtggtgggaccgccgtagcagctacagcaccgccactgttttcaaatgcagcatcatcaggattctcactctcagctacacgccctccttcatccacagctattcatcatccttctcagcccttcgtcaatctgaatcagcccggtctctatgttatccacccatctgattacatatctcagcaccaacacaatctcatgaaccgcccacaaccaccaccatagcttcctccttcctccgcataactcaaggtaagactttcttggaaacaacaacattcaactcatcgtttggctcagcacacaagctgtagtttcctcttcctgttatacgttacgtttacaatccaaaagaaaaaaaaaaaaaattttgatagaagaccactaaagaaaaagagtttgagatgtttgtattcatatgaatcttgatggaaacatgaaaagtatgatgaatgcttagcgaatagaagaagactaaggaagagttccaagttgtgtagtattatcaccctcctgttttctgcttctctgtcaatctcaaacacatatttgaggcaatagttttcctaagatcctacaatactacacgtaataacatactttgtatgtgaacgtgcaggttctacacagccctgaggttggaataagttggaaggccagccaaaacgacgctgaattctcccaagatctgttgtacttattgtcattgtgtgatttatctttctgcttttgatttgtaacataaactgagggataataccaaaacagaacccaaacccatttgccattttactataatgtctctgatattaatatgaacagcgtaaagtacaatgcattctatatgtatgaatgaagaaagctattgagacttgagagactataaatttgtatagatctgataagttttagaaattaaaaactcttacattaattcaatacaccacaataatcttgatttaactccaaaacacgtaactaaagacagagagatggagagagagagagagagagagagatataaataatcatccactgataatgtgaatcttgattgtttgaaccaggttattatcaccagtcttcttgatctcaaatatcatcttatccgttgtcttcactttattccttctgatgatactgccaaatcccttgacaaacacactaccatttgtctgaatcttgatctgcttctccaatgtcccgaattttttcacaagtggatcgacaagagtgatactctcagggaagtgcaagtcatagtctttgataacccgagctgggatgagctgctttatgaaaaaaaacatcataaaaactcacaacccaacgatgttaaatgaaaagctctttcacattcagtttttacttaccagttggcttttcttcttcggattaaggatcagagtaaaagatgggttctcacgatcatccagatactgtctttcatcttcatcatcatcatcagccttagcatgatctctagaatcaaaagcctcaacataatcatcatcttcaacaggaacatcatcagcaacattatcaacatcttcatcatcagcatcattatcatctttctcgacagcagcttcatcagcataatcatcactatcattgtcttcaccacaattataatcagaatcgtcatcatcctcatcaagagataaaacatcatcactggcctgattttgttcatcactatcagattccactttgatctcctcgctttgatctgaacttcttcttatctttttacacattgtcctatgctcatagatacagaaatggaaacaactagagccatcaaactcaaactctaagaaatctcctcccttgagatcttcgtccttcacaatcctcttccacccattaaccataacgaatttctcagtatcatcatcaccacaacatttctttaactccaatttccaaatatttccagaaatgcttctaacagttacagtttcaggcaaagactttggtaaaaatctggtgaaagaaatgggtagtacctgcattatacaatctaaaagtttcaaccaaatagaaatctacagaagaacatctcagaaaaacccacaaaaaaaacagagagaagagaagagtgttttaccatatcatctccggactcatcaggtaagtaaactttgaagaattttggaacacaattatccaaagaaactcctgttcgatagcaagaaaagatcaaaacagaggatacattgtgtaaatgtagaatcaagaacaaaaaagaagaaacctttgttcatcttcacttctgtctgctctttgtctagatctctgtgaaaccctaattgtttgatttaactgaaggttaatatgcgttctccgatcttattgtttgatttagtgtttttttccttttgtagctaaaagcagagacttgaacgcttattgtttcaaatggaaaaaaaaaactttactaactacatttacttcaatgtagagctgagatttggaaccctaattttaagatgagtacagttcttcaaaccccagatttctcagatagtacggtttccgttgagtggctttcgacttttgtagcaaaaacttgaaaacagaggtttctctctgtttctatacttgttgcttcaaatggtaaaaccgtaaaagactacttagaacgacttcgttttaaaagaagattcgtgaaagaaccaaggcccgcgaaaaccaatggacctaaattattttggtcccattcgagatggggttttatagtagtcagtggaaggcctagtgatttcctccaaatctatttgcaacatattgtttggttctctttcttattttgatttgtaagtttgtatacaaaagtggtgccaacaacaaaacacaaacccaaacccatttgtcattttactataatgtcttttgagattactccaacacaaaggacgacctttgtccgaacaatgtaagtactatttgtatgaatccgttggaggacgttgccctacttactgcaggcaacaaagcaacaagatttgtctagacggcataactcaagagtttgttgcaagagaaaacagagagatttaatgagacatgaactctatatagaaagtcttaattcaacatgaaaacatctctcacgcccaaatccttagttataaaccaaatcctaagatagacattttaccattagtaacataataaaaaccactcacagctaagacacataagactcacaaaagcttagtgaagagatcatccgctgataatcttgaccttgatggtgtgaaccagattacctccagtcctcttaagctcgcatatcattttgtcagtcatcttcattttgttccttctgatgaaactaccaaatcccttgacaaagatgcaaccattcttttgaatcttgattgctttctccaatgctcccatttcgtccacgactgttatacgctccgggaaggttaagtcatagtcccttatgacatgagccggtatgtgctgcatcaagaaacaaacatcataaaacagattgagatattccttattaatttattcacataagaatccataaccaaagatgttaaatggagagtgtgtaaagatc

SEQ ID NO: 933 - DNA, 54987 bp, Arabidopsis thaliana
ttaaatattcaggtttttttttctcttaccaattggctcttcttcttcggattgagtgtcatagtaaagtacgggttctcgtgatcatccagataccgcctttcgtcatcctcatcctcaagatcatcttcatcctcaagaccatcatcatccttagcatcataaccatcctcagcctcatcatcatcttcatcctcaagaccatcactatccttagcatcataaccatcctcagcctcaacatctacttcatcctcaagaccatcatcatcctcagcaacattatcatcctcaacagaataatcattatcagaatcgtcagaatcatcactattaagaacgataacatcatcactagcctgagattcttcttcacaatcagatcccactttgatgatgtccttgctttgctctgaacttctcttaagcctcttacacgtagtctcatggtcaaagatagagaaattaaaaaaatgagagccatcaaactcaaatgacaagagatctccaccgttcaggttttcgtcccttacaatcttcttccaaccactaaccataacaaatctctcaacctcaccaccacatttcttaaaccctaatttccaaatgtttccagaaatgcttctaacagttacagttttaggcaaagactttggtaaacagctgttgaaagaaatgggtagtacctgaaaagtttctacaaatttcaagcaaccagaaaacaaaaaacagagtgaagagaagtgtgttttattaccagatcatcaccggattcactaggaaggtacggtttaaagaactttgaagtaaaaccattagagtaatttcctgttccaaaataagaaaaggaagaacatcaatgtacagagcacattacaagggaagaatcaggaacagagaagtgaaaaacctcttgtgttcattgtcgtcaacttcttgtgctcttggaaatactctgaaccctaattttgatcggaaataaaaaggtgaacaaagtttctccagatccaagtttttccagatgtgatttgatctaaaggtgttggccttttgtagcaaaaacttgcaaaaacagagggttctctctgtttcgatgctttttccttcaaatggaaaacaaaccattaatagtactcttcttattcaaaaataattcgttaagcggaccaaggtatcgctaaggcccaaacaaaaaacaagaaatgggccttaagtttggttcaatctatatcgtgtaaatgacattatcgtccttaaacaaaagaaccacagtaaagagtcgagaagggtatattagagaaagaaggacttgtgacatctcaattcttgaacaagaaacttgaaacttgaaagaagaatgagatagtgttaagtggcagagttccaagtatcttagtattattctcctcctatgccaatgcttttcttatgatcacatagagagtaataacattctttttacatgaactcgcaggttttaaacagccctgatgtgtgaaccattcataatgatttctcccaaaatctatagctctagtatacattattattgtaagactgtgttgatcgtcttttgcacttcatgtttcagacaaacaaacaaaatcaagaagtgtatagaaagcatcaacatcgattatgttccgagaaaaccaataagattcataaaaccaagtactctactcatataaaaactctcaagtaaaaatagataatgtcttggagttaacgcataaagccttatcaagagatcatcctcttataacatggaccttgatttctcgaacaagaccatccatctccttttctaactcacaaatcaccttgtcattcaacttcacattattccttctgattatactacggaatcccttgattgtttgacccttaactttcctcttcaatttaccaaagtttttctcgagtggatcaatcaaattgatgaactcagggaagtgtaagccatacttcgttatgaccttagttggtatgcgcagctgcattacaaagataacatcataaaacagaagtggtacattattttaatgaaaatgcaaaaagacatgagactttcttcacatttcttaccatattatattttatttgccgatgctggttcactgtaaagaaagggttcatgtgattatccagatattgtctgtcatgctctccagaagaacctatcaaaatttatacgcaagaaaataaaaagacagtgatgctctcagtctcagttaacttcacaagacaaaagtttctattatacctttcttttttttctctgttttgactcctctccatctttctttctcaacatcagcatgatcatcgtcaccataatcttgatcatcatcatcatcatcatcatcaataactatgatatcttcactagatgtatcttcctcaacataatcttgaacatcattaatatcatcattatcagcatcatcaagagctgtaatatcttcactagatgtatcttcctcattataatcttgaacatcactaatatcatcatcatcaagaactatgaaattttcactagatttaacttcttccccataatcttgatcatcattaaaaccatcatcattgtcatcaagaaccgtgatttgcactgaacttctaagccttttacacgttgcacgaccatagatacagaaattgaaacaccaagagccatcaaactcaaattctaagaactctccacctttcaaatcttcgtccttgactatcttcttccacccattaaccataacaaatctctcactatcaccacaaaacttcctaaacgccactttccagatgtttccataaatgcttctaacaattacatttttaggcaacgactttggtaaaaagctgttgaaagagatgggtaattcctgaagaggaaggatctaaaagtttcaataaactaaaaatctacatataaccaaaaacagagagagaagtgtatttttaccaaatcatctccggaatcatcaggtaagtacactttgaagaactttggaagacaatcatccacagaaattcctgttccaaagcaagaaaaaaatcagaacataggataggttatgtgattggagaatcaagaacaaacaatagcataaagatcttaacataaaaacaagagtctaaagaagaaacctctgttcatcatcttcacctctttgaaaccctaactcttttagtgaaagtgaaggtgaaaatggttcttgaaaatagaaaagtaaaagagctttgttaatagatctccgatcttttggtttgctttagagattttgccttttgtagcataacacagagactgtattgtcttctaggcttattgctacaaatggaaaaataaaacatgtgctaactacttttacttcaatgctccatgaaccgaaccgatatgattttaatcaaaccgaaaaaatattatcctaaccaaaccaaaccaataaagggtgaacgagaatttaaaattcaaataaatgggctttaaagtccggcccaatcgatttgctttaaatgacaataataacctgagattatagagaacgttggtccgatcttctttcaatttcaagtttttcaacctcttcccgcttacgaggccgggatattctatcaacagtcgtctcttccatcggccgaacaatttccgatttaccgactaggattttcgcctacaacttccgaagagattttctcagtgtaagtttgaaaaaacctagctataggattccggatttcctaatcgtcagatcttgggctcgaaagagaagctagaaatggataaggatctcttagatatctctggagaagacgacgaagataattggcttctgaagaatacgccgaagaaaactaattcgagccgaggaaagagttatttgaaatgctcacctctccaaatccctagatctagtcgtatcgttcctactcggcctcctttttccccaattggtaagcgcttcaatttctcgttctcgatccgagcttcgttctgataatttctctctccctttgttagagtgtttaagcatctgaattagcattgtttaaatcttaatttgataaaatagcaaattagtataaatgttgtgtattctgcggatatatgaaggttaatactttttgcaggaagagtaacaggcaccagcaacaacagggagcagccatgcgcttcagttgatacagatagtgtaggaaaggagaatgctaaagttgaattgcccaaattgagtgtggagcgacaacagatgaagaagaagaaaaagaatgcagggtttaatttgcgcaagagtttagcatgggatagagctttttcaacggaagaaggtgacttttttttaccaatttcctgttagtagtaaaggtcaaagatttggtctatgttactaagaatcttaagatgtgtgatatggtcatgaaccaggtgttttggattcatctgagttatctaaaataactggaactgcttgccatcttggtggagatcggttagctgccattcaggaagagtacagagagtcaatgtcagcttccaaatgtaatgtttcaccaggactacaagcacttgaagaaaacttatttaacgacttgcctgtgaatagtaaaaacagagagaagaagcttgtcagtggcataatgcccaagtacggatcaccatctaaatcccaatcttcctcggtgagtttactggacctaaatattgtggagctaatgagggtcataagtcgtttctttccttgcgtaaatatatatattttgaggcgcagtctatctaaatgtcgaatatctgcattataggcccagaaaaaagttatctcagctcaggatttaaggagtggttccaagcgcagtggctgtccccggcctcctccttcatcttcatatccttttcttactttgagtactgagtgtataggcaatcttgatatcctttgcaggtcttgtttgtgttctttttgcttgtttaccttaaccatcttgcaccctgaaaagacctgcaaatgtgcatacaacaacatcacgttgcagggagctgagcatatctaaagttcctactaccaaatctgacccagttacagttggaaacaacatgaaaaggactactcaaagtccaatcaaagcgaaaaacagtcaacctactcaattaagtatgttcacttcagttagcaaataaaaactattcatctcatatcctttttagttctgttacttttcatcctgtttatatattgctacatggttttttgtctgatatgacagagaattctcagaggagcttaggatctgaaagcttctctaaaaacacttcaagcaccaagagtaaaacaaaatccagtctggcgagtaaatcttcaattcctaagccctctcttaagcaagctagaagaaatgtggtaaagctatgctgccctctgcaaaccaatatagcaaatagtttatgcactaaaaatttgcagcaaatgctttgtttccaatattcttcctattaagagtaacctattgcattttcttgaactctagatcagcaaatcttcagaaattccgacagtatcatactcacagcattctgttgttgcaaaatccaacgttggccctatgactgcatcagatgtggctatgcttggtcatgcatcagttattccagactctaatgtaattactctgggcacctcgttagctcaaagttcttgcaataaagctggaagcacgcagtccgcagtttcacgactgggaaagccatcaggcttaagagcgccaaaaccttcaattggctatttcagtcaggtatattattgaaatatactgaattctatcgtgagataactatggttttgttcttgtaactctaacatacttcatatttttgcagtctgactctcaaccgtcgcagagtgcgggagacaaacacagtcagcttcccagatctgatgtttgttcagccgctcatttttctttgatccctaccttcaagaaaccccaagttgctgaaaagtttcccggtgtcaactgcaaggcagcaactggaatttttggcagttcagattcagctgcaagattctctgctcaatctatatgtctcaaaccttcacaggaaaagttgaaagtggacttgaatagcacacaggaagtagaatccaaagtgttgcgttgtccattgagttttcagataaatgaaaatccgcagcaccaatgtgtcattcaaggtgatactggaaatttagttctggatgatgtaacttattgcacatctgagaagatttctactgaacaatgtcaagaattccagggtaacagtgcgctgccgccctcaggctgcaaaaataatgtacaagatggtagtaatatgtctgacgataatagagatgagaaaaggaagtcttgcctctcagtagaagaatactgtgctttaccaatgaaagattctatggattctacgatgcagggtcctccttgcgatgagttgacactgtttgacaactactcacagttgaaagtcagcaatccgggggaagaagatatgtgtactaccaatgattttagtggagattctgatacattggatgtacctggacaacctctaaatgaatgcctgcaccctggaaacgaagacgagattagtccttgcctttctgaagaaaaagatgcgttagttgtttatcattctactgaatatgtagcaaagcagcctgaggttttggattccttcactgcaaaatcatctttctttggggatttggcttcaataaagggtgatgcagacaatccatcttcttcagaaaatcagttaggtaatactgaatttgtttctgtacctttggagccttctgaagcactagattgtgttcaatcactatgcaatcatcttgaggtaaatgcggtagcgaactctgttttgtgtgatcataacatggtgtgtgatggtcaatctgtattagaaacggagaagagaattgaaataagcgaaagcacagagaaaaactatgagactgatttcattggtccattttccgaatgcaaatactggtttagagaatctgaagagcaacatttgtcgaaccaattagtccttgaggtgaaagagggtggtcatgagatagatgtcttgatcagaaacgaagaagctgatgggcctgatatgcagatagaatgctttactggttcgtctgatgctgacaacatggaacaagtgaaattactaaggccttcctccgttgaagttacgatggagattaaacctctggaatcatctcatgaacccttctctgagaaatcaacttctgaaaaacagaagcaatacaattgttccagcagtgaaaatacatctgatgtaaatgatggttgtgtaatgaaacaggctgatcaacttggaacattagttggttgttctccagaaaaagatgcatctgttgcggttttctcttattcaaatgaggagcttggagataactctgagctggaagacatggatttggttacagactcagattgttcagatgaggagcctgaggataaattggagcggacagaggtggatgtggttactgatccagagctcattagtggccttgatgagttttctgtcaagggcgtccgtaatcaagaatatccggaagtagaagatatccaaactgcatcagacctttgtggaaaaactaaaactctactaagtgaatcagtcagttcctcggattctatatttggagttcctgagtgtctaaatgagggcacaaacttttccagaatctctgaaggcatgtcaaaagaggattcaaattctggacgtattgagcataactatgttgtaaaagctgaattccaggtagatgctgaaaaggatttcagtgcacaggttactggtcaagaactcgtccccaatgaaggagatgaagttaaagttgtaaagatctctcctgatcctgtatcatttgcgcccagagaggaagaactaggaactccaatacccatgaaggagactatctcaggcagagatgatatgcagattaacgagttcaatgtactcagcgatgacattttgacatcagaaagcaatgcatcagaaggcaatgacaagatgatactactgtaaataatctaatccagtctccactagtaaaccttttctattcctccagtgcagtttattttaagaatgagctaataagtcactgtttccaacagggatgctaaacttgagaagaaacctgatccaataattgtgaagcctccaaatgctgttccattttctgacgagtggttagctgcaattgaggctgctggggaggtatgtatatctcaaatatatgaatgaaaccatgatgttgaactgaagacccacttgctgttattgcatatgatatataagtatatctgcaatgcctcagcagaactcttctgttaaatatgcaggaaattttaacactgaaaagtggacgtgtgcaacattcaccaaccgagaaatctgctcctgaaccaggtccatggtctccggtataatccttctctccctctctcattaccatttggtgttgataaaaggaaacaacaagttgaaaaattggaacttgattaatttggttgtttttctacctaacaacattatggaaagaattcaactcttaatttttgtataatcttcattaactgatgcttcattcacaagctaattatatgtcataatcagttcaagaaaactaactcgagcaaaaccattttgtcttttgtgatggtcaggtcaagaagagcaaccaagttgtaggaccatttgactgtacaaagtataataacaaaggtcttcctcctgcttttgactgaagaaaactaggtttcttctacggtttcttctgccttaaccatttttatttgtttttacccttttatcactactaggaggttacaaatttgttgaacacactcactttatgattttgtatacctgagaaataaaatatgtagaaagcacttgttgttgaggcatgaatgacttccacacgagctattttccctaatcacatgttgagatatttgacaggatttaggatgaatacaagtgaacttgtcgtgcatattctattcaatttcatgacatttacaatcctgggaccaaaattgagatttgttaagagccagatcaggctagttcatcatcatggaccatgacggatttgcctgaaaccgcattgctagttgttatctttctgtctttgtctttttcgaagctctaacaaaagtatcatatatatgtcttttgatcttcttcatttcaagataattgagataaaccactcaattaaatgaatcgcttaagtaataagttgatgaatattcgggagggtgaattgatggtaaccgcaggcaacacataacatggctataaatccttttattaatgtagtttttcctaacaaaggatcttttcagttccaacttaaacagcagtaagatttaagaatctctcaaacgtcgatagtgagtttggcgtcaaggtgagtgaactcttggaagaaagctttaaagtgttcatatgaatgcttcacgtcatctgcagcacacatctcacggatgctatgcattgagagctgaggagctccaacatcaaccgtccttatccccacactgcttgctaggattggaccaatggtcgatccgcaacccatatcattacgcaccacaaaatcctacaatattcatgtccacattcatttataatatgcaaataagtaagaacatttttttgaatctttctcaggcaaatcatacctgaacaggcagattatgcttctctgctatctctctgaatacaaaggaagttacggcattagtggcgtaacgttgatttgcattgtgtttgatgacaagtcctccgtgcatctttggctgatgattctcttcgtgtttgtcctaaaaagtgaaatcaaaatgcaatgaaagatggacatcaacttctgtgcatggaaatgaaaaaaatattgccagatgaaatgattaccataaagtttggatgtaaagcatgtgccatgtcagcagagacaagcaaacttttctgaatcgcttttttgagcacctgtaacgatgaaacaagcgaactataatgagcgacaaaaacaaaattatataaagtataacacaatcccagtttaatgtctatcactcgaatggtttgctaccttagtgtcagagctgaagcaacttgtgatgtgtgacatagcatcaatcatgacaggggatccagctccttgcgctgaattggagccaacttcttcatgatcaaatagtgccaccattcttattccgctttcatcctctaagtcacttccagatgacgttgcatctataagtgcctgtgtacaaagttcaaatatttgaaatagatcgtcaacatcactgcttcttgaaccaaaatacccaaggaaagttggttgcagtgaagttgtatcattgttcatcaatatacagcagcataatgggtagatttattccattcagagagaagaacaaattgtaagagatgttcaacttagattgtgatccagaataaaacttacactagatgtgagttaacatacttgcacagaaagatctacaaggtggagtaatttaaattgggcttgaaacacaagtctcttgaaatgtgaagcatggactaactattattctcttccagaacatgcaatgagtggaaaccaactaaggcacagttaagatcagtaaatatagaccatggactattttctcctctaaaagtaaaagtaaaggacgtaccttcagagagcaaaatgacatgcagagattatctagtcttcccgagaaaataaattctttagctgcaccagctagtatacttggctgagtgtcacatgcttgcagctcaaagtcgcatatctcctcaggtttacaacccagtgcgtttgcaatgatctaagaaattaaaaagaggactacttggttactaaaccagaacaagatctaaaattcaagctaaaaccataaagcttatatatttcaactggacctccattagaagcggatgatgctttgatttagaactagtttcagcacacttctttccttcgtcatgttcaccactttcagctggcgttttattgagctccgccttcaaatatatcacacaatataaataaattgcaaaggaagtaagaattcaagtctgctacaaacttgacaacaatggtttcgacttcatagataaatctgccaaaagttaaggggttcacagagatgggttctgatctcaaatagtgggtgacatgcaaacaaatactttagccatactagatgaaacaaaatttagcagagacgctggacaacatagcaagcatagaaaaagcaccttaatagctgttgccagtactggaacgaggtgtgtctgagtgtttggcttaaaaccttcagtgttcacattcctgtccgcaaggcaaaacgaaacgtacataaagttcaatattaatttctctacataaagtaactgagaaataaataatgtttttttttatcgcaaacacgacaaaaaaagagtctaagaagtattccaatacaaagcaatgatttaaaggtaacctgtccaagtgaatggccaaggtaggaatcctcatgataggatcctcaatcctgacaaggcgatgagaatacgagacagaacctgctttctcttctttaagaatcacacgtcctgcaacagtcaagtcacgatcaaaccaggtgtaccacagtccacctccatatgtttgaacaccaacctccaagcatccacctttagttatctgtcaacacaatcctcactttctagtcaaaaaagatttaagtaaaaccgctggagaaaatgtcaaaaagatcccaaaatccaaaatcaccttggatacaggtttcaatttgaggcacggactatcagtatgagctccaataatatggaacccgtttccagctacgtatctgttcaaagttttccaaaagattagctctaacattgtagcaatagatggaaccattggtttcagaagaagaaggaaaagatggttacttgtgaccaatggcaaaagcaacaatagtggagtaatttctggtgaagaagtattttttgccggcttcgagtttccaatcatctctctctgaaatctgttcatacccagccttcaaaagccgtctctttgactcgtctacacataataaatagtagatcaatcaatcaatactagaactgaatcaacaacggaaaatcaatagttctcaaaaggaaaagagatgggtgatgattgacgataccgacggcatgaaaagcggtgggagaagcattgagaaaggagaggaaatcagagacgagggagctcttatccatggctggatctcttaacttgagttcttcgggtttttgtgaggcagcactccaatggatgttcggtttccgatcgtccctgtgtaagtcttgccggaggttccgtttccattttagtaacccgagaagttttattggcccattacaaagcccaattggttttttaaataaatagttatttattcatgagtacataaaaaaaatgttatttattcatataaacgttttatacttttatgtaaaaactttcaataaattattatacaaaaatttgtttcatttgaaattttgaattaacgcactatttaaaaatttgttcattttaaaaactttcaaataaattttgtagtcatatactataaatacccttccttatatgtggttggataattttggtaataacataagaattcccaaaactagaagattttatgtggttgggtaatttcggtagtaacacattcaaacaccattaaaccaatcaaaaccgaaccggactaagtggtaataaaattagaaatcgaagggtaataaattctagaaacccttttttttttttttttaacaagacagcaacgtggatctggcagacaaaatcatatatataaataatattaagagggttaaaaaaggccatcgcctcaaaaatcacagccatccattttctctttctctctctctctgtagctctctctcgttcgagcttccatttttcctcatcgcaatcttcatcttcaatctccagctatctcaaatcgatccttctcgaatcgtatgttttcttatcacctcttattgaatctccttcgttctcgttgagtttgaatctgctgaatctcaaaaccctaattctgtttcctccgaggttttttttattggcatcatcggtttattagtttggatcgagaaattgagattgaagattgagatttttggattaatctacatgtgtttatatttcctgtgattgatttataatgatttgttttcacttttgtccgttgacgcgtctttaattgaaccgtcgcggcgcatgcatagatcgatactgtgaagttcttcattgtagattcattttgttgtttgtaattatattgttagtattcgatctgaaatgttgaatatttagagtaaatttaagattttttaagttggcctatgataacgttgatgagatgagtgaacatagatgatttctaggattggatttcgaatgttatcatttagtttcttctgataattaatgaagttgccagcaaaaaaaaaaaaagttttttcattgcgtttggtttttacatgtgttttatctgatagctcatgaaataaaatttactttcttagcctgtggccttagctttgatgattaatgtgtcttatattctttctcttagaccatcatgagtgaccatggtgagaagacttgtccactttgtgctgaagagatggatctgactgatcaacaattgaagccttgcaaatgtggttatcaggtcttgcatctaccttccattttctcttaatttcaattgatatgttacggcttaatcttgaaactgaaagttattgggagaacagttttgcttattgcaatgttcaatagctctcgtctttctctgttttcatgatcgctataatcactcttttatctgttaataattttgtgtatgtgattcagatttgtgtttggtgctggcatcacatagtggacatggcagagaaagatcaaatagaagggcgttgtccagcttgtcgcactccatatgacaaagaaaagattgtagggatgactgttaattgtgacaggtttgtaataacatttaattttagtctgggacagtcttttttcgtttcttttgctgatggcttttctctataattacctgttcccagtctggcttctgaaggcaatatggagcgcaagaagatccagaagtcaaaatcaaaatcttctgaagggagaaagcaacaactcaccagtgtgcgagtgatccagaggaatcttgtttacattgttgggttgcctcttaatctagccgatgaagatgtatgacaacttacatccaaacctttataatcattctttttgtagattactatctgattagcgcgccatttttctttcagctactccaacataaagaatattttggtcagtatggaaaagttctaaaggtttccatgtcccgaacagcatctggtgtcatccaacaattcccaaacaatacatgcagtgtgtgcgtttctgtatatacttcttatcaaacaatttccctctttatatatatatatttggtcagtgaagttgtctgataatgattttttgcatcgcagatatattacttatggaaaagaggaagaggctgttcgctgcattcaagctgttcatgggtttatcttggatggtaaaccattgaagtaagttttgacttgctttttctaaaaaaactagaattgtatttataagttattatattcacctaatgatcatatgaaagttctcgctctctatctatatttgcagggcatgttttgggacaaccaagtattgtcatgcatggctgagaaatgtggtatgtctcctatagattcttgttcttctgcgttgttatttttgattacctcgcttcagatgcatgttgaagttgatgtctttggagtgatgaactgcatgtttttattccaggcatgcgtcaatcctgattgtctctatttgcacgaggttggttctcaagatgatagcttcacaaaagatgagatcatatcagcctatacaaggtatttgtatcatctgaaattttaaaataccctcttgctttcatgattgttctgtttcatggtaccagtatctttaggtaatgtaatatgatagttggtctagtatttttggatgattagttaagtcttatagtaattttgaaggagtagagttcaacaaatcactggagcaacaaatattctgcagcaccattcagggaacatgctacctccaccactggatgcttattgcagtgacagttcttctgcaaaaccaattataaaggttccttcaactgtaagttcagtttaatctcaactttcccttaacatgatgtgcaatttggcttgagtaatgtgttccaaagataatccacatctgaagtattttctatttgttaatcctagttggtgactaacttgatgatgtggcatgactagcttatgaaatctcttaattttcctgagcttaataatttatttcctatgtacagaatgcaactagtgttcccaggtattctccgccaagtgggagtgggagctccagcagatccactgcccttcctgctgcagcgtcatggttagttttcacttgatgctttttatgtcttttgattggtctatctaagaaataaggaaattctgttgcagggggacacatcagtctttagcaacttcggtcacctcaaatggatcttctgatatacaaagatcaacatcagtgaatggaaccttacccttttctgctgttgttgcaaacgcagctcatgggcctgtatcctctaatgacattcttaaaagaccatctcgcaaagaagaaagccaaatagttatggacaaagtcaaacctagtgtgttgaagcccttgcagcataatgttgtggtttctgggtccgagagaattaccgcacccgatagagatcctactagcaatcgtttatccagttcagtagactctgcctacggaggcagagacattgaccagccttcagcctacagtggcagagacattgacaagccttcatctactgttagctcgtttgatgctgcaaatgaagctgtagaagatgtccctactgtaagcaacttgttggatggtgttgcatgcatgcggataactatgaattgtagggatgaacgtcctgatattacaatggcgattggtagtcaaagtgatcaaggttctattagacaacctggttctgaagtatcaaagttgccagatttagagcaatgtaggatagatagttctataaacactgataagaaagctatctcgttagaggataggatcccccgcactaggccagggtgggattggatatcagatttgcaatcgcaaatgcaaggaagctctaaattgcaagtggaggatatatcaacattggatagccaacggcctcaccctgaagaggatattatccactcgcggttgctgtctaatttgtcaagttccagtttggatacaaatcatatggcttctcgttcttccctaccttgtgaagttaggggcagtgatagattgcatcttccaaatggatttggtgagaaatccatgtccagtgtggagcactctctgttcgcaaatgaaggcaggaacaaagtcaacaatgcagaggatgctatactttcaaacattttgtcactcgattttgatccatgggatgaatccttgacttctccccacaatttggcagagttactaggtgaagttgatcagcgatctagtactcttaaaccttcaaacttcctaaagcaacataacaaccagtctagattttcttttgcacggtatgaagaatctagtaatcaagcatatgacagtgagaactatagcatttatgggcagttgtcaagagataaacctattcaggagtctgccatgagccgagatatctatcgaaataaccttgggagtgtaaatggatttgcttcaaacttcgctggtggattggataactttgccgctagtcctttattttcttcgcacaagaatcctggttagtagttttagtttatggctgttggttatttcttgtttgggtatttttctgctacatttccaatttttcttttctgttgtcctattgcagtttcacgacctcaagtttctgcgcctccaggattttctgctcccaacaggctacctcctcctggcttctcgtcacatgaaagagtgggcctatcatcagatactacactaggtattttctcttcttctatttgtggcatcatagagtacggatgatgctagagactaaaacttttgtccacttgtatcataggaaatcgatttcttgactctacttcattgaggaatgcatatcaagtaccacctccagttggtaattcaaatggtgcaagtgatatcgactttgtggatcctgcaattctagctgttggaagagggatggtaaatgctgacttggacatgagatcaggattctcatcacaactgaattcttttgaaaacgaaacaggactccatatgttgagacagcagtctctgtcttctgcacaacaagttaatgggtttcatcatgatctcagaaacttatctccttcacttaacgacccttacggatttagctcaaggcttatggatcaaacacagggaagtagcttgtctcctttctcacagctcccaagacaacaaccatctgcaaattcaatcttgtccaatggtcatcactgggataagtggaatgaagggcaaagtgtgaacaatataggcatggccgagcttcttaggaatgaacggctgggttttaatgggagcttatacaacaacggatatgaagaaccaaaattccggattccaagtcccggtgatgtgtataacaggacatatgggatttgattctggcatgaagagaggtttctgctttgttggatctgctctggttggtcccgattcccaagtgagtggaaaattcatactcaaaaactgcttccgctgctgctgcgcatataggatcagttctcataccaaagatgcaggcccctaacatagattccccaagagcttaaaaggtactgaatcattttcttctataatatgtgattttggtttatccattcgtttataatgtgtgaatttgacttttgcaggagcaaggatgttaaattgtcaatgtttgggtgcttggataaattttgatttctgctgatgattggtttcgtcggaattctggcaaattttgagggtccaacgatgatagaggtagaagttgcgctctgattttttggttcttatataaagttgtaaatgaatttagttataaaaaacagtgaagcttttaaaagtattctatgaaaattcaaattgttattgcaaaactttcacaaaatctttatttcgtttttcaaattttataactcttcttcataaaaacccgaaaaacctttcttacaagagttatgtaactaccttaaaaccaaacaatttatgtattataactagtttgagacataaacacagagttataatcagcaacgaagcctaaatgtgtccaagatgtttgcaatgttgtttccgtgagatctacgcaagagatggataaaaggcatgagcttctgcaccaaaccccaaaacagatccatcctcatctcctttgtgaatctcagtgccttgaccaccacgaaattcccaaactcattcctcgccagcctcatcaacctgtctccatcgcaacccaaaagctccacaaccaccacaaccattgactcctccacctccaaaagcttctccacgatgtagcttccatacttcttaaacgatagctcaatgcactgaccataaagattaacggcgatgttgtgaatgcaacgcgagtcatacagtgtaagcacatgttggaccacaaagttccctgaagcatcgttgcttagccggagagcgttggatacgaccaattctagtagctgatctctgtagtaaggatcgtcagcgtcggttatgatatcattgagcgcgatgcagccgtgctggtcacacgctaggtcgagagcgtggtagagaatgcgctcgtacaatgcctttttcatcaccttgtcgaaaacgaccatggctcgtatcgtcacgtaggatgcgtatttgtcggtcgtgatgtggaggaagcggcgcaagatagcggcacagaagaaggcgtccacgtcatctgatttgccgaggagcttctgcacgcgtctcgagccgaacttggttgtgacgatcgacatgaagtaatcggagtcagacgtaagcaacgaggccatcctctgaagctctgttttgtctgactttgagatcatctctttaaagtaagacacaccatcgccgtcagtcattaggttgaacagagctgcgtgcaagggcgtggcggaggcgcgtggggcgaatccagaaggaggaatgtaaccggaggtttctgtagggtttggtaaagcattgaacatggtcgacattgaaaaggtattatcggagactgccattgatgtatttcttgatctacagaaatttctctagaaaagggtttaatcagtttgtgtgattttggagaagtatgagagatttgtgaatgagagatctgtggtgatgcgtagagtatttatagaaaagttagggcttttgtttttctagttacaattacacaactcggattcctaccaggaaaaggaaacttatttggtggagtatccttttttctttgtgttttaataataataatctatctgagaaaaatggaaaaaagtagaatttttctgtaaaacgacaatatttaggcacgaaaatcaaattaaaaaaggaaaagtaggaaggagatcgtaaatttgatcccgtaaattcgaagggtattagaagggtataatcgtcatctgccattgcctctttttcgaggtcaacatcggctcattgacgaatgacgactgtgaatagaagatactgatacgaacgaaacttcggcccacattgggtttatgggcccaatataatatatatacgattcattttcttctcgcagtttgttttctcctcttgttgctgggttctcttctcgctaaaaacccagattgcagcagttttgtcaagtggcggattactggagtagcaagcagaatctttcaggtaattgatgatttacgtgttttctcctgctcaaatcaagatatattgtgaatgaatctttaggcagtttctttcctctgatcgagtctttgttttctgtcaataatcgaattcgagaatcgctgcttttatctggttgtatttgttcggagaaatttgatccttgcttgtagatattgtaagaacaatttgtgatacactcaaactgttcgataaaatgcctgaacgaaactttgcttcttttgcaatctttgatgcgaagtatgaaataatattttcttgagcatataggttgatgcaattaggtgatctaaatttccaatatcaaactgatgacgtttacatattccctgggaattgtcagctgttcatcaatagcattttctagttagcctttatgcttgacattaagatctcatgttactgataacgttctagctcgtggttagaatgaacaagaagcagttctagcttaagctaaagacaaggttgcttattgacaaagcaattcatctttttgaatctttcgatcccttactcacttttgtgtgcgtttactactttctgagaattcatcttttcacaatttgtattttggcttaacagatttcatttttgtaaattgcagagtttctggattctccggtgtagccagttgaagcttatcagtatacgctatgggaaatacttctgatgacgacaagatcctcagctatgaagatgttgtcctcaggagatcagatttggacatcctaaacggacccatttttctaaacgatcgtgttatcgagttctaccttagcttcttatccacggttcacagttccactaccatctcgctaatccctccctccattgctttctggatctcaaactgcccggacaccgaatacctcaaagatttcatgaaaccacttaatttgcgcgacaaagacctcctgatactccctgtaaacgacaattcaaatgtcgaggtagcagaaggcggattacattggagcttactcgtgtactacaaagaggccaacacgtttgtccatcacgatagctacatgggagtgaatagatggagcgcgaaacagctcttcaaggcggtttctccgtttgtgtctaatggagatgcatcatacaaggaatgcactgatacaccacagcaaaagaatgggtacgactgcggtgttttccttcttgctaccgctcgggtaatatgtgaatggttcagctctggaggaatgaagaaccgggatgagctgtggtttgctaatgtgaaggagactgtaccagatctggttaaccatctgagagaagagattttggcgctgatcaagaagttgatgtctgagagtgtgagtaagtgagagatggttattgaacgtggttagatattccggttggatgattttaactgttttccggaacttcaaacagttgatattttaaccggttgttgaaatcaactgttttactctattttaactggtaaagtcagaacaagactactatttgagcccattgttttggtgagtctaggcccaatttcgttcagtgtaataaagttaatatataggcccacgaacaagtgacgcgcatctacgtcatgacatcattttttgaaatgtcatgacaaaataataaataatctctaatactgtaaaatgcaaaagcgaaaaattatctgtaaaaatgatgaaactgtttttgttttttcatcacattttcggaatataaatattaccaaacaaaaatggtgttattaaaaaaattgtgttagaagcacataatgaaggaatgaaaaaaaaaaaaaaatgaatagaaagaaaaacaaaagatggtgaaaacgaatccattttctgaaatcgagaaacattttcactaaagtgggaacaaaacaaaagaaagctccgaagatttttaaaatagtaaataaaaagagagataggttctgcatgggaatctacgctttgatgctttgcttgaaaatggaggcaagaatattatgcgggtccctttggaaattgcgcctcaaatctctaatcctatcctaaaatcttctgtttattctattttatacacgtctctttctagtttactgttatagtataaatctatcaaccagtatgagagaggactacatgtttaaataagcatgcaaggctaacataaaatgaaaactaaaactgtactatacaaaaacagttttttttttttcttttggtacgaatgatatacaattgaaaaactagcttattaaatactattttagaatgtagtttctcttcgtatttgaggatataagattaggactatgtacaagcaaactagagtaacataaaacttggctctataattttgttttttgtcagagatcatttggaaatagatagatttggctatgaatttaaaaaaagaaaagaaaataaaaaagtgaaagtattcaaattgaaacactgactgtgagtgagacagcacatgccaagcaaaacctaatcagggggctgcgaccacttatcattcttccttctttcctcgatttccaccaaaattattccattctcattccgccacgtgtcatcccgtttgccgacatatgggtcccaattgtaccgccggccaatcactctgtcgttggttccgttttttcttatttcttttgctttagaaacgtttatttcagaaattagggtttcttatttgcttcacttgtcatttgcaggtactattcgtgtggtagttcatcaaggatactatccagagtacattttaagtatttttcctttataaaattgtaatccaatcacgtatatgaccaaagttatgactttacttgtttacaaaaaattctttaaaaataccacaatagtattcagattgagttccactactttttttttttttttggtgttctacttccatatacataatttcttcctacaaatttctaggccatctcttgtttcctatcattggtgcaaaatagaagacaaataattgttccagttatatcaactttggtcaattttaacgttagtttacccattattattctcattagtcttaaattttgtagtgtatataccaattaacgatcattatatttttttaaaccataattatgagatggaccaacttgatgcagtcattgatttaatcaaaagtagtaataaagtttttcgacttcatcaattgcctagaccatcaaaccaaacaccatccttaccaaaaaatcaaaccaaacaccattacaccaacggtataattaatcatctaaaataattagaattaaaattatcacattctaatgaaattataagtattaacttaggatgtatgaaaccaaagttgtagactaaacatccgaattagcattaggtcgaataggaattttctaaaagtgttatattggtgtaaacaatataacacttacagtaacgatcaacaaaaattacagtaacgatcactctataaactataataaaaatgactagtaccatcatgtcgagatagattgcaatatgattcatatatatgatgacatgagagagagctctcttatctatacgatctgctttaacttctttttattgcccatgaaattctagttttgtcacttgttgtcttaagacacattataaagcaactgaaaatattataactttgactggtcaacccaaaactcaatgtctttttcttccattcctattttccagtggtcccaccacttcagttattataatgttcgattcctgaatttatgattttgaatggaagattcgtgttatggatcacactctcattcctgtttcttcatctccacttctttcgaaaattgatctatgttaagatttataaattagtttggtattaacctgtatacatttgtcttttaaacctgccaatataattcttttgaattacgttcttgcctgtttaaaagtttggtggtcatcaaatttttggcttaatatcgtttcgatttggtatgaattgaatagaataaaccaagtcattggatgatgtacaattaggtttctccatttcgctattagtaaactaaatgattaaaaggtgtctgaactgttagtgctaagaaaaagacttagtgctataatatttttaataaacacaaatcatttacataaattgaacttaaaatttaaagatggccatcattattgggataaaatttgggagccacaagtaggtagggtccaaagggaaaatatccatataatgatcatcatcagttatatttggagaccaatgattgtttgtgaatggatcactaaattgttgtaaaaaagagaaagaacgaatgaatcactattttcctggcgggaattggtaataacaaaatgattttttttttttttccatcctatcaaacatgaaacgaaagaaagagtatagtaagtgggatttattgaatgattgatccgtctctagctacttccattgtcacattaacgttttcgttttcgtagtaaacaaagaaacatgttttcaactaagtagtaagacagaagaaaaaaattctagaggaacaagtaacgatcttattatgatatatactaacatgggttactcattttttttctccacgacacaagatttaacataaatcgtatactatataaagattacgtaaacaataatataaaatatactgtataatgttttgtgtggatatggtccttagaccaaatctcggtctttcatagaagtctctttcccgaaaaccaatgtggtagtgtgatttgtgtctctatgaactttagatccccatcagataatgcgagcacatcatgagctacacattgtccggcatattctttgcttttacttcatcatgtgttctatttacatatatacttatgattatttataaaacaatgtaagcgtatattatatccacaattttttaatttagatttcagagtagaattgtagttttattcaacaaattatataaagtataatagagtataaatttagaatgaacaaaaaattgtagcccaatatgtcttgacaaaaatagaaacatttgtggtcctatcaaataaagagtgttggtccaagatgatttttttttctttttgacagcaatgacattatatttgcttgattttgaaatatatgtgtttaaaattaaggcaatgggaatatggaggacaaatttaaaatctctttggtaaaattttcgataaaagaaacaagacattatcgaatattttttatgcgctttacaattcacataatcctatcaaatcacataaagaaaccaactcgacaaatacaaattttagtattaaaacacttgattttgctttaaacatcgaattagaatgtactcatatatgactgatcgaaatagaaaatcacatatatttgttcaatcctctagagtacgaaggaacggtacgttagggtccacaaggaagaacaagacattgcgatgagtatgggaccctggtggtgacaactcaacggaccattgagacagcaacacagaaatgacaaagaagttgagtgcgtgggaatccgacgtcgaacattatctctcatccatcatcgtacggttactattcatcttaatcaaatagatccgatttcacattattgataacgattgcaagtttgcaactcaacatttttttatttttttttatcgcttgaagaaattgaccgatacattattgtggaatgtggagtgacgaagcaagcttagtacatattatatcagactatagttatagattttaagctacaaaggttttatatagatctcaagtttttgatgtggttataggtttatagctttactcataacactacaattgagtagtaagtttagttgtttttatgagattatatagtaaaaagatttggtaaatgttatataaaaaaaattatgagaattaatttacactagaaaatatattttaaaacttacttcattttcaaattttagatatcaaatcatacaaaatgttgttttatgaaactaattaatatataaccttgtttgaagtagcaatttttaacaagtcttcaaacattaatatatgaagagataataacattattaggttatactaatttccacaggctatcaaatgtagattttttgttcgcattataaattttttaataaacggcggctttatgtctgttccaagtcacgttccgaattggttcacattattcttcttagcattgtttgaaatattaaactaataatatgagatcgaggccacaacaacaattgtgtgtctctctcctcccacattcccatcccatgtatatatacagatgcttggcttttccttttgcttcacttttaatttctactcatatccatcattctctctgatctcaagaaataatctcaaatctcttacactcatagtcttcaagcaacttctcagattcagctcttatggatcatttgttacaacaccaggtaaactacaattcaagatccacagtatctaacatcttgatgtgttttgttaatttgtctaattaagaatcttgatgtgtttattttttctcttttaaaggatgtttttgggaattataacaaagcaagagaagcaatgggactatcatattcatcaaacccaacaccgttagataacgaccagaagaaaccttctcctgcaacggctgtgacaaggccacagcctccggagctagctctcaggtgtccacgttgcgactcaacaaacacaaagttttgttactacaacaactacagtctcactcagcctcgctacttctgcaaatcatgccggagatattggactaaaggtggaactctaaggaacatccccgtgggtggaggctgccggaaaaacaaacgatccacatcttcggctgcaagaagcctcagaaccactccagaaccggcgtcccacgacgggaaagtcttctcggcggcaggttttaatgggtatagtaacaatgaacatattgatctgagcttagcctttgccttgctgaacaaacaacatccggggagttcttcacagctagggtttcattcagaactcggtagctctcatcagtctgacatggaaggtatgtttgggacaagccaacaaaaagagaacgctacttatgcgtttggtaacgggagcagcggtttgggtgatccaagcagagtcttatggggatttccatggcagatgaatggagagagctttggaatgatgaacataggaggaggtggtggtcatgtagatcagattgattcagggagagagatgtggaccaatatgaactacattaattctggtgctttaatgtagttcaaaattaaaaccccaatattatttgggttttgatttagggtttgaatttcatgttttttaatgggagtagaaaagggtggtagctattttatgaaatggttaaggaagtatagatatattagggcttcttcaaagagtttcaaacttgcaaaatggggttggggtagttcttgttttcgatttctgatctaaattgttgagtttctttatttgtatgttcactatgtttaaatgaaacatttcctttgttgttctaatttcttaattcattttttctaaattaagttttacgaaattcaaatggcttctggaatgaacaaaaaatgaaaattttatcaatgaaagaatagtttaccatagtatggaatgtgtggaataatttaccataatggaattgtgtgttcaaaccctaatctctcccattgaaacctaatcattatttctcctataaaaatctgacatatagaggcttcttaatggctcggttaataaggttgatgtttctacttaattgatttagtgacgtaaaggatcaatcttggtaatggtatataatgtcaaataagtattggtataatgtggactaattagtgctataattagtactctaatcaatataaacgagacaattttataattaagaaatcgaaagtgtaagatttaaaatgtaaatattgaatttattgagtgagaatgtaagaccagaaatgatgagtaagcaaacatctcacctaacctaattttgcttacataggctaattataacacttgagagaatgtttttattataagatatctttgttggttggtagtttctttacacacagattcacgtgtttatgtatatacaaacatgcattcacatatatatacacacctaaatgattgaataaatatgccagtaatatacttataatcgaagctaattaattaccccagcaagttaaacaatatacaatcggagcttgtagcatatttggcttatactaatgttgtcatggtatcgtaatttatatctttgaaaagatatataataaaaataataatatttaagaataaactataacaacttaacaaggaacattcacattttatcaaaaaaaaaaaaaaaaaaactacacgttatctggaacattaaagatattttatttcgtctagagagtccaatattgaatcttctataggacccattgggctaaggcccacaataactccaatccttctaaaattaaccagaggctttcgtgcctttgaatgatgttaacaagcctaactggttccgtaatgacagatttagtagtttccctccagaatacacttaaacaacaaaagtaaaattaccacagctaaaaatctttggaacatgtattttccacaacattgttctcaaactactaattcacatcgataccgaagtcacatgagttgctcttataatccaactccaagtcgacgatacctgagaagcagaaaccgtgttggggaaagcaaaagttagtttcttaagcgaattgagagagacactgactaaaaatatagaagaggttacctaattatattaagttattctccaactatttctgaggcttcttccacaaaactccaatcttcttgagcacattcccatttttcttctttgtcagttcatcatcgatatcctcagagtacggggagttcgtttgattatagttctcagcgaatttcccgttgtttccagcagagagcatggcagtagctgcttcagcagcttttctccattggtttgattgaactttgagcttcctgagttctgtttccatttctgagtttgaagcttgagtagcctctagttgctcggtgactctaaccgctttcttgctactcttgtcagcctcttccattgcaatccctagcttcaggaacgcgtcttgtacatctgtctcgctcttgtggatatctgacttcaatgtctcgttctcatctgaaacgatctggagttctgtttctttatccatcaaatccgcctttaaattctcgatcgcctcccttagtttcttcagctcagcttcaacatctatttctttctggttcttcatcagtttcatgctaaagttatctctttcctctgaaataaactgtaattctgtttctttgtccatcaacctcgcctttagctcgtctatctcagatttagcaatctttaattcagactggagttcagcttgtatccgtaaccgagaagaagcctctacattaccttcttggtcttttttatcagaagcttctagagctgctctcagtcgctctacctcacatcttaaggaagatacttcttcatccatctcatttgattccccacgtctcaaactttcatagtctttaagcaggatttcgtggttttccaaatctgctggattgttctgaagtttattcacaagagcttcaagccataccatccttgattttgactgttcaagctccacagccatcttcttgtaactctcaacagcttttgtgccatctgacttcagttcttctactgcctttttcgcattctccaattgcctaagagtttcagtggctaaagcctcggtttcagcttctgatatctcacagtccttaagttggttcctgaaattctcgacgtggaaaagcgtgtccattaagtttcctctcaaaagttgaacctctgagttatacaactcagcttgtttcacatgaccagcttcagaagaagccaccatctcaatctgaagcttgagttgtcggatctcatgagcaacagcagctaatcctgctctttcaccagcagtagcactaaactcccaatcacactcctgagatacactttgaaaaacaagagaaccggttttatcggtttcttcttccaaggctgaagtttccacaaactgattctggctctcctcaagcttagaagaaacttcttggagctgtttcctggactcctctgcttcttgttctgcttgcttctttgatgtttcagacactgagatttgatctttcgccttttttagctcctcctgaagctgcgagactagcaactctagctccgttattctactcggcctcttcttctgttagccatcaaacatatcaatgttacatcaaacctcaagaagaagaaaaaaacagacaactgagagtgaaatttagttacaaatcatctctcaactaccccaaattaaatgtcccacctaattatatatcccataggtaccgaaattaaatgtatcctaattttttcctctttaaaatcaatacagaaacatgttatgatggaaaaacttatcttggatcatgcaaattaaaggaatttatgaaatctagataccccaatgaaacaataaacaatgaattatttcaagacatttagattgaatctgaaaccagcttagtacaagaggctcatacctcagagacagggcttcgaggagacctacgatttagaacgtttggactcttatcctttggtgttctgttagtagctgagataggagatgaagaagattcaggctctagcgctgcgatcttcagtggccgagcagctcgaggagacaccttcttaggaacatccggagatccatttctgacacaaaacagaaaagaatgacaaattgtaaaccaagaagatatcacactccaaagttgcaagcgagtcagaaaaccaaaagagatcattgatggtcactacttgttgctacatagatttggtcttcttgttcgataaaagattagagaaaatttgtgataagatttgattaaataggaaaaaaaataagtattcaggaccacaagaatgtaaccttcaagattcagcgttgaaaaagtgcaaaactcacacaagacaatcacaagagaggggaagaatcagctataaatgcaaagaactatacaaagccaaaaattaatatttaccttgccttttgggtctgcatactgtaatattacttctccaaaacacaggatgaatcaaaaccttgtttatacaaaagatatttttagcctcctctttgtttcttcaatgtagcctgacccaccaagaattgtagagaggtcatgaatatttaatgcagaaagatggagacataattaagaatccaatggcagagagaaaacatgataggagttattacagagaaaggataagcgtaaaaaaatatatctttacgtctataatcaaatccactaccagaaatatgaacatcccaaagaagaaacaaaatcttttattgctcttctaactagtgtcttatgtcagagtcagacattgagattcgttggattgtgcattaataccataaaaccgcattaagatctgagtgcatgccctcgtgtttatgattcttgatcaaacatctacatagctctagaacaccaaacaaaaacttggtctttactatttcactcaatagagaatacaacacttgattcaatattctaaaatggactgatacaatcaacacaatcagagtcacatctcaggtgaactagaagcatattgccaaaatatgatttcaaagactgtatagttaagttttgttctggatttatccaatataaacccaaaaaaagaaagaaaaaaacaattcatatcttgtcattgtaaccattgtagctaactataaaagttgtttgactataaagtaacataaaacgaatcttcattggttgcctcttgacaatgtaatgttcacaacctatcatcatgaaggctggtaccaagggtcctacacaactacacaagcagcataatgtggtagatttactttaatgtccccaccagattcaccctccaaaatgggacacaagagggttaaactgtcaattttctagaccaagtttcatcttctcctccattattggcgtggaaggaggggacttagacgttaaagaactactatcatgaatcataatgagtttcacacattttttcaatataagaaaaatcaacagataaatacccacccaaagggaatcagaaatctatttggtttcatggataaagttttccaggaaaaaggagtatctaattagtaaaatcacttgagtgcaatgatcatgttaattaaagcaagcatgagcaaacaatcacagtgcagcaaagaaaagcctcaacatttaaccttaaaagttactaaaaacaaagaaaaaaaaagagttcctttttttaatcaaaccacatatgaagaactatcccaatattctactttaaaagtaaactaatagctgaaataataattacaaactaaaaaagaagaacaaaaaggagacatttttatatttcaaggtccaatttcttcagagcaaaaggtcaagttcctagttatttcaacatttacatggagtaaaaagttagtaattttacttatgatttaagctaaatgagaagggaacctaaaagaccagagctttctgaaacttaacatgtgaagaagaagcagaatatgcaaaagaggcaacgaaaagggtggaaaaaatcacaactttatctcaaaaaagaaactacattttccaggaaaagctaatgcaactttcaggagacagagtaactaaaagttttcatgagaatataatcatcagaaccaaattcagaggaataaaaggagctacttacgctgcgagaagggtttgaggttgaagaaaagattcaatttttgtttaaagaaaatgtgggtagagaagcaaaacctaagttttctttttctttttaggtattttgcagattccaagaggaaacagtgtgtgagagagagaagagaaaagtgggtaatgtgtgttgtggctttgggcagtgagtctgagcaagaaagagagagagacaagggaacaaaaggttattccaaaacgcagcacgacaaagcgtactcctttgtcgttttgatgatagtttttgatttttgaattttcatttccggttttagaccatttcccatgtccaaaccaaacccggggaatctttatagactatttctttaattttagttgtttagttgataatttaattaaatcgtttctcatgcacatatttgtcaacaataattgcttattgactattttattttgcctctctagtcgtcgtagctaaaatgtatgactacatcgtttactctgtaacttttatggagtgtgaattcaaataaaatccaaacaaagaaaaatctgatcttaaccttattcagacacgaagtataagatattcttcatgttccttttgtttctgtcaagtatcatcaacaaacaatcaacatttactttttattatccaaagtaaaacgtaaatcatcaatagtctagcataaatgggccctaagttagcttattcattttatttaccaagcgtccaagcccattcacttatgacttaccattttttaataaggcaccatttatgttactaagtgcaatgcaattcccggaaatttagaaggagcccgttggattgaggagacttgatggtatcgtcggttgggaaaaacttttttttttttttttttttttgtcaaggtgaaagaaaaaaaaaaaacgttaaaaataatatggggtcctgctaaacttaaaatatctgttttcgttttacggttacatttgttaatgtaatgtaaaaaatcatatctgcctaaaaaagttattaacaaatgttgttcaaaaacacaattgtgttaaaaatatttaatcaccgttgtaatatttcttaattctagattttcaaagaaaaattattgaaagactattaagtatatatagattatatgacattaaatttatatagattattttttctttgggcaactataaatatatatagattattcagtcaaagtaactaaaaaaaacaaaaaaaaatctagttaaccgtcacttaacacgtgtcataatggggcagcatgtgcatgtccattgatgtcattcacctttatcaccgctattttcatcaagaacaaaacaaacagaatcacacaagaaacagagcaacaacacatattcaacaaaaacaaaatcgccatgagatcgagaagtaaccttataggtctcataaacttcttcactttcctcctgtcgattcctatcctcggcggtggaatatggcttagcagccgagctaactcaaccgattgcctcagattcctccagtggccactcattatcatcggaatatcaatcatggtcatatctttagccggaatcgccggagcttgttaccaaaacaagttcctcatgtggctttaccttttcaccatgttctttgtaatcgctgctcttataggattcacaatcttcgcttacgtagttactgataaaggctcaggccggtttgtgatgaaccgtcggtatcttgattattatctcaatgattattccggttggttaaaggaccgtgtcacagataatggatattggagagatatcggatcgtgtgttagagattctggagtttgtaagaagattggaagagatttaaatggtgttccagaaactgctcatatgttttacttcagaaatctttctcctgttgaggtattattattttttttgtttaaaagaacatactagtgtactcttaagaaactattatgtcacttgttcttggaatctaacacggtgtgaacgttatatgatatgtatttgttttcaatctgtagtccggatgttgcaagccgccaacagattgtggctatacgtacgtgaacgagacagtgtggattccgggaggagaaatggtgggaccgaacccggactgtatgttgtggaacaatgaccagagactactctgttaccaatgcagctcttgtaaagccggtgttcttggtagcttgaaaaagagttggagaaaagtctcggtgatcaacatcgtggttgtgatcatacttgttatcttctatgtcatcgcgtgtgcggcttaccagaatgttaagaggatgtataatgacgaaccggtcggtgaggctaggatgaccaatctcatcctagtcattttcaaatttaaggagattttggtacagtttttcttcggaattgtgtttttattactctttaatggtttaatggtctgttgttgtaatgataaatttgcttttagtgttttcttctttggatatgttacatatgcatgatgatgattgttcttgcagattagttgaaagaaatgctactcatctttatatagagtagaaattaatttaaagttgatatgaaaaattcaaaccagacatgagttaccgagaatggttcctcaaagagtgttcaaattactcacgttgggaacatgttgttttgaatttgtggattgatcttcacgactgagttctgggctccatctacttatcgtttgttcttccactgtgaagttctccaaacatacaagtagattcacatcctctcctttgaagttaccattaacgtagagagtcaacaacgttttcgcaacacttccgcttaacctaacagcacaatggatatctgaccacactcttaaccgatcactgtcaccagactgaactaaaaccgagtattcagagtggacaagagatggatggtgacggtatgccacaaaatccacaccgtattgcaaccctgatctcaaaacccagttcttcgatcgtaaatgtgaataagctttgaaaaacattggaaagtttggtctttttgatttcatgtagagccatgtgtctacttcattctccaagcaacgaccttgaagtgagattttgatgcatttgagattgtaatgcaaaaagaaagcttcttcaaaagataactgaatccatttcttgattttctctgccgatagaacgagtctgccaaaacaacaacggtcaagaagctcagcttgctctggctcaaccgctagaagcacattgcaacttgagagggttcccgaggactctgtttcggctagagagagctggagctctgagactgattttgaaataggttctgcaagagcttttgcttcagctcctttccatttccatctaggcgccatggaattgagctgcatatatagcactaaaaatcaaaccttttgaccaaaagatgtaaaagcttttcttagtctattaccaactacaactcttataatctaggaaatcagataaacattgtcactacgacatagttgttaacgtttaaggtatcttgaagaaccaagtaggaattggaatgagcaaaaccaagagcttttgattcttttcccacttttgtattcaaaaatcaatcgtctatgaagcggaaactgtgacattcaaattcacaacaaaggtattttgaaatagtaaacacattttaattgaagaagcaatcacattcagacttgtcctcacatgacagtaaccatgaagagaagagatttggttaaaaacgaaacctggcgtattgatttatgaagaaaaaacagaggatatgaaggactcgggaagcagggtctacaatggagagagctatgcttcgaggatccaatggagagctatgcggtagtgaaaaacgtaatctcgtaaaaattattgttgatttcgattgcacagtgaaaatagaaaagaaatagccacgaagattcttcgaaatcgagaggaagagatcgagaattgaaacgagattcggatctctctctccctggggaagacagtcgcgcgactcgagcagcagagattgtggtgcctactgagtacctcgtgtgaagtctaaaaacagcgtcgttttcagctaaataaaattctacaaaaatgacgtcgtttggaataattttgtttgggctgcctatttatacatgtctaggcccgcgaattttaagtctacagtatttatttaaacatcatacacaaaatccgaaacagataattttgattcaaattggtaactatcggaagtatcggatgagaaggaggaaaaaaatgctttgcttatttcattaattactaccttgatactatctttaataacagatttaatttgatattatagattccactttttacttaactgattgataagatggagataatagtttacctttttatttactggttaaaatcgagaatttatggtccattgacttcttttgaccaagtttaacgaagaagcgtctcatgtaagctattcacaaatgacgttggtaccccttcccacacacgtatgatgtgattgacggttctctgtatatatattaatttaaaggacgacgtaaagcaaaaaacctattcgtcgtcactcgtctgtcgtcaccattcatcaacagagcataacagttgctgatttaagctctgcggagagcaagtatggatttcgattccgagtatgcttttcggttacagatggaggaggcactcgcggcttctctatcttctcaatctcgcactccgcaacgaccaccgtcacctccgattgtggctacgtgtggtgtccttatcgttgaaaacaatccaaacgattcgaagacggcgaaaacaagtagcggttacggtttcgattttaagagagccgtcggcggtggaaactctaaagcaaaaggcaaaacccacgagtctgtcactggtgtacgtacagatgaacgaaaccctaacattgggctcggtaactcccggagtacgtctaccggacatggcaatacgaaacccttgcctcaggaaactgttcgtccggcgcaattagtcggtgagggaagttcgagggttaacactgctgccggaaaaatcaatggaaacctcttgtataggctttactttaagggtttggttagcgatgagaacgggaaggggaagatgacggacgtagtgtctgggtttggggttgctatttgtgaccagagggataatttgttgtttgagatgaagggaccattgatagacaatggcatgagtcgtcagggagcagagcttaaggcattgatccgaggactaaccgaagcattgaagttggggattaagcatattgttttcttttgcgattcttatccgattttccaatacgtaagtttccgattttcatagtttatcgactttgtttatgtattttttaaagatgatctagtttgttctctttgcaattcgttttaactttttcctcctttgtcctggtatctaatagtgttgtgaatattgtaaccattttgcgctaatttttactagttatgagacagtagaccgtgacttataaggttctatgcttgtgttttgcgagatggtttaaattgcaatgagttatgtttctttacctagcttttcctgtcatatgtttgagaagattgtattgtacttgaatgtaggtcacgggaaaatggatggctaagcaaaagaagatttccctgttgttagatgatcttcaaagcatcatgcaacacttttcatcttatcagcatgttctggtggctagaaatgatgttaaatttgcttataaacttgcaagggaatcaatactttctatggtcacccctcatgaagatcctcgccaagcaaaagctgttctgaaagaggagtgtgctatctgtttcaacgacatcgttgctgagggtatgttttctgttgacaaatgccgtcaccgtttttgctttcaatgtgtgaaacagcatgtagaggtgaagctgcttcatggaatggctccaaaatgtcctcacgatggctgcaagtctgagctggttatcgatgcatgtggcaagcttttgactccaaagctgagtaaattgtggcaacaaagacttcaagagaatgcaatacctgtcacagagagagtttactgcccttacccgaggtgctcggctttgatgtccaaaaccaagatttctgaatctgccaagagcttactgtctctttaccctaaatctggagttaggagatgtgttgaatgtcgtggcctcttctgtgtggactgtaaagttccgtggcatggaaatctgtcctgcactgagtataagaaattgcatcctgagcctccggcagatgatgtgaagctcaaatctcttgcaaataataagatgtggcgccagtgtggcaagtgccaacacatgattgaactttcacaaggatgcaatcacataacttgcaggtatctatctatttctctacacattgatcctcctataaaccttatcaaacaaggccatgtaagctaaagcacatgtgatggattgcaatctttttatctatgtttaactattctgacattccctttggtattctcattagatgcgggcatgagttttgctacaattgcggaggtggatggaacaagataatggggacttgtttaaatcgctgcccaacctggaacgaagaatacatcacacgacaagatccagcgcgtgccaatgtggcagctaacaactactttgatgatgaggatgatgatgatgttgatggtgattacgactatgatgacttcttccacccgcattttggacatgctatgaatgatcgtaatcctgaagagcccttcgaccccttcttcgacttgccagatggtaatgtgtccttccaaatctctctaaaactcttgaatcctatatatttcacaactgaaagcactctctgtttatctgtaggtgtgctctttaccccccagatgttgtcttccaagagtcgtcagcaattgtacttgccggattcagatgattcagatgataatgcgacaacacaaaatgctcctgctgcagatgagaattgcccatactttgggaagtatggaaagtacactataatgtacgactccgacggctatgaactcgaggatttcacgaaccctttccatcctgactatcctcacttctgaggtttggtttggaaccaaagttcgtatttttctttcttttttcaaggtccaaacccttttgctatatgctctttactctttaatcgttttttgaggttcatgtttctatgacgtattgttctatataagactgtttgggtaatctttgaatttgaagacacctcgggattaaagttttttttttttccaaaaggtgtctttgtatatataacatctaaacaacagcatcatccatcaatggagaatccatgttggagaggcaagtacaagatacaacaacaacatttacaaacaacgaaatacaagtaaagtacaacacattctgccacaaaagagaaagttgtcaaatggtagcttgttaagagcaacatcataactaatctcaataagaccaaacatcaaaactcaaaaggtttggagttgatcttatagcttccatcatatgcttgtagtatgattgctttgtgctcaccatcttaacatccgaacagggtgatatcttctactctgattataagaaaactaaacagataaaagcataaaactaaaacaatctagactagaagcttaaccatgattaaaaagccaaactaaaataaaaatcaaaagcgataagaaagagataaggatggcacaatcaaccaaggaaaaggtgagtcatcaaagtggccggagagataccggaccaacttctccggtaaactgaaaaagattacagaaccttcaaaaccaccatgcccaaactaattccaaggcagcaaaaacatccttaactgctaaaagaaacatcttcttctttattcaatatgtcacaaacgaagattgagatatggcttcaaaaaccttcgagaagaagcatcttacacaaaaaccggccatgacgtcgccgaatgagccaacacatgccggactcaaaccgtccatcgccataaaaaggaaacggtcgatgacgaaaatgatagccgacccaacacatcgaataataagccggtcgttgtcggactgaagccggttgcaacaactggacggccttgccggaattaaccggacggctttatcggaataatctgaacggcggaagaaatcaagtttttctctctagaagatttaagagagagaagagagaaaaactcatctccgttttccccgacgctcatgacttgggattaaagttagagcattgttttcgctatatttttcgtcgtttggttattggtttcggcttgctcatctttttatttcccttcaatgggattgatagcgaacaagtaaatatatttttgcattcctatataaacattcgtattaaacccattttatatagctcacccacccacttaccctttggcgaaatcaattctttgtttttttttgtctaactcaccgtctctgtctctgaattcccagctggagatatcagtcgccgtctttttgctcttggtgaagatagattcgagaatcccgaaggttctacgattaccacagagaaattcactatagtgagtaccccatctattggatttgcagcaatgcatacgtctcgcagtcaataagctgaggcggagtcacgtacatggactttttgcttgagctttctaccaaataacccacaggttcgtcatttcttagtatagtgtcatgttgaagaattttcggtcacatgaatgttcaagttaaatcgtatattgttctgtgatgagaaagattataatctgcttataaacactgttccttcatatacggttaataatctctaaacttttgttttaaaatgattatgttaaatcacatactcaacaacggaagatgaagaaatgtttggattcaactaagcattatattagttatgcgtaatctgtagctgtagagaacatgatcttattgaattttgtttcttttgttgatgttttaacttctaattaggaagattgtaatctggttatgatatttttccttaaattaagtgttttactcgtttcgagtttttgttttctgctgattatggccattacaagacgcaacaatggagaaagaaaaagtgtttggataatgatgttactgatatggtcactttattcacaatattcatagttttttttttttcttcttatagatttggttgcgggctcctcgctgcagaacaggacagaaagagactgatatgttaatgtgcaaactcgaatacaagcaaccgaagcaaataggagatgtgtttttcatccaatgaaaggtaaggctactgatgttattgagactgtgaaccttcaatttcttatatgacttgcaagttagattatgaaattctattagaataaatttggtgcatcctaggaatgttaggaatttgatatgaggatttaataataacatttatttgacatagccaacaaagattaggaaggatggtggaaatttccatgaagcgtgtggaaataaacattctgagttttttaagggtggtaggattgaaaatggtcattgttcaataaagttgaccttggcatactataataataatatacaaattgcattaagaaattatcaaccttatagtatcttatattatcttaatgtcaacgagtttttcgagccccataatttaatttatacagtcaaacgcaatagaagtgttatccgttaaacttgagtgtatgaccaaaattttttaagtcacatccaatctagtggctctgccaactagagacgtttttatccagagatttgtttagcaccgtcctcctttgccaatgatcagtgttttgacattttcctcttaaataatattaaagaccaatcagtccaaacttttttacctctttctttttctcatggaattgattttgctgtcttgatttagacaggtgttggaagtcttattaagggaaaagtaatataccataaagataccaaagcagtcgtaatatttgactttgaagtcgtattcaatgggtctacagccagagagaaagagataattgtgaagcattgagagcaaatagagtatacaaaaacaaaagcgaaacgataactctctatttgtttcattaccaatgattcgaggattgcttttgggaatcatctggatgatattttgtgtttgttcatcatttcagcaagagacgccgtttgtttacaacaactttggtcacgtagatcatcttcaccttgacggtagtgcaagaatcattcccagtggtggtatcctgcaactgacaaatgcaaccaatagccaaataggtcatgttttctacgagaagccgattgagttcaaatcatctgaatcagtctcgttctcgacatattttgtgtgtgcactgctccctgctggtgatccgagtggccatggcatgaccttttttgtgtctcattccactgatttcaaaggcgcagaagcaactcgatacttcgggattttcaacagaaatggttctacttccacacgtgtgttggctgtagagcttgacacttctctagcttcagatgtgaaagacatcagcgataatcatgttgggattgatgtgaacagcgcagagtctattacatctgccaatgcttcttatttttcagacaaagaagggaagaagattgacataaaactcttgagtggtgatcctatccaggtttgggtggactatgaaggaacaacgctcaacgtttcattggctcctcttagaaacaagaaaccaagccgacctcttttgtcatcaacatccatcaatctaactgatattttgcaaggtagaagaatgtttgttgggttttctggctcaaccggatcaagcatgagttaccagtacatactcgggtggagtttcagcaaaagcatggcgtctctgccgaacattgacatctcaaaacttcccaaagttcctcactctagcactaaaaagaagtctacatctcctgtgctcagtgttctgcttggtttaatagctttcatagttttggggattcttgttgtagcttatttgtataggagaaacttgtactctgaagtaagagaggaatgggaaaaagagtatggtccaattaggtattcctacaaatctctatacaaagcaaccaaaggattcaataggagtgaatttcttgggagaggaggttttggtgaagtctacaaaggaactctccctcggagcagagaactgagagaagtagcagtgaagcgagtatcacatgatggtgagcacggtatgaagcaatttgttgctgagatcgtgagcatgaggagtttaaaacaccggagcttggttccacttcttgggtattgcaggagaaaacatgagttattactggtgtctgagtacatgccaaatggtagtcttgaccattacttgtttaatcatgatagattgtctcttccctggtggagaagacttgcgatccttagggacatcgcatcagctcttagttacttacatacagaagctgaccaagttgttatacacagagacatcaaagctgcaaatgttatgttggatgcagagttcaatggaaggttgggagattttggtatgtccaggttatatgacagaggggctgatccaagcacaacagctgcagtgggaactgttggttacatggcacctgagcttacaacaatgggagcttctactggaactgatgtgtacgcgtttggtgttttcttgcttgaagtaacttgtgggaggagacctgtggaacccggcttacctgaagcaaaacgttttctgatcaaatgggttagtgaatgctggaaaaggtcttctttgattgatgctagagatccaaggttgacagaattctcatcccaggaagtcgagaaggttctgaaactcggtttgctatgtgcaaaccttgctccagattcaagaccggccatggaacaagtggtgcaatacttaaatggaaacctagctttacccgagttttggcccaattctccagggattggagttctgtctccaatggcgctttccccagcaccactcgtgatcccttcactatcattttcgtcttcctcctccaacaactctatgtttattactcactcagtcctctacgggagtgggcgatgaaagtttctaacaacttccctcttctttggcctcttaatattgactgattttcagccatttctattcagattttgtttcattaatgtatatggtagcaccatgtccattctccatgaagcttagcttgtagaacgatttttaaaaaactgatttttcaggtaaattcttgcaattacttagttcattatttgtaaagcaagttgttgtcaccatttgagtacagtgataaattgttatgtattgagaaagctgatatagttatggatttgtttcttttaatggttatgctattttggaaaactgatagatatcaaaagacacaacagtttagtctgtaactaaccttattcatgccagatctcaggtacctgcaatatattattgcaaatcacgtatcctaggagatgcatgtttctgcacatttgagtaggctcttggcttttaaagagttaaaatactcggagatagtgacaattcaacattttatttcgtttaagacaagtaggacttggtatgacaatcaatgagaagcttgcctttcaaaactgtgaaactacaaggaaattttattatgtggaacttctgaattcttttatcaaagaagactaaaatgtgacagctatcatattgttgaagtcaactcttaccaattctcttggaaaatgcagaatgttcttcttcttgtgaagtaataatccgaccttgtttcgcagatggagaggatagttatttgccataccattgactcagagacaggatttttctcagaacagcaaacactttgttgcattaacaatggctccaggattggatctgatctggatggtaatctcctttcttcttctgattcatctgtcaagtcaacaagaaactggcttcagcttcaacggttttcgccagggagatcttcatgttgatggggttgctcaaatccttcccggtggacttctgcggctgactgacacttcagagcagaaaaagggtcatgctttcttcaggcagcccttagtgttcaattcatctgaacctctctcgttctcaacgcatttcgtgtgtgctatggtgcgtaaaccgggagttaccggtggaaatgggattgctttctttctatctccttccatggatcttacaaacgcagatgcaactcagtatttgggtcttttcaacaccacaaccaacaggtctccctcatctcatatctttgctattgagcttgatactgttcaaagtgcagaatttgatgacatcgataacaatcatgttggtatcgacgtgaacagcctaacctctgttgaatctgctccggcttcttacttttcagacaaaaaaggtctcaataagagcataagtctcttgagtggagattcaatccaggtctgggtggactttgatggaactgtactaaacgtttcattggcgcctctagggattcggaagccaagtcaaagtcttatatcaagatccatgaatctttcagaagttatccaggatagaatgtttgtcggattctctgcagcaacaggacaattggctaataaccattacatactcggttggagtttcagcagaagcaaggcatcgttacagagcctagacatctcaaaacttccccaagttcctcatcctaaaatgaaaacttctctcctgctgattcttctgttgattgtacttggaatcatactcttggtactcctggtaggagcttatctatacagaagaaacaagtatgcagaagtaagagaggaatgggaaaaagagtatggtccacaccgatactcttacaaatccctgtacaaagcaacaaaaggattccacaaagatggttttcttggtaaaggaggattcggagaagtctacaaaggaactctacctcaggaagacatagctgtgaaaagattttcccatcatggagaacgagggatgaagcaattcgtagctgaaattgcaagcatgggttgcttagaccacaggaacttggttccacttttcggatactgcaggcgaaaaggcgagtttcttctcgtctccaagtacatgcctaatggaagtcttgaccagttcttgtttcataacagagaaccatctcttacttggtccaaaaggctagggattctaaagggtatagcttcagctcttaaatacttacacacagaagctacacaagttgttctacacagagatatcaaagcttctaatgtaatgttagacacagacttcacaggaaagttaggagattttggtatggctaggtttcatgaccatggagcaaatccaacaacaacaggagctgttggaacagtaggatacatgggacctgagctaacatcaatgggagcttcaactaaaaccgatgtatacgcatttggtgcattgatccttgaagtaacttgtgggagaagacctgtagaacctaatctgccgattgagaaacagcttctggtgaaatgggtttgtgattgctggaaaaggaaagatttaatcagtgctcgagatcccaaactgagtggagaattgatacctcaaatcgagatggtattgaaattagggttgctttgcacgaatcttgtgccggaatcgagacctgacatggtaaaagttgtgcagtaccttgacagacaggtttcgttgccggatttctcaccagattcaccgggaattgggattgttactccggttttggtcggaggaagctccaccgtgatctctaacatttcttctccggtgactgagtttattactcactcgattcaatacggaattggacgatgagatgtaaaatttgaagcttgaagatgaacgttgttaacaaaaagttgatatggccgagttggtccaaggcgccagattaaggttctggtccgaaagggcgtgggttcaaatcccactgtcaacattctctctttttttttttttaaacgtttgcaatattttactaatgtatatattaatttatgaacatacccctttgtgtaattaatttataactatacccttgttaattctctgatttacaatattgaaagtcttctgggaattttgggagacaacatactccaatttcagtttcttctggaagaaaatcttaattttgctacaatggtgaaccatggaaagaaggaagcctggattatggctctggacaaggtgaatttcctttctctgcttctgggtattgatcatcaaacatgagttctggaatttaaaggttttgagcgattctttagctacgaaatgtgtgaagaaggaataacttcagttcagaacaaccaaccaggctctatgtttcaattagatacagctcaaaggttttcatctaatctggatgttctcatgtggtcttctaaagtcaacaagaagctctgggtttatggctttggccaagcttcctttctaatggattgttttagctgatctatagttcggggatgcaaatgggttacggtttctttctaaggacatgtcttcttattctgcttatcttactggtaattatagcgctcatggttcttggagtaggatatctattcagaaaaaagacaagacatatgtagatgtaatagaggctttcatgcaaaaaagaagtagtagaggcatgagaggaggttcttcctggtggtaaagacacgtgtttctaaatggaattgctttagctcttaggtagttatacactgaaatatcaaggcttctcatgttttgtaaaatgctgagttaaaggcaaagtgagtaggttttgtgtgaccatgggtccaacctagataccgttgtctctgtgcgaactttaggtcaaatcgcatggagcttgcaacaatggctgtttgcacagtaactgacatgtatgcctgtatgcttgagcaaacttttggaaaggaaactgtgtaagctgggatgctagctgatagactgtttgaaaatgttggaaacagataagatctgagttcagcttagaaaatagggtcgctttgctcaaatcaaatggtgtgccagaactgaaagcctccatggaagaagtggtgcaatatcttgaagttggaacctggtcctattctctgctgattgttggaatcttccttcattagcagttatccagaaaatgttcaaagctaccacaaggagcaggtatctgaccattaatctcttatctgatttatcactatacagtaatggattttcaccaagttaaaatttcctgctgccacaaaaaactgcctagctacctctgcggaatttaggttgtctaagcaaactaaactttcttctatctaattttgtcccgctggtggtgaggctactatgacataaccaaacaatgaaagaatatgctctatgcgattccctctgtctattatcttctctccaatcttagtttcagtgatttgaattgttgttcatgtgacgatgtattctcctgcacctgtagagctgaattagcaagtcctaaagggttaggttagtaactatatatttttgtcaattttcatattcaccatttaaagaaaattcgtagttttcatgaatatgacaggctttcctaggccttttccctttggtcgggctcataattgtgttgatattattacaaaacttggattttttattcattctacgtctgaagggtcaagggcatgtttaaaatatgtttaaaataatatttatttgtctgcgtccttctaaagatggcttcaaaattcaaatagaagaaaaatccaatgcaagtaggtgtgctatctagtcctacacacattttaaggaatttataaatgttagtcatacgcattattattgttccagggtacctccatgcaacagttgcgttgtctatctaataaattgagatcatataagttaaaatattgtgtcagaatattttgaaaatcacgttgaagctttatggttatctttttaatataatcgtgttagtggagtacagtttgtaaagcaaaggtgattctcttgattaaataaacatctattagaaagtttgataggcttgaatcactgatacagaagcttacatcctctttttgtccattttttctccagcttgcgaggttatgattcatcatcagatccagactctctgattcatcatctgcaatggctcgttggttgcttcagatcctgatcatctcttctcttcatctgagctctgtatcaagtcaacaagagacaagctttgtctatgaaagcttcctcgaccgacaaaatctttatcttgacaaatctgcaatagtacttcccagtggattattgcagttgacaaatgcttcagagcaccagatgggtcatgctttccacaagaaaccaattgagttcagttcatctggaccactctccttctcaacacactttgtgtgtgctttggtgcctaagccaggttttgaaggtggccatggtattgtctttgtattgtctccttctatggactttactcacgcagaatcaactagatacttggggattttcaatgcttcaacaaatggatcttcctcttatcacgtacttgctgttgagcttgacactatttggaacccagatttcaaagatattgaccacaatcatgtggggattgatgtgaacagtcctatatctgtcgcaatagcttcagcatcttactattccgacatgaaagggagtaatgaaagcataaacctcttgagtggaaaccctatacaggtctgggtggattatgaaggcactttgctcaatgtttcggttgctcctcttgaagtccagaagccaactcgacctcttttatcacaccccatcaaccttacagaactttttccaaatagatcaagtctgtttgctgggttctctgcagcaacagggacagcgatcagtgatcaatatattctctggtggagttttagcatagacagaggatcgctgcagcgacttgatatctcaaaacttcctgaagttcctcatcctagagctccacataagaaagtatctacactgattattctcctacccgtttgtctggctattttggtgttggctgttcttgcaggactttatttccgcaggagacgcaagtattcagaagtatctgaaacatgggaaaaggagtttgatgcgcatcggttctcttacaggtccttgttcaaagcaacaaaggggttcagcaaagatgaatttctgggaaaaggaggttttggagaagtttatagaggaaatctcccacaaggcagagaaatagcagtgaaaagagtgtcccataatggtgatgaaggtgtgaagcagtttgtggctgaagtcgtgagcatgagatgtctgaaacacaggaatcttgtaccactgtttgggtattgcagaagaaaacgagaacttcttcttgtctcagagtacatgcccaatggtagtcttgacgagcatttgtttgatgaccagaaaccggttctttcttggtcacagagacttgtggtcgttaagggtatagcctctgctctctggtacctgcatacaggtgctgaccaagttgttctgcaccgagatgtcaaagcttccaacattatgttagacgcggagttccatggaaggttaggggattttggcatggccaggtttcatgagcacggaggcaatgcagctacaacagcagctgttgggactgtagggtacatggccccggagctaatcacaatgggagcttccactggaactgatgtttacgcatttggtgttttcatgcttgaagtaacctgtgggaggagacccgtggaaccgcagttgcaagttgagaaacgacatatgatcaaatgggtttgtgagtgctggaaaaaggattctttgcttgatgctactgacccgagattgggaggtaaatttgtagctgaggaagtcgagatggttatgaaactgggtctgctctgttcaaatatagtgccagaatccagacccacaatggaacaagtggtcctgtacctaaacaaaaacctacctttgccagatttctcaccatacactttggggattggcacatttgctccggttctggtagatgcatcctcccttgtagtctcttccgcttcatggagtttgtcaggtccatcgatgtcttcatcctcgcccaaccactcaccttacgcttggcagtcaacagatcagccatggggacagacaatagacactaagaactctcttcacatagttgcagaaccagagaagccctcacccgctgtcaaaatggtcacattgcctgcagaagatcctcagtccaatcattccagcatcagcagtcagaggtaaattagtgatgtacatatcagcaagaagatatcattattagctctcaatattgttttcatctgtctcacttgtcgcaacaaaatctgtttgttcgttgtataatcagttaatgattatacaattctcatattacaacttgtactcctcaatatgattttatacatgatttggtccatatttgggttcaatgttgaattttattctcttcactccatgcttagcttcagtgatttgatttgatttgttgtgcttgtcacattgtttgtttatattctctacacctgtagagcgggattagcaattcgacagactttagtctatttccaaaatgattgtgttttttacatgaagagctaggttaattaatatggtaaaactcgaacctttaaactctatccgtcatttagagaacatttgttagctgtcttgactttgccaggctttcttagccttgctccttttagtctggctcatacttttgttgagaaaaacatggctatttgtttctgcatttggaagggtcaacagaatatttttgaagtatggtctttttagtatagatcttagggactttttttgggtcaaagtctaagatagcttcaagttgaagaaagttagtgagcatctagtccaagacattagctagtgtttaatttttgtttgacccgttattaccgttagttgttggtacaccacacgcaagattgcgtagtttcattggctcaagttgggttgttatgttaaaatattgtcattagtataatgaagctttattgttaattagtctaatatttgtaccattaatagagtccagcctgtaaagagggaaaaacggcgactgcatcagatactggtggcattcccttggataaacaaacaatactttaaacttggattaccaaaacatattgtacatgtttctttgttcttttttcttcagcttgcgaggttatgatttgtaccattgttgactctttgatacatcataagcaatggcttggggattgtttcagatcctgatgatatccttttttcatttgattaaactctcaagtcagcaagagacaagttttgtctatgaaacttttcgcagccaagaaaatctttatcttgatggatcggcaacagtacttcccaatggattattgcagcttacaaatgcttccgatcatcagatggctcatgttttctacaaggactcaattgagctcagttcctctaaaccactctccttctcaacacacttcgtttgcgctctagtgcctcagcctggagttgaaggtggccatggaatggcctttgtagtatctccttctatggatttctcacatgcagaatcaactagatacttggggattttcaacgtatcaaaaaatggatctccctcttctaatgtgcttgctgttgagcttgacactatttggaaccctgattttgaagatatcgaccacaaccatgtggggattgatgtgaacagtcctttgtcagttgggacagcttctgcatcttactattccgacataaaggggaagaacgaaagcataaacctcttgagcggacatccaatacaggtttgggttgattatgaagacaatatgcttaatgtttcgatggctcctcgtgaagtccagaagccaagtcggcctcttttgtcacaacacatcaatctttcagatatttacccgaacagaagacttttcgttggattctctgcagcaacagggacagctatcagttatcagtatgttctttcatggagttttagcacaagcagaggatcactgcagcgatttgacatctcaagactccctgaagttcctcatcctagagctgaacataagaacctatctccattgtttattgacctgcttggttttctggctatcatgggcttgtgtactcttactggaatgtattttttcaagaggggcaagtatgcagaaataaccgaagaatgggaaaatgaatttggtgcacatcggttctcttacaaatccttgtacaaagcaacaaaagggtttcacaaggatggatttcttggaaaaggaggttttggagaagtctacagaggaaaactccttttaagcagagaaaaagctgtgaagagaatgtcacatgatggtgatcaagggttgaagcaatttgtggcagaagtggtgagcatgagatgtctgaaacataggaatcttgttccacttcttgggtattgcaggagaaagcatgagtttctccttgtctctgattacatgaccaatggtagtctcgacgagcatttgtttgatgaccagaaaccggtactttcttggccacaaagacttgtgattattaagggtattgcatctgctctctgttaccttcatacaggtgctgaccaagttgttctgcaccgagatatca

SEQ ID NO: 934 - DNA, 10085 bp, Arabidopsis thaliana
aagcttcaaacattatgttggatgctgagttcaatggaaggttaggggattttggtatggccagttttcatgaccatggaggcatctcagactcaacatgcgccgttgggactattgggtacatggcgccagagatactttatatgggagcttccactagaactgatgtgtatgcctttggtgttttcatggttgaagtaacatgtgggaggagacctgtggaaccacagttgcaacttgagaaacaaattctgatcgaatggggtttgtgagtgctgcaaaatggattctttgcttgatgctaccgacccccggttacgtggaaacttcttatccgaggaagtcgagatggttatgaaactcggtttgctctgctcaaatacagtgccagaatccagacccacaatggagcaagttatcctatacttaaaccagaacctaccattgccagatttctcaccatacactgtggggattagcaatcattcttcggttctgattgatgcagcctcccttgtagcttcaaggagctggtcagctgcttcgtcggccactaactcaccttaatggggacacacattggaaaactaagaactcccacccaatgtacacgtagcagaaagcatatatattattaggtctcaagatttttatctgtctcacttgtcctaaccaatacaagaaactaacagttatccaatttcctagaaaagtaattggtagacttttagtcatctccctggtactgtaatcattcataactgtatcatcttgttctcccttaaattctttgttttgctgaagattttaaccgtctgtttagcgattatccacagcaacattctctgtgatccatggtaacaacttgaggctatggtctacgttattgttttggtctgataccaaattcattacatgagtcatcccttccttttggcatcgttgacttcaaatgctttgatgatgaaacttatttaacatgtggataattgaatttaaattttatttttttggtcaatatgaattacattattatcatataagaagaaatcctttataaatgtgattgacagtctgatacacatggttataatacataagaaagatatccaaaacaatagtattttgaggctattatgacatacattgttagaaccagacaagagaccatataattattgtattgaacaacaacataaaataactggtttgaagttattgtcatggttacatttaatcaatttcattttgtatattcaactcaagagatgcctctaggaaatacatttcctgaagacaattgaacttggaatgttgaaacttgtgtttgaagataaatttgcattttgaaactccagaaacaaaaccagacttctctctgtttcattagcaatggcttctgaaagattgcatctgatcttattggtcttctttaatcatctgactttcttgttaagtcaacaagaagaagccggtttcatctacaatggctttggccaagctcaagctggtcttcatctagacggagctgctaaaatcctctttccagatggattgttgcagttgacaaatgcctcaacacaacaaatgggtcatgctttcttcaagaaaccattcaagtttgattcatatgagaagaaactctctttttcgactcattttgtgtgtgcgcttgtgcctaaaccgggagctgatggtggccatggaattgcctttgttgtatcctcttccatagatttcacacaagcagatccaactcagtacttgggacttttaaacatctcaacaaatggatctccatcttctcagcttctagctattgagctcgatactgttgagagcgcagagtttgatgatatcgacaagaatcatgtcggtatagacatcaaaagcctgaattctgtagagtctgcttcagcttcatacttttcaaacgccaaagggaagaatcaaagcatcaagctcttaagtggagaccctatacaaatctgggtggattatgaaggagctttactcaatgtcacagtggctcctctaagtatccagaaaccaaaccatcctcttctgtcaagatccattaatctcactgacatcttcccggatcgaaagctgttttttggattttctgcagcaacaggaacattagtcagttaccaatatatcttaggatggagtttcagcagaagcagaatgttgttgcagagtctggacttctcaaaacttcctcagattcctcatccaaaagccaaacaggagcaaacatctccactgcttatcgttctactcatgttactagtactcataatgttggctgttcttggaggaatttacttatacaggagaaagaagtatgcagaagttagagaagtatgggaaaaagaatacagtccacaccggttttcttataaatctctatacaaagcaacaaacaggtttgataaagacggccgtttaggaaaaggcggttttggagaagtctacagaggaaatctgcctcacgttggagatatagcggtaaaaagagtgtgccacgatgcaaagcaaggcatgaaacagtttgttgctgaagtagtgactatgggaagtttaaagcaccggaatttggttcctcttctcgggtactgcaggaggaaaggagagcttcttctggtttctgagtatatgtctaatggcagtcttgatcaatacttgtttcacagagaaaaaccggctctttcatggtctcaaaggcttgtcattttgaaagatatcgcttctgctctcagttacttacacacaggagctaaccaagttgtgttacacagagatataaaagcttctaatgtcatgttagattctgaattcaatggaaggttaggagattttggaatggcgaggtttgaagattatggagatagcgtaccggtaacagcagctgtaggcacaatgggttacatggcacctgagctaacaacaatgggaacttctacaagaacagatgtttatgcatttggtgtactcatgctcgaagtaacttgtggaagaagaccgttggatcccaagattccatctgagaaacggcatttgatcaaatgggtttgtgattgctggagaagggactctatagttgatgctattgatacaagattgggaggtcaatactcggtagaagaaaccgtaatggttctgaaactcggattgatctgcacaaacattgttgcagaatccagaccaaccatggagcaagtgatacaatacatcaaccagaatctcccattgccaaatttctcaccaggttctctaggaattggagtttctactcctgttttgttggaatcagtcttcaattcaagaagctcgttagcaccatcaatctctcctccttcttcccataactccatgtttgttactcatacaatcacatacggagatgggaggtgaaaatttaaggacttagttccacaatgtactatggtttaatttaaaacagagtaaatgttatcaccagacagaaacatcatctgtgtatattggtttagtaacgtctgtattgaaacaatataatgtgaatctgtgattgaaacaatataaagggttatgtgtgactgcaatcaacttcattttaagctaatgaaacgtacaaagaaaaatttgtaagcactacgagattcataccagcagaaatgaaaaaaacacaaacacaaaaaaacagaacatagaacagagtcattgtttaagcagcaacaggtgatccattagtgagaagtttggtgttatttcttccttgttcaatctccttgagcatctccaaaggctttgcagaagatccatcctttggacttttaggaccatcagcaccaatcacaatcctaatctcgtactcatctacatcacctttcttcagaacctggagagacgaaagaggagatgaacaagaagaagcagtggtagtagttgttgcgacattcgtgtgatgatgattctctttggattttggtgactgaacaatccacatgaagttgtaacctttggtcttatgaagaaatattaccacagaggtgaccaaaagttggattatccaaggcaaggttataagtaaggttccggttacagaaaagaatttgacgtaaccaaagttgtggtttttggtggtggagagactaaacaagaggattccagtaagagtgatccacagagagtgaacgaggattgatgtaaaagtgaaacctcttttttccatttttgctctctcgttttctttcttctctcgtttgagaaaaaagttttatgttttgaaattaaaagactaatgaaaattctgttagaggatttacagtaagtagtttagattttttttgaaaaataattatttgttttttaggatttccgttggggtttaaaatttaaatattattgaaattttgaaatggaaaaatgaataacatctcgattgaagtgttagaaaaaaaacttacaaagttatgttattcggaaggacttttctgcaacatgtcaaggtttggtaaaattgcagtagcttcaccatcaataacaacaagttcgttgtggttcttgaagcatttagttgagaatttgacactaatgtaacaaaatgaggatcaagttatgacacagaaaaaaatacatatattttttgattcaagtgggtttaaattagcttacatgtacttattcttggtttctcttaaagctatggcttgaaccaatccaagaatttcatcacctatgtaaaccggtgaccgaaaatgcagactttgagatacgtatactgctccaggctgcaacaagaccaaaaagatcttacatgatcaggcactaggacaagtagaaggtaaaatgaatgcaaactaaaagtagaaaacttacgaaatgggcagagatgatacgaggaaacatggaagaaacaagcatcccgtggacaaggcgattctcaaatccggctttacgagcagattctggatcgaaatggagtgggttccaatcatggctcacctcagcataggccttaatatcttcacttgagaacactcttgtttctcttaaaacatctcccactttaagtagtgtctttgaagcaactgatgagaaacttctcaaaacaaggagacctctagggaaaactgtcttcgctagcattgcttcaccctgaaaaaacaaacaaaaactttcagtagtcttttcagtggcaattgctctcattgagtcattttgtcgaacaccttatgggcacgccgttgaaggtcaaaagattcaagctttgccaaaattattcaccaattgctaaaaatatatgatcagatgctaatctttcataaccacaattcttagaataatgacagaaagaacaattaacctcgtcaaaatcagaaaagacagagacttttattttcttcttcaagtttaatcttacttgtttctttggcttttgagtttcttattgagcttgaaggatgtgtatgatccagattaatgtttcttaatcataatttatcagaacaatcaagttttcacacatttgtaaagtttcacaaaaacaattaaaagattagaaacttcttcttttcattaaatatcaaagtaaagcatacataagctgaattattgtgcttcagaatctcagtatacaaattgcacccaagatcgattcagatgcattgtcatcagattccaatatgatgatcatcagggttgccatgcattaatccaatccgtcaaagtggagacattgttagagatatcttcgattgtgttactttgtagttcagtgacaatttcctcatcataactgtcatgtgcttcttcgagtaggacttgatacatttcgcattgaaggttgttactaagcttggttcctgaataacccctgctttggttggttgagagaacacaatcagaaccttgctaaagcgaaaacaaactaaaactacatttgatggatttggaaatctgacctattcgttaaacggtcatacaaaacggagttctcggttcgaagcacgacaacgcgatcaaaccatcgctgaggaaagaagtcacagccatggtagtccacaatgttccctccttctatcatagcatcgtcaagctcatcaatcacctgatccacaagttcaatacaatatagctaagaaggctaattcttcgaattgaatccaaatctttatcaaactaaagagtgaagcttaagattctagcaacggttcaaagtgttttgttgacaaggaaataaggaggataaagggatagggatggagtaagaaactaaccgagtcttcgttgatgaagtgacactcgagctcattgtcccagccatggtagaattctttctctttgaccagatctccgatgcaaatataccggagattcgtggcttcggctagagcagaagccgtcgtcgatttgccggtaccaggagtccccgtgatcagtaggttcggcctttcgcgccttgtcaccccacggttacgtctcgccatgttcggtcttcttctatgaagcctgaagaaatttagcttcggcggcggaaactggaattggagacgcacagagagggtacatgtggaagaaaccgtgagatgttagggttatttttaggtggggttgatgaatatgtttaatttttatattagaaaaaatactattgtgtttttttttttttttggaattatagattataatggtgaaataaggttttcatacaatagctgtcaaggcaatcaaaaccttcgagagacataagccggccagtacttgtagactctcagagacaaagatctaattaagaaaaattaaagagaaaaaaattcaagcatacaaatacacgcatctgagccaattttcctagaatccaaactcaaaaaatcaaaaataaaattacaaagtctaaatcaccataaaaacaaagagatctgagactagagattcacattaagagaaacaaaaccatgattttctttaccataaacggtagtgaacaaacaaacaccccgcgacccaaaggaatgataatcataagatactattgtgttattcaattaaaaatttccacaattctactaaatttggtactatatatttgtaacaaattatctaaagatctttatagttattggatccatcatcattttgttaagtccataattgttcgtgttatgatttcaaatgagattaaaataactctttttgtacttgtatcaaaatcttgagtaaaacagcaatagtttctcatatgctgatgatatgcgaccacaatgggggacatcacatactgtaatagaaaaatattacatcaattactcattttatttataccagtatctggaatctatagactatagccgttatatatgcaactgacaaaacaaaatatatgtcgaatcattcgaatagaaactgatccctaacttttattacatatccacgtaacaaaaacgcttagactacatcattaatttttgaatatcatttgtgatttgccatagggagtatataactaggtttggctttttggtgttgttgtcgcagctaaattaaaaggctcattatgtatgtatgtacaacatcttagtcatcttggaacaacaattaaaaaggcatttcatcaaaaaaattctacaaacgttacaacactaggaatgatgacgcgtactcgcaactctgtcttctatctaaaagtccacacgtacacaagtatgagtttaaaggcgttggggaaaatatttttttgaaaggggttaaagttatcaacgtagacgagtcttcgaacaaattaatgaatatttattagtttttagttttggatttcatgatttcattcagaacatgtacataagtacattctctgtctatgtcaatcttctttatcaaataaataaataaataaaaaactccctgtcaatcttcataattgataaatattacatagttcacgaaaaatatatagttcaacattacttagaagttagaagattaaattttcttcatataataatgatcggaaagttgttccaatattaatagaatataatatcgtttccagaacacatatttttgttctgataataagtaataaagttgatgtttcctggaaatcagaaggaaggaaggtatattacgaaagagattccgagatctatacagaactgttttttaaacaaactgccatagttaatcacatggtggccacataaagaagaccatagaaatgatacaaagcagtgctgaagtcgttgccgtttacgcggttttatggcatatgtcattatgatctccctctccctctatatcaactggatacataaacacacatactaatgaacttctataaatataacatacatagaatgaagctgaagcataaacagcccaaccaagtcatatcttatctctgttctttgactttccctttttacagattctttgccaatagaacctaagaaaaagacataatatcgttgatggagaaaattacaaaggaagaaaggagaaacagatgccttccaagttttggaagcatatatcgaagtaagaggacgggtaagaaagaggcagcagcagcaaaaaccaaggtagaggcggatctgattattgtaaaaaatgaagataaatctaacgaggaacagaagaagattgaaaaatgttggatgatgagtgaggatggggaaggcggcaagtcaactgtagagtatgatggttcaagcattttaaacacaagtggggtcttgcgtggggatgaagacatcagtgaggaggaacctgaggaagtagcagagatattgatagataaagaggaagatagtgaatttctaataacgatggttttggaccttttggtggaagacaacaagtcgcttcaacacaagtcaaacgctgcgaacaaaaacagtagcttgcttgatgaagaggtaatcacgggggaaggcagcaaggaatgtgatggagttctgtccattgatgaaagcttaaaggtggtggaaaccgagaaggttgataaagcagacgagaaatcaacggttgaacaacgcttagagaacgtggatgccaatcgtacacaggccgagcaacctacaacccaagagcaggctataacaattcaaaaacaaaatcgaggtacacatattctcaagtgctaattctgcacttggaagtatctcatgcactagtttgtttgtactttgtagcaaatagattgattcttatatgttccattttgtgttgtagcagttactcggccaaggcagccaacttatgtaccctccccatcagctcggggtcagggatatcacgtgtccgcagcaccaattaatatgggaatctgtgctccaccgagtcatcctatgaggaatgactttaacaaggtgaagacgtttgatctgaaaggagtaataaagagtagcggtaagggattgaaatcaattgcttggccccgacgtttttcagtcaaatgaacaaactcctaatttaactcaaattactatcctcttaactatctgtataattttatctcttcaaaatcactcaaacaacttcctaccattctcccatctttttaatttgtatgccttatacttaattttaattggttcaatcgtcatacttcatgaataagatgtttccttcaaatatataaacgatgcagtgtgtaatttgcagtcggtgtcggatttcgcacacattcgactcaacgaaattaatgttttgaaaatttaaattggacatcgaaaatttatattcattggatatatgtgtgtcccaaataaaagtaaacaagaatgtagaacacatcaaaataattaatatcacttatcctgcaacaaaatgagaaaacaacaaaattagatcataaaatatattattcaaaattatacttagtaaatttaatggtaaaagatcaaatatgacttgcttttcaaaatgttaaaacagtctcgaatacgtaaaataatttgatcacaaaataaagtatatagataacaagattttctaatctatatcaaattggaaaatattttttcataacagtgaaaagatttttttttaaaagtttgtacattgatttttgattcaaaaaccttagttaattaaaa

SEQ ID NO: 935 - DNA, 77298 bp, Arabidopsis thaliana
gatctcttaccaataaaagtttctgaatgggatttggtattgaactgtgtccttaaatccgggttttagttcaaccacgagtttaactacataaacgatttccggtcagcctggtcctgacgggccaccaattttcaaaacattgacgaaagcaagcccaataacatcaaatataattaacaaattttagtttgaatacggttactgttttggaaattgatacattccgatcttggactaatctataatccatgggctggctattttgcagtttcccgtaaataaaattatgaaaacatgattgatttctcgttggtagaccatgacatcacaggacacgtcaacattccaagtataaaggacaaaactgtccatttagattccaccacgtgtcccgataacgtttccgtctgtatctctctcttccgtcttctactcttcttcttcttcttcttcttccactcacaatctatcgagctaaaacactgaagcagacattagcgttgagaaaaaaaaaaaagtaagaacgagagagagaaagccatgtctgcgaaaacaatcctatcatcagtagttttggtggttctcgtcgccgcatcagcagcggctaatatcggattcgatgagtcaaacccgatccgaatggtctccgatggtctccgggaggtagaagaatctgtttcccagatcttaggtcaatctcgtcacgttctctctttcgctcgcttcactcaccggtaagtctcgtcctttcaccacccgtgctttctccgttgacttttgatcttagcttttgatcatcgtttgttggtgatgaagatatggtaaaaagtatcagaacgtggaggagatgaagcttcgattctcgattttcaaggagaatcttgatttgatcagatccaccaacaagaaaggcttatcttacaaactcggtgttaatcgtaagtttttttttttatctttcttctcctgagtttgtacttaaggaagtaaacgtatgtataaaagacactgtgggaaaacgtggaaactaacttttgttctgtcttggaatcttccaagttaatatttttaaattttgatttttttctttcgttcacgtgattcaagattgttattgggactctagactttacagagtttatgagtctatgaactctgtgtgagagactagtttgtgtcaaaaacagtgttctgcttctttaagatttagctgtcctgagttgaagattggttctcgttcctacttccttgtagagttgtagggatctaatctttatttgtcctagaactgacactgcaatggtttgatgaataatgatttacctaaatattgctaattgtgtcttgaatctatacagaatttgctgatttgacatggcaagagtttcaaaggaccaagcttggtgctgctcagaactgctctgccactttaaagggcagccacaaggtcacagaagcagctcttcctgaaacagtaagtccaggactcaatcttgctgcactgaactatgtcaaccaccatcccgttctgtttttcagctctaagagaacgtgtttagctgcagacctttttaaaaatttggttctgagttctcaaattgtgtaactgcagaaagactggagagaagatggtatcgttagtccggtcaaagatcagggaggttgtggatcttgctggacattcaggtaaaagtaaaaccaatgattaagatactctctttaatttttggtgggatcttttgatgtcaaattgaaggtcgagattgtatgtcatatgattgttttttgtactgcagcacaactggagctcttgaggcagcttaccatcaggcatttggaaaaggaatttctctctctgagcaacagcttgtggattgtgctggagctttcaataactatggttgcaatggtggccttccttctcaagcctttgaatacatcaaatccaacggtggcctcgacacagagaaagcttatccttataccggtaaagatgaaacctgcaaattttcagctgaaaacgttggtgtacaagtcctcaactcagtcaacattactctggtaagcatcttttatggattttgaatttcacttgcatgagaatatacattctgtaatgatgattgaaacaacaacaacaacagggtgctgaagatgaactgaagcatgcggttggattggtacggccagtaagcatagcatttgaggttatacactcgttccggctttacaagagtggagtttacactgatagtcactgtggaagtactccaatggtgagactttcttctttaaactgttaaaaagactttcattggttcacataaaatcttcttaggaacttagcttagtgttcggtttccttaatgtggcaatataggatgtgaaccacgcggttttggccgttggttatggagttgaagacggtgtaccatattggcttattaagaactcatggggagcggattggggcgacaaaggttacttcaagatggagatggggaagaacatgtgtggtaagttctttaataattatgaaaccatcacaccattctcaaattctcacagttggtctttctctatctattgttgattcgttcttgaattgcaggtattgctacatgtgcatcataccccgttgtggcttgagatgatcagcgaatgtggttggtcaattatcaaattacgaaatgttcacgtatttattggattaagacattacgtaaaagttgggacttgggaatgcatatggtttatgcttgttgtaacataaaaaggtctgttaatatgtacaaaataaagccaaaactatagacgacaaatttataatattttcatgttaaatttatgaacataaattgatttagatcaaagtagtttcgttcttgatcctaagtcaatttgtctaacatatagcttttactttgaatcttgatccttgagtcattttgtataacatacagcttacaagttatgactttattttgttttggtaattggtattctaaacgaaaatgaaatctaataacgtgattaatagtggtcacatggatatctcataaatctctatccaattgtgtgattaagaacatgcaaaactgcaaataaagtataaaaaatcatttacacaaaacttcatctagtttttggacatcaaattcacaaaaagcagcatataacactacaataattgatttcacttttattttatttgtttgtttacctttctaagttcaaatataaattctatgattagtttattataattacaatttttattttttttactctgatttgaattttttacatggacacgaaagaagaagaagaccacatgttggttccgaataaaacatggccgagtcaccctccgagtcaacctccgactcgcttagcaccaccacatccactaagcccgctcaatccgggactgtttctatttcaagccctcaaagtcaccatgtcgtcttccccgagatcccaatcgagatcgtcagtgaagaagaaatggctattctcgatgcagctcttgcagcctcccgctccatcctcccttccgtgatccgttctgtttctccgtcacggataaccgccggcggaagtcccaaaacaatccgctcaattactctcttctccaagaggaaattatcggcttgttcagatatcgaagagtcttatctacatcgatttaggagaaatcaagctttaggtgtcacagatctcaccggaactgtacgttttttttatcacagattataggaaagaagagatcatataagcacatttgacaatgatagtgatctctctctatttggttataggaatggtgtgagaaacaaatggagaatgttctttgttttggcaggagaaaagtcaataaagctatgaaagttggtcaggctcgtcatttgcagcttgaagaagaggtattattcactatgatggatcttaggggcttattgttactattaagagtacttgatcgttttgtgaacaatttgatgaaatctacttgttgttgtgtttatataattgggtaggtagttaaaaaagtgagagtaaaagttgaatcaaatgaagataagtgggcattgaagctgttgaattccattgctggtgttaatcagttcttgtttgaaggacgaactcgtgaattgctactgtgagttccttctacccctctagtttcgatcttcttttgtaacattctcgtggcttttaccttttcctagcaagataatgttttgtagcatacatcaaatgagactttaaatatgttgcattttaccttgtaaagcttaggatttgttggaggtcaatggattgtgggaattattgacgagcttagaaaggcgtatgcagaagagtcttctgatagcggaccaatattgatagatacaaagactcgactccgtgatacacttccagctgagccacagaggaggaatggaaggtaagtgtttgatagagttaaggaaaacgttggtcatttttggttttggtttaatacgtgggagttttgtgttaatgtccttgaattaactatatttgacaggcttcagctaatgctttacaagcttctatgggacactattgtgaaagaagggtttccaacgggaccttttttcgactacttttctttgaatcgcaattatgtcttatcccaagatgtcagagatcacattgctaatgcaggtatcaaagctcaggtatacttatctttgactctgtacaatatatctttcactaaaccaaagtttatgtgtttatgaagagagaattactcacttcgaaatggggttgtattgatattttcttactagttttaacttggtgcagacacttgaagagatagttaggtactatgaaaacacttttcagatgcttccgatagcaaataatcaactattactaaagtaagtagagatggcttgttcttgatgttatagaatacattaatatatctctgatcatctgattgtagttgagtgggaaattttgcctcaggtacgagtttcagaaggaccaatctataatagctgaaattagattcaaccatgatcatgaatgggtgatgagcaaatatagagaagtcattgagttctggagaaatgaacgagaagctgggtacactcctgaagaagaacgttggaaatgtcggtattgccaatttgctaagtcttgccctggaaacccgagtttcgaatctcctagcacaagctcaccaacaagagaggctcctcctttaccaagctaaaaagaagatgaaaagttgattctttcaccgaaagctgctaaatgctaacatatatgtttgtgttgtctttaatttccacatttgcttcccttaaattgcatagcagttaagtgattaaaccgtggtttgattagggttggttaggcgtaccaagattgatttgtaccgggatgccgcaatttgattattgtgtatcgtttccaacacacgctttgtatgtatcatcattgttggaatctctaaggtaatcgacaatagcatttttacgttctgtatatctgaattaatgcatctttgaatgttttatgtgttcttaatatacgaaaaaatgtaaattatacattgttctagtttttgagcggcttacttttcgcaaacggcttgcatgatttttagtgaccaatttagggggtgtctttgattcttaatttacaaggaattttaatgacttcattcaaattctaaaaagtaaataaatgaaagtttttaaattattgttagagagttttttataatcttgttgattagttttttcataatcttgtaaatgatcttaaacaatttatctatcataataaattaaatcattaaacatcagagattcttttgttttaattgaatagcacaaaacttttactgactttataagagtattaatccaataacctcaaatttatgaagattttaaattactttttacaaattttaaatgaataacacaaaactttaacaaacttttaaaaaatcttgattgaataacaacaaattttacatgacactttaagtaactaaaattcttttgaaattataaactaataacaccccattattttgaactgtagacttttgatcgtaattataaatgtaggatatttcatttgtttagccgctcatgagaggtatgcggtagcaaccaatgaaccaaatacgatttgcacattgaattttgggtcaacaaactgattataatttaggtagcatattttcacttttagtgtccatttacgttataagtttcaagatatacgattgagttttaatagtaggagtccacaattctcgtatctataccttaataaattcagtcaaatgtccatttctctctcgttgacatggtaatgtataaattacagagtgttgtcgtcacaaaaccaataaaatgtctacaacaactaggatcactcttgttatgaatcttttgcctcttttgttctcagtagctctagttggttcggttcaatgtacggtgcctctcagatccttcaaggtcagctccttaaacaaacacttagacccacgtctcacttttagttatgttctctacttaattgattcaacatcatcttttttctatcttggacggagttcaacattctttatgtttaaaattattacaaaattctttttttatttttttgtcattggcagataagtgaaaatgtgacatacgattgcatagatatttataaacaaccaggacttgatcattccttgctcaaaaaccacacaatccaggtatatatatatatggtttcagaaattcgtctgctacatacattttagatttttaaaaatgtgagttttgaatctggctattgtttttgttaagatgaaaccatcattatcaagacatgagctaaagaatcaaactagcaacaacaaaacatataagaaggacatagaatgtccatatggaactattcctgtattgagaaacacaaaagaattcaacaccaaagcccaactcttggctgccaagtatttcaatccgttatcagctgatagccctggaacacatgtacgcattcacttttctgttaataccttagatctaattatatattacaagtgttcatgtatattggtagatcgctggggtaaagcaacacggtggtccatatcatggtatagaagctaagtttaatgcatataacctaaacattggagaagatcaagcctcatatagtcaaatgtatttaggcagtggacattatggcgaagtcaatttcatttcaacggggatgatggtacgttttacattttattgttcttttttttccttaaaatctattttacgttatgggtagtcttacagtagtgcaagtctttttaacagataaatccaggcatttttggtgacggacgtctttggacatatggattttggatggtaagcatgtgaacatattatatatgctgaaatcattaaccaaataatatgtaaatattacatatgattttgatagggtaaaggtggaaaaggatgttataacatggcatgtccagggtttgttcaagtatcgaatgtggttcccttagtcaaacccatgtaccttaagccaggggagcctgcatcgttgcaatgggccatccatcaagtaagtttttaattttctacacttcgtttgttttttaataatatgttttgcagattttttgtttgtttcaattattttttaaagtttctaggcaatattttcatgtcattctcacttagtagtgaaggatttatgattcttaaaactaatcattaatacaatcaaatcagtgatatcagactatatatagcctttttggtccaaacactttgattagcacatgattttactatgattttttttttaataaatgaattttgttttgtctcttaaaaaggatgaacaaacacgaaactggtggattatacaaatgtcgccttatacatatatcggttattggccaaaagagctattttaccttatggataatggtgctactatggttggagttggaggtgtagttcaggcttcaccttctggtttaagccctccaatgggtaatggtaaatttccggcaaaaggtcctttgagatcagccatgttttccaatgttgatgtcttatattccaagtatgagaaaggtaaaataaatgcgtttcctatagtggagttgctagatagtagtagatgttatgggctacgaattggtaagagagttcgattttggactagtccactcggatactttttcaattatggtggtcctggaggaatctcttgtggagtttgatatttgcgagtataatctttgaacttgtgtagattgtacccaaaaccgaaaacatatcctatataaatttcattatgagagtaaaattgtttgttttatgtatcatttctcaactgtgattgagttgactattgaaaacatatcttagataagtttcgttatgagagttaatgatgattgatgacatacacactcctttatgatggtgattcaacgttttggagaaaatttatttataatctctcataaattctccgttattagttgaataaaatcttaaatgtctcctttaaccatagcaaaccaacttaaaaatttagattttaaagttaagatggatattgtgattcaacgattaattatcgtaatgcatattgattatgtaaaataaaatctaactaccggaatttattcaataactccattgtgtgactgcatttaaatatatgttttatgtcccattaattaggctgtaatttcgatttatcaatttatatactagtattaatttaattccatagatttatcaaagccaactcatgacggctagggttttccgtcaccttttcgatcatcaagagagtttttttataaaaaaatttatacaattatacaatttcttaaccaaacaacacataattataagctatttaacatttcaaattgaaaaaaaaaatgtatgagaattttgtggatccatttttgtaattctttgttgggtaaattcacaaccaaaaaaatagaaaggcccaaaacgcgtaagggcaaattagtaaaagtagaaccacaaagagaaagcgaaaaccctagacacctcgtagctataagtaccctcgagtcgaccaggattagggtgcgctctcatatttctcacattttcgtagccgcaagactcctttcagattcttacttgcaggttagatattttctctctttagtgtctccgatcttcatcttcttatgattattgtagctgtttagggtttagattcttagttttagctctatattgactgtgattatcgcttattctttgctgttgttatactgcttttgattctctagctttagatccgtttactcgtcgatcaatattgttcctattgagtctgatgtataatcctctgattaattgatagcgtttagttttgatatcgtcttcgcatgttttttatcatgtcgatctgtatctgctctggttatagttgattctgatgtatttggttggtgatgttccttagatttgatatacctgttgtctcgtggtttgatatgatagctcaactggtgatatgtggttttgtttcagtggatctgtgtttgattatattgttgacgttttggttgttgtatagttgatggttgatgtatttttgttgattctgatgtttcgatttttgtttttgttttgacagctatgggtaaagagaagtttcacattaacattgtggtcattggtcatgttgattctggaaaatcgaccacaactggtcacttgatctataagcttggtggtattgacaagcgtgtcatcgagaggttcgagaaggaggctgctgagatgaacaagaggtccttcaagtacgcatgggtgttggacaaacttaaggccgagcgtgagcgtggtattaccatcgatattgctctatggaagttcgagaccaccaagtactactgcacagtcattgatgccccaggacatcgtgatttcatcaagaacatgattactggtacctcccaggctgattgtgctgttcttatcattgactccaccactggaggttttgaggctggtatctctaaggatggtcagacccgtgagcacgctcttcttgctttcacccttggtgtcaagcagatgatttgctgttgtaacaaggtaatataactttcgtattcatcattgtatctgcttttgtgattgattgattcgttttatttgttgctaacttgcgtctttttctattttcgcctaacagatggatgccaccacccccaaatactccaaggctaggtacgatgaaatcatcaaggaggtgtcttcatacctgaagaaggtcggatacaaccctgacaaaatcccatttgtgccaatctctggattcgagggagacaacatgattgagaggtcaaccaaccttgactggtacaagggaccaactcttcttgaggctcttgaccagatcaacgagcccaagaggccatcagacaagccccttcgtcttccacttcaggatgtctacaagattggtggtattggaacggtgccagtgggacgtgttgagactggtatgatcaagcctggtatggttgttacctttgctcccacagggttgaccactgaggttaagtctgttgagatgcaccacgagtctcttcttgaggcacttcccggtgacaatgttggattcaatgtcaagaatgttgctgtcaaggatcttaagagaggatacgttgcctctaactccaaggatgatccagctaagggtgccgccaacttcacctcccaggtcatcatcatgaaccaccctggtcagattggtaacggttacgccccagttctcgattgccacacctctcacattgcagtcaagttctctgagatcttgaccaagattgacaggcgttctggtaaggagattgagaaggagcccaagtttttgaagaatggtgacgctggtatggttaagatgaccccaaccaagcccatggttgttgagactttctccgagtacccacctttgggacgtttcgctgttagggacatgaggcagaccgttgctgttggtgttattaagagcgtggacaagaaggacccaactggagccaaggtcaccaaggctgcagtgaagaagggtgccaaatgatgagactttcgttatgatcgactctcttatggttttctttggttcttaaaactttgatggcgtttgagcctttttcttttttctctttatttctgtgactttctctctccctcctttttggatatctctgagactttttattatggttttcaattatgcagtttccggataattttgcttgaaacttatttaggagttgtgttacaaagttgctgtctttctttgttcttgtttaaacaatcattcagagatcaacccaaccatacttagcgttttaagatctatgtaagagatagggttctatagtttcgttagaattaacttgtgcttagtgttttctgacaattacttcatacgaactttttaaaaagacttaggttctcaatcaacaaacagaaatagtaatttatcaataaaaaatgctgagaactaaaaaccaaaagaaatggataaggccaaaagatgcagtaaaaacatctcaccaacgacaaataaacgtgtcaacaacaacaatgaaaaacatcccgaataacttaaaatgctttccagctaaagattctgtgatctgcagttctacaagaaacataaactcagtgagatctaataatgaaaaggcttttggatttcttaaacactaagcagcagcttttgctgtgtggggaagaaaagctccacaaacctacaacatcttgtaataaaagtaaaaacactaagcagctttggctgtgtgagaagaaaagctccacaagcctagatcttgtagtaaagcaactagatctctaacatcttcattctcttgaagcctctccacatcttcttcaccatggctcttgtactcatgtttaccttctgatctccttctcctctgtatcaccttccttctcttgtcatgatctgccattcttcaacatccacagagagagagaaaaagagacaagtcaaataaacagagaagatctcaagacagagagcataagtgaaacagagaaatattactctttggacagacttaattgctgagtgatcccagagatgcacagagggaagccatagttaccactaagagttgtagacagcatttctttctttgtagtgaatggatttttcagaaatttggatcttgtttttaagaagaaaaaaaaagacaagatcttgaattggtaatgggttaaagagagtatagatatataatggtaccatgtaattaatatgagagaaagatttttttgtcctgtggtgtgttgtgcatttgagagtagtaggtattaggtatggtctcttcttcttctactattaaaatgcattaatcaaactttatagaaaagtaccgtctgtgagtgaattaaaaagaaaatagttctgaatatgatctttgtgttatagtgaaaataaattttggtttcactttaccttttttcctccgcatgataataaagacaactctagctaatttggactgttctttttttttcctcagttggattgataaaagtatgacgaggacaataagggcttttcagttttattctttttcagcaagaataaatgcagcctctcatctgctaaatcattcatatcaagtcttgtcaacttgttttttgaaccaacttgctcattaaagtaattcccacctaaacttctgtattaagcagacccttaaaaacagtgatgcaagatttaacatcactttcaccatttattacatggtaacaatgagacaaaggcatttacttttggaattgatgattattggaacaaatcttgcaatgatttgcatataacttgaataataccttttgatcaaatcttaacaatgaaatttggtctccaaaaagactaaaaactagcagtcaaaagtgttttgttgagatttatgcctataattagaatattatatgctagttggtatggttgagtgttacaagaatctacttgctacaaagtgacaatccaggagctgttcatagtacatagtaccaacattatacaagggactagttatggataagtcattgcttttgagacatagtaccaacatatgtaacatgggtcacaaaggactagttatggataagtaccaaaattttctccactatctatgttcatgaacatatgtagcatctgtgtatagatgcaaaatcaagagctcaaataaactacagagtatatacacacacaaaaaaacttatcaatgtgaattcttggaaatgaaggtaatgccaaatcattggagatgacgttaacaacatgacctcacttgggataataatcctgataatcatttgattgtagccacatagaaagcagcaaactaaatgacaattatgatttaagagcaaagatagtgacagtgtaaattaagtccactcttctttgaccttaaggtaataatatatatatggatgaggtgatactaatagagtgattacacatacaagtggtcttgcttcttctatggttttaaaactgcaaataaagatttgcttcgcaggagagatagcgccatcacctcttctaagaagttaactagtggtgacggtatctctcctacgtagcaatccttatatatgcatcttaatacggagagatcaaggtatttcagttgttcaataatcaccctctaacaaagatgcatcttaatattcataaactattctctttctacttacatagtaacaccataaaaacaatgaaactgctccgtagaggaccttggtttgagcctctagatcgtcttctcttacctaaaatgataatctgttccaagataggttcttgctatttgctcaaatatgttttggtcttttgaatgttagctcagcaaggagctcacatgattagcagcacatcctcagcctgaaagtttcaagaaaagctttatcaatttaagagttgtgtacgtttgcagaattctcacaagtttggtttgattctcacccacaagaaaaaaatgtcttttcttttactttcgatatgtttctttgcctttgacaagggacatataaaaatgttaagacgaaaaggttgacaaatctttgaaaactatccacatcatgaactcaagatatctcattccattagaagcaaaaaaaatatcaagtcaatgagaccagctcacgactactctagaatcttcattaagcagaacaaggaaaatctataggtctaattaaacctttttttaatatctcgggttaacaccaaatttggttcaaactcgacaagtcattgttcaaaacacagcatccaaaaagataaaaagccaaatcttatcaccagaagtccaccactaattggtatataatgtttttttttgtatgtagaaatagtgttgaagaaagagcttcatgctatttgatatctataatatctcatttcttgtaacaaatgaactccacacggaatgaagctttttacatatagaaagaacatataaatgtgtccaatatctaatttggtccacgtatcaatttgcaagatcacatgcttacgagacctcaaatatttggtggatatataagataatttcccacatgttttacgaaccatcccgtaatgagtatgaattatccggtctagcaatccattcgatagatttactagttgaaacttgaaagtagggttttgctcacttgtatcctttattcgtagtttaactataatgcacatatggaagaattgagccacaattctcaatgaatttagcgagggtgagaaatgtcaattcaatgtacattctatgtcaattcaatgaaaacaaatgaagaaaagagacatgaaatatgtttccaaattcttacttagaagaattagaatcaaataatacaatatctacatatgccatgagagacatatggaaaaccatgttttcggatgataaacttccaaattgatttgatatatactataaaccggcaaataaacaaattgaggttaaaatataacaaaccggtccggtctgatcgaacggctgatgtcataaaacgtggggaatattcgattaaaataacaaagactccgttacggtcgtaaataagtggtgtgagaaccgaaagtcaaaaacacgtcaatattggtgggggggacgaccgtgcacgtgaccacacaggaactaaacccggacgtattgcgcgaaaattaaaccggatttgataatcggcgactcgtccggcaacccttgttttgttttcgtctcggcggatcgatttttcttcgtctgggtttggttgtctttttattttcctcttccttggccaaagaaaatcttatcgtagctgtgaaaaccctagtttctaatcatctcaattctctcattaacctatcaatttcgatagggtttgatcaagtatccgatttcatggtttgtattttccgtttaatagtctttaaaggtcttgtcttttggaatttcaagggttttcgtttcagtaactccttcttttttttctgttaatttagatcggttgctgtatggagactaattgctggagtttaggttcgtgtgttttgaactgagcttttggttcttgtttgtgtctggtgttgaagacatggatttggaagctaattgtaaggtattattgtctgaaagatctatggatgcttgttggtttataatttttgttgatttgaacttgttatgaatgtgttgattggtatatagagtggatgtttcaaaaaagctttgcttttccgttttgtttatgatctagattgtattgctgggagtaaaaaacgatcctttatctcataagggttttggattatggttcgtggttgctgttattgaatttagtcttgctctagttaagcttaacgttgtgtttttgttgtgggttgcaggaaaaactttcatattttcggataaaagagctcaaggatgtgctcactcagctgggactttcgaaacagggaaagaagcaggttagtatcgttctctaatcttccattggtcgtgattatgtttgtgattgttttggaatgattatagtagagaagatgatgttttgggtgataattattgctgtcttgagctatatagcagtttccaagataaatctaagacattaccttgcaaagagtgttatctgttttattctttcaccaaaaaatttaacttctttttgaaattttcttgtgcaggaacttgtcgaccggatcttgacccttctttctgatgaacaaggttatatgaaccacttgcttttgtttattcacgttttggtgtattaagagtcactgctagctctgccatcttcttctaataagcttccgttttcattccctactgacagctgccaggttgttgtctaaaaagaatacagtggcaaaggaagcagttgccaaattagtggacgatacatataggtgagtgctcgtttctttcaatagatttcttaggagatgccatgctttttgtggcggttctttgttaccattaattttatattgtgttccataggaaaatgcaagtatctggggcaagtgatttagcatcaaaaggacaagtgagttcagataccagtaatctgaaagttaagggagagcctgaagaccccttccaaccagaaattaaagttcgatgtgtttgtggaaactcgctagaaacagactcaatgatacaggtaatctgggatgaactcactgcgtttattcctgtttgagctgactgtagacaatttctttgtattttatggtcgatggtgtgatgtatttatcattgattacatttgtgaagtttggtgatactttctggctgtaatttttgttttttttcttccgatttcagtgtgaggatccaagatgccatgtttggcagcatgttggctgtgttattctcccagataagcctatggatgggaatccaccacttccggaatcattttattgtgaaatctgccgacttactcgagctgacccgtatgtgtttcaaggattttacttttcctgtctgagtttaagtttgatatgtgattgattttccatctgagttcctccctcactgctttatgattctttcctgccataactgaaaagaaagacatatttatacatttgacatgctttgcattctagtttctttgcgtttgattgttcttcttcttctagtactgttttcatagttgtcaattttcttttatatattatttcctatctttacattagcacctgtggatatcctatagcatgattattcacggttttcctacatggtttccttgttcagattttgggttacagtggcacatccactctctccagtgaggctgactgcaacgactatcccaaatgatgggtaagaattttatattcttgatattgctattgctttgaacgagtgtactttcagtgccattattgtgtgaattggtactttataagtcactttgactttaaattttctacttggaactggtataagacattcattctagtttcaagaatgacaattgtttcctggctatatgcatagcacctgctgaagaaatactgttactggcttttgtttgtactaatactccgatccaaaacttttcagtgcaagcacaatgcagagtgtggagagaacatttcaaatcacaagggcagacaaggaccttttggccaaaccagagtacgatgttcaggttgggttttgtaaactacatttaatatgtcaaggtgtatctacctatacgtttctaactggaaatcaattttgtttaggcttggtgtatgctcttgaatgataaagttctctttaggatgcagtggcctcagtatgctgatctgcaggtcaatggtatgacaatgacatcgaccagagttttagtcggttgagcatttcctttgaaacaggggaatgttgttttatttcatgttgcataaattcctgtgggcacattccattcacattcacattgtctttatttgtctgttattctgatcatactcaataagactgtgtatgtttctgatgtgggattcatgatatataccctatcatttcataggtgtgcctgtacgtgcaattaatcgacctggaggacagcttttgggagtcaacggccgcgacgatggacccattgtgtgttttttatcatcccttttgagtagtaacccttttgaattacatataggagtcaatctctcatacattgaaaatctagcaatcagtgatgtaagttttaaccatttcattttactattttggcagattacatcttgtattagggatggagttaacagaatatccttgagtggaggtgacgttcggattttttgttttggggtcagacttgtgaagcgcaggactctacaacaggtactgataacatatatgcataagaaacattcaaagatttggtcgtatatgtggtcaatgaagagtccaaacataaatgttcaaaaaggaacgaaattaatattctgaatacaaaaagaaagaataaattatgttggcgtacccaagaaagtaattttgtggaagttacctgtggttacacacttacgttaaactattcccatgttatttcccactcccactaaatctagaaaagttagtcagatttcaaatttcacagtcctattcttcttcctatatttcacgtatatgagccactgagcctggccttgtatgagatttggttacggaagtgtagtctgtccttgtgctgcaacatttatccctttaatcaatatatttatcacttttgttggtgttcttgtatacagaggaattcatattgtacgttaatgatctaatgatctccaagttgcttatatatatactcatttttgcatctaggttctaaatttgattccagaagagggtaaaggggagacttttgaagatgctcttgcacgtgtccgccgatgcattggaggtggaggtggagatgataatgccgacagtgatagtgacattgaagttgttgctgatttcttcggtgtcaatcttcggtgtcctgtaagttactaatagctcgtagcccagtttttatacttatcctcttcctagggctatcttgcagactgaattttttttattgtcttttctgtttgcgtcattagatgagcggttctaggataaaagttgctgggagatttttaccctgtgtgcacatgggctgttttgaccttgatgtgtttgtggagttgaatcaacgttccagaaaggtaggtctactatccttgtctagatattgggttatgtctcttgttttctgactttagttgttctggggtttgttaacatgcagtggcagtgccctatttgtctgaagaactactcagtggagcatgtaatcgtcgatccttattttaaccgtatcacgtctaaggtatgtattcttatgggaattcaagaattcttaaaatctttgtatctacgcttttattcagtagttgtcttcctgcacgacagatgaagcattgtgatgaagaggtgactgaaattgaagtgaaacctgatggttcttggcgtgtaaagttcaaaagagagagtgagcgaagggaactgggggaactctcacagtggcatgcacctgatggtagcctttgcccctctgctgttgatattaaacggaagatggaaatgttaccggttaagcaagaaggttactcagatggtccagccccgctaaaacttggaataaggaagaatcgtaatggcatttgggaagttagcaaacctaatacaaatggattatcttccagtaataggcaagaaaaggttgggtatcaggagaagaatattataccaatgagtagtagtgctactggaagtggtagggatggtgatgatgcaagcgtaaaccaggatgctattggaacttttgactttgtagccaacggcatggaacttgattccatttccatgaatgttgattcaggttataactttcctgacagaaaccaatctggcgagggtggaaataatgaagtcatcgttctgagtgattctgatgacgagaatgatttagtgatcactccagggcctgcatacagtggttgtcaaacagatggtggacttacttttccactgaaccctcctggaataattaactcatataatgaggacccacacagcatagctgggggaagttcaggcttaggtcttttcaatgatgatgatgaatttgatacgcccctttggtcatttccttctgaaactccagaagcccctgggttccaactatttagatctgatgctgacgtttcaggaggtttagttggtttgcatcatcatagtccactaaactgttctcctgaaataaatggaggttataccatggctcctgagacatcaatggcatctgttcctgtggttcctggctctactggccgatctgaagcaaacgatggcctagttgacaatcctcttgcatttggtagagacgatccctcacttcaaatatttttgccaacaaaaccagatgcttcagctcagtcgggttttaaaaaccaagctgatatgtcaaatggtctccgtagtgaagactggatctcgcttaggctaggcgatagcgcctctgggaatcatggagatcctgcaactacaaacgggattaactcaagccatcagatgtctacgagggaaggttctatggatactacaacagagactggtttgttccctgtctgagactaatgctttcctgaaaacatcaaagggacctaaaaatgtggaccatgttcttgatgttgcattacctttttcatcactttactaagctgctagctaggtcttataaacaactgaagaagaaatatctgttttagtttctatgtggcgtattttgtctttgaatatgctactttatatatgtccatagtccatgtggtatacttactgactattactgcgtatttgcagcgtcgttgcttctgggtatgaatgacagtagacaagacaaggcaaagaagcaaagatcagataatccattttcatttcctcgccagaagcgttctgtaagacctcggatgtacctctccattgactcggattctgagtaatattcttcctgatttgtctgttctgttgtgtctctcttgggatgattcggtgttccttttgattcttaacgctatgcacagaacaatgaacaggatcatcagacaagacaccggagtttaaacaagatttgcataattctctgtgcaggcaagaattgaaccggtattgatattttcacttgtatgatgttgttgactctctcttcaatatcggttcagaatcttggccttgtctgctacactgcaggatgtaatttgcaaagcgaagcactggctgatttagtttctctgatagaaaagaaaagtgggcacagtggttccgatttaattagtagtttgtatactcgaaataggttttttttgtgtggacgatgataaaattacttcgaagccaggagctatagagagatatagcaatgtaaattatgggctccaaattttatttattaattagaaaaattcagctcttctcctccattgcaaattgtgttgcatgtgattaacttcatggttatggtcaaagccagaagcccagaagcattatacttctctgccaaagacaaagaagacaacagtactacatgatgctcgtttaaggatataacaactgttataagcttaatccttgcggacaatccaatccaatcctttcgttgttcatcctggacaagtgtgctcgttgtattctgtttatgtgcaaaatgatgtggttcgtggtgtgttagaccaagtccagcaatggtttttagtgggtttttatgttagatttctaagtaaaatgggcccaacagaaagaaaaacagaacaatccatttaggagcgttcctaaaattgggtttttcgcgacccaatagaaacccatacgtggcttcactttattgggtaaaagttttgactcaaaaaaaacaaaaaaaacacattcttcttccttctcatttcttcgtgttccgacagagactccaattggaatcgaaaaacaaactcggttcttttgatttggagaagtttctgttcccgattcctccgccgatcacaatcacggcgagtcctcatccttctgattccggtggtgatggttcgaactcgaagtcttcttccgacgacgagtttgttagcttggactcttccacttctggcttctgttcttcttccggtaagttttttgatcttatgcaatttttggtacttaatcttatttcaagaaattgaagctcaagattgtttgattgattgggaaaatttgcataaatgtaggattggataaatttgtaagtgttgttaggttctgcattttgcaatagatcgttgattgagaagctgttaaaaatcattagatgatgtggtcttcaagttttttttgaaaaagatcagatccgtttcgttgaaaaagatgcaaaattctgttcagttgtatgtgcgagtgagcttcatttttaaaaagtttttgattctctctagttaacttaaaagtatcgacatgggttattgattcaatcacgtaatgattctcatacaatacattctgtattttatcatgtaatgattcaatcacgtaatgattctgtagttaacataatgcaaggtacaaaggtggttgttgtcagtttcagtttcagtttcaggaaatggattctcttgtgttgccgttgtttttacgcaggagtgacaaacacttggtcagattgagatttatggcattggttctgatgttgagatgcttagagaagctgttttgaagaatggaggtgggtggcacgggcatgggtgggttggtgatggaaaatggattgtaaagaaaggtaatgttagctcaacaggaagatgtttgagctgcagtgagcagttagcttgtgtagataccaatgaggtagaaacacagaagtttgtggattctttggtggctttggctatggaaaggaaggcaaaaatgaattcatgtgagtcagatgtggtcttcagcgagtttcaggttagagaaagaattgatgattccttgattctcttagcttgcttataataagtcttggacattaaatattaatgaaagtttactttttgtttagttaactttgataagcatttagagataggtatagtgcttggagtttctactgcgaattgtcatcaatcttgagtattcaaatgtcgatatttattgaatgttgctatcttatttggcaggactggcttgagaaacatggagattacgaagctatagtagatggagcaaatattgggctctaccaacaaaattttgtagatggcagtttcagtctttcacaggttctcccatctattttatgtataaaaatatcaacaaattttcttttttttcatttttttttttgttttagaaacccacttaagtattccaccaatggaccaccaaatctttaaaaactctaaaaaaatctctaaactacaaaactatccaaatttattaataaaaaatacatagaaactttatttagaaactaatcactggacttgctcttagtcccatgattttagagagactagcctttgaggttaatgtgggaaacttttgttcctatagcagttccttatgttcgaatgtcatgtatcatatcatatgattggtttattcattccaaagaatgatttcgtgaggttttgtttttgtatcaaaatattgattttccgtggtatatttaacgcatttttattttcaagatcaatcaattaatttatgcttttaaatttacaataaatcaaagtacatcatttattattttcaagataagtggagcaaaaagcaacttgagattaactttttaaaagatatagcacaaaaataattaatcaaaatatataatttataattttctaaatcttggtgaaaaactcaggaattcattattttagggagtaataatataaaatattgtatgattttcttctatatgatttattaattattttaattggaattgcatctcggcaatgacacaacgatgattctagcaaataccgctaggttattagtcatggtctaaagacttcaatattttatattatttttttacattttatttgattaaactaaaaccatttgtatttttattttacatactaataaatatgttaccaaagagtataaaaggtctttcaattatgtgtatatattagtgaatttttctaatcctttggcagttttctataaataatatttcttaaagtacgcaaatatgtttatatagcaaacagttctcaaaaatatcacacttaagtttgatctttcaaaaatactacttaagtttttggttttccaaaaatatcacaaaactaaattaaattttcaactttcaaatcctaaccttaaacactaaaatcctacccttaaaaactacaccctaaatctaaaataggtaacccaaacctaaaattttaaattttgaactcttggacatcaatttgttgttttgtggtatttttgaaaaacaaattttttttggtagtatctttgaaatattaaactaatagtgacatttttggcaacaaaacttaaaaaatgtggtattttgaagaatttatcttatataacaaatatacaaattaataattactgcaaaagtagtttgtctcgtctaaattttatggattatatttgtagaaaattattgtttccttttttaaattatttggtatattaactatttaaaagtttcataaataagaattttaagatatttagttcaatcacatatttctaaagatctcatatatatttattattttatgatatcagtataactatatttaccataatatttataactctaaaatcaatttcagaaaatataccaattaactatcaaaaataataagttaacaaaaatcattgtacctcagataaaactttaatactgtaatcaatactgaaagtttttaagattaatcaattctatctagttcagtattatgataagattcttttaaagatcactattttatgcatactttaataaacatgcccgtattatattatcatcggtaaaataattttaattggagatattatctgaaacaactaccatttcactatttttggatgacatttacattctacatagataagttgaatatttcatattaattactatataattgatattttgtgtaatttaagagaatctggcttcaaattatcaaaaaataataaagtcattcaaataatttttatcaatccatcaaatgagataggggagctataaatattattggaaataagatatcaccattttatcataaatatatgttattatcagtaacaaatttatcgccaataacaatagaggaatgtattccattattattttaaaaacagagttagtaagtaatgtaacggcatatatctattgtcaatttatcagaaataataatgaatttggaatggtcttcatattctatataacggtccaaacaaaataattctatcttaaagctctcaaaattatagtgttatctcatggtatccgtttttgacgattttcattttttctgtatttatcacataaataactaagttttctatattcataaaggaacattatttagtgcaaaattcataaactcatttcatccgataaacaatatatcgaatgtttttccttgaatctaatcttttataatatactctcttaaaataaatatataaataaactatttttagatgataattacatcatataaaggttagtgtgtatatatatataaagagagaaggatatatgtgtatggaacacaaagaaatagttcatagtcatgccgggcttaatcatatatatatctcaaacctatcacaattgtggccgagttgctagaatcacataacaattttatcataaatatttttcattagtgataacaaatcaatcgctaataacgtaagaaaaatatgttctatctaaaaagtagcaaagaatatgattgcataaataatgtaacggagtatatttgttacaacaattgctaaaaaaatcatacaatcattttatcataaatagttttcattatcgataatagatcaatcaccaataacgagagaatacataagaagaccctttaacaaaaaaaaacgagagaatacatgttttactttagaaaatagcgacaaataatttcagataacaatataacgattttttaatatattaaaatatgagattaagtttagaatattaaacaattaacgaaaatgatgtatcagtaaatcaaaaacatattgaccatattacgcttgttacttgttagtaattttttttacgccgccatttttgttgctatatttaaaaaaaatattccaataatattactattagatatgaaaagatcactactaattaaaggtggatctttctggcagatttggatacattgtacaaatgaaatgagaagataatagtcaaataaatttgtattgcataccatatattgattgaatattaagattatgaaatgttacaaaaatagtaaaattcaaattcaaataaaaatataataaatcaaagttgaaatttactcatagacaactcaaatattaattatttggtttgtaatattctgctataaatacatgagcattttcattctacaaacaccaatcctatattttagcttctcaaatatcactaaaaatggtgaaaaaaagcaaaggtcgtcaaaaaatagagatggtcaaaatgaaaaatgaaagtaaccttcaagttactttttcaaaaagaagatctggacttttcaaaaaggctagtgagctttgcacactttgtggtgcagaagtggccatagttgtgttctcacctggtcgaaaagtcttttcttttggtcatccaaatgttgattctgtaattgatcgattcataaacaataaccctctacctcctcaccaacacaacaacatgcaacttagagaaactcgtcgaaattcgattgttcaggatctgaataatcatcttactcaggtaatcttactcttatttttaagtatgattaaaacaaaatagtgttttctatgaatcataaaacccaaatttctatggttaaattctttttttatttaatatatataagtaaaagttttcgcaggtgaataaataatatataaaaaacattagacagtctttttctccataactagaatagatttatatcctaatagtatgttagataaaaatgccgatgaaatgttatagaatcatatggtatgaaaattaataatattattggtgtttttatttgtatatatatttgcaggtgttgagtcaattagaaacagagaaaaagaagtacgacgagttaaagaaaataagagaaaagacaaaagcccttgggaattggtgggaagatcccgttgaggaacttgcgttatctcaactcgaggggttcaaaggtaatcttgaaaatttgaagaaagtagttacagtcgaagcttccagattttttcaggcaaatgttccaaacttctatgtgggaagttctagtaataatgctgcttttgggattgatgatggtagtcatatcaaccctgatatggatctctttagccaaagaagaatgatggacataaatgccttcaactacaaccagaaccaaattcaccctaatcatgcattaccaccctttggaaacaatgcttatggtattaatgaagggtttgttccagaatacaatgtgaacttcagaccagagtataacccaaaccaaaaccaaatccaaaaccaaaatcaagttcaaatccaaatccaaaaccagagttttaagagagaaaacatctctgaatatgaacatcatcatggttatcctccccagtctagatctgattactattaaccctttgttgtgtgatccaacttaagtctctagacaaaaagttgtgtgtttaggttatctttatttcttcttatttatgtttctacatgtgttgttgttgtttttcttgttcttgtttaagtattatgttgtattgtgttgtttcatttcaaaattatgttattgctatatataaattatatgtgtcggaaacaaatgcattacgcctctgaaaatactagtctgccatggttacgtttacgcattttgggcaattgcagaattttaaacacagaaaggtaataatcataatcaatcatgtactattttaaaataaatttgcaaaaaagcataatgaaaatttctgtgtgcaccatttttcaactaaaatagtacatacattatcccacatattttggtacattgtaaaaaatgaaatgacagcattacaatggctttccctctaatttcattccttataatgatgaaatacagatattgtgaaatattcctaaaatgataaaaatctaattctaatatagaaaatataataaaattaatgttaaatttaaggaaaatataataaaattaaggttaacttttagttgaaaaaaaggctaaatctatgtcacatcattctatttaattaatccgtgcagtatactctaatatttattttccttaaaaaagattaaatcatcatcaaatatctagtatgtattagatatcaatctaaaaataaataaaaaaattgtaagaacaatacaagagtatccacatatgtaagaacttaagaaatgaaattttcaaaatcaagcaaaatacttcaaaactaatatatatattgtaattttgaaaaccttaaaatccaatggcatgctttacacatcccataaactcacatatctctcgagtaaaacggtacacatgagacatccatggagaccagaagaaacacaaacaaacacataaatggattcaaagacaaagataaagttgaagttcttttgtgagcaaaacacactttaaaacataggaaataagcttctttatgggtatcaaaccctagtgattgtaggagaagaatcaggctggctcacagaagatgactttgatgcttccatcatgagagcagcttgctctaaacaactcttgttatcgtcattcgcattctccacttcctctttcgtgtataagtgtatcttccacaccacattgcagaaatcactatccatagcagaaagccaatttcaagttaggagaaaagaagttgtgattgacctttagaaggtatgtataaagaacttactgccatggatcatcgccaacgaccatcatatcgttctcactatcagtatataagatcctccatcctttttcaggatccctgagaagcccttccatgttgaacagccgttcaagctccataaggagatcatcatacccgttaagtcgcgacaaatcaatagctctccccacttggcttccttgcttgtgaaccttttgataacaattcaacacaagaactgattagaagagacatctaaaactgcaactcaaagtagccaaagagatgataaagaaaacgttttacctttgtacagattcttttgctcgagctttgcggcttagatgcaggtgtctccactggtaaggagaatccgaaaagtttacatcctgatgaagcattcatattcaactcactgcctttctgttttcccatcatatcaatcttgaatggcaaatcagctgtaacattatttggtaggccaccttcattttgtgcatcaaactttctagtctcttcaccaaagtttattgcacgtgaagggggacccgaggattggtttcccgcattgtatggattctgatacggaacatgagtgctcctaatcccatgcaaagctagcggatagtaacttgacttgttggcttggtaagcaaagggattaggagcagcagctggactgaaaccagcaaattgcgggaatgatttaagcgagcaaatttcttgaccttgcaagacccttggaaacctatccaggtccataacacctgaacaagctgggttcacgccagtagcatctacaaactcaccaaatcgatccttgactctactcgacacaagaactggatttgcatgagactgcatcgcaaaatccagtatccggcggttcataacatcaaacccctgtgagggtgatgcagaacctatattttcttgaccttgcaagaccttagagggtctaaccgactcctcaaagtccaaaaaaccacccctttctgctgcaaccaagaacagttatcaataatatactgatgaaaattgagaactgtttgcaaaagcatatactccaaagagaagagaggtctatataatttacttgttatggggtttccgggtggggtagtatccagtaaacctgcccatggccttttaggccttggagatgactgaatgctcaagtgtgggagagaaaccgagggatcaatctcccaaggtgaaactctttcttgatgatcactcacaaaagactcatcccatcgcacctgccaaacaaatgtgaaagatttagatatcaatcttcgaaaatgaaaagtcttctacacgttaatagacagatactccaaaaagatgagaggacgcaccaacaagcacctccatttagagtttggccacctatacgggtccaagtcacagactccagtcactacaccagcgcatctgcaagaaagatcgaatataaattctcgtccaacaatattagctacacaacacagagaaagaagcaagaaagaaacaataccttctctcaggagaatcgtccatttcaaatcgcattctaaatcttgtgcctatgcaaacaggactcctgatgcttgtgatatacttctcataaggaatcacaaactctgcatgcgtcgctctgtatataaatccacaaatcaacattatagttctttatttcttactgaacctagttaagaatcattacgaatggcagcttttcatttttatctcaccgtggactgtagaacacatgaaacatgctttttgtagatacagcattagccacaagagacagaatgtttgaacatgaattcttctcaatgattgagtcaggaagtccatttcttggccgtgctgctcttctgattcctaatctcagctctcctccttcgtctctataaacgccgatattagtaatgaatgtaaacattattggatcaagggcttcaaaccaccaaagcagagggaaacaccatgaatctacatcaccatttgataaactgaaatcttacgattacctcagaaagagaaccgcatcaccagagacgagattcttttgactgacaaagatactccaaccagtggtgagtagatgcctccttggttgacctatattaaaaagagacagaactaaacattttggtttcactgacgaagaaaaaagaaacgaataataacaaactcaaaaccacctctatagatatggcgaaacttccactctactccatggaggtcctttgcaatgagctcttgagatggcctctgttgtttgtagtcctaacaccagtggaaaattcacaaataaggcttataacaagaagataaaacctctccttaaaaaaaaaaataaggaaatgagatatagagaattatacaagaggagcaaaacaatcttcagcggctcttctaggtacagagaagcctccatgtgtgcttgtgtcagacgctgttaaggttttacagaacatatgaggtgtccgcttgacggatgagcttccgttcctctcttcctcccctcctaactccttgacctctttcccctccccatttagcatcgaaaactataaaaaccaagaagttacttcagcatcttaacatcacagagattataaatgaaactcaacaagaccaacggtttcagtgattcctctgatcctgttaaaccaatgatgagtttgagtcacttagagaacaaacaagattattcacaatctctttaaaccgtagcatctaaaatcacacctagaatctggaattacactagtgatatcaaaaatcaattgaattgtcaaaaaagcaacaagtttgagtaaaagagagtacctcttgaagtggaagcagagtgacttgagtgtagacctcatcggtgtccttattagccttttgtttccccaaaagaaggaaccaagtttgcaaacaattaccacaattagagaaagaaaacagaacttgttcaagaatagtaaaatagaacacaaaaggaatgttctttatttgggtagagtgatacagacagacttacaagcaactggacattaaccaccctgcagacgatttggggattaaggtcaaatttggggatttcaagaggagacgaatatgaaaccatagcatcttgctccaaatgaccttgagggaaatagacaactacattgcctttcttgggaagacaagtgagaggaccagcacaagcatgccaaagctcagagtaaatggaagatgcagagcctgtagaagatgatgacgatgatgatccggaagagcatgaagaagaagaagatggtgaaattccaagcctacccttgtcaattcttgttcctcctcctactcctactcctacatcatcattctcctcctcttccacctccgcaatctcagtattcaagtcaaattccattgaaaaagcttctcttttaagagcaaaaggagacaagaagaaaacaaaaagtttctatttttaatcagattacaacaaaacaagtaaaacccatcaaaggaaagtttgcaaaattcgagctttgaagtgacagaattcggaattcctctcctttttcagctaaatttcacaaagaagaggcaaacttagctattgacgggaaagatgagtcataagtgtggaataacgaatcagagacagagagagaagaagagagaggaaggaggaatcaaatgagaacaagggtttcagagaaggattcttcttcctccatttgcaggtactgagaagagggagcacaaggaacagacatagactaaaatttgcagattggaaaaaaatatactttttaaagagcaaaaaaaaaacaatttagtggaaagagagagagagagagaaagagagggagagataagcgggggagacaaagccaagacagaacagaacccacacctacactctccctttctccttcttcttcttcttcctcttcttctctcttttttgtttttgtttcccaataaagacttatttattcacatgaaattttatatataaaaactatatttgtgtcaatatacacacgtttacacaaaataaaagttttcacttttttgctaattattaccgtttttgattttcgtcctttttgttgaaagaagaaatgttaaaagtttaattaggtgctaataagactaattcaatccattgtctagattgttttcttcaaaatcaactgttttttaaatacgtcaaaccatcgatgaatcaatcgtttaattattcatactagactattcactcaaaatgaaccatcaaagtttatatgcatctattggatttatggtattacgaaattgacgtaaccctttgtttttctcattcacaccataattttctttaacttgtgtgagttgtgaggaataaaaaccgcaaattgattagctttttctttgcatactcttacaaaggaaacagtatctctttggaatctttctttgttctttctttttttatgttatgaatttttatttgttttcgatttattagaaaaaatgctttttcattgcgttgttaagagccaaccaaccggctaaagacagaagagtaggctcctttcgattttgtaacaaaagcactttttctctctttttctgagacaaacaatatgaaaatcagcattttgttattgattaactaaagtactgtctgtgtttaaaaacctaatcaactaaaaaaaactttcagcggtctgtaatataaaatttatacttcaataaccacaccgactctttcagtaaaataaaactactcaaatacttactacttattggataaatatcttcaaatgggtttagtaaaaataaataaaatatatttgatggtccaaatgattgcttcataatttgaaaacatttatatatacatttttgcagtcattttagcaaataaatcttagagttgaacttatttacaacccaatgccattagcattaaatctttttttcaaaataattaattttactttaaatttttaatttaaattgtcaatcacattatcaatcaaatttaatccaaacaaacttcacatcaatcccttaaaattagcataaacgtattttattaacaaaattttttgtttaaataaatattgttcttactaaatattttttgtttaaataaacaaatcatgtatttgaacttatttacaatgtcatgctactgacattaattatttaggcatgaaaatatttatttaaagatttaaatcttttaaattttgcttttagagttattatatcatttacctaaaaggcaaaaaatattaattttttaaatattattatttgtatatttaaacttcataaaacattattaatatttgaatttataaaaagtttaatctatcaaaaataattaacatcattatataatatataaagtttaaaaaaatctcaaaaaaaatttcgtcatattttgtaattcgaaattttaagaatgaacatatattaaccaattggcgaaaaatgtgtgggtacaacgtcccgcaacgactaaaatattttgacaatgattcataaacatattataaataagatcaacattaataaaataaatagtttttttttgtggacgggtttggcaggacgggtttggcaggacgttacttagtaacaatggtaaactataaaataatttacaaatttttatatatattaatttttaaaaatgaactgtgtccgcggtgtaccgcgggttaaaatctagtaacatgtatttttgctcatataatattagtttgctactaattcatataacctgatcaaagtatcatattatgttttgtatattcctttcacaatttcgcaacttacttaattatctacttttaaaaacatttgattatgagtaataacctttcgtaacttcattggagaagaaaaaaaagaataagaaaagaagaaaacaaaaaggatgatgggatgggagaaggagaaagaatgagtctcttcttcagaagttgtgagttagtgactgagtcccaacaactaacaaagacccccttgatatttgctgcctctttggcccccaccttctttattgtttttcttacatttttcatgcaacatactccttctaaaactagcttaatattctcactttttttctttagtacttctgattagaaatatatatcttgtttattctgatgttgcaccataattcgaaacgtgtaatctcttattcttaatgatatgattaccatattcttctgtctgctgatcataacttttagtcaaagattatctttttttaattagtactaaaaagaaagagtggatcgtatctcattttcatgtttcttaatttcctaactaaaataatattttactaagaaagtcgattttgtacaattttagaaaagacatctaatttgattatattgtgagaagtcccacggttgaattttatgatgtgagttagttttggaccaaaaactcaatatatataattatatacacgtaaatttgtcaaaatacaacacataaagcaatatagctctgaaaataatagaattatagaaataaagattccacttaaatttgtttgtgactttctcctgctgaaagtaattaagcatccatttgaagaaatgagccacttggatgctttgactctccactcaaagtaagcttgtgtttataaaaaaaaacctaagcatatattcatcctctatttgtatttatctcgtcttttacatgcctccatttttttttcttatcctccttttttttttttggtaaaactcttatcctccctttcttacggtacaagccatcacgctcggttctgattttcttcttctctctgtttcagtttcgtttcatgcggcatacatgtaaattactaaattgtagagatcataacgttcaatttatcgagttttatttctgaaaatattatattttcttttttgtaccgaggtttcaaaatattcatgtttttttatgtgtggaaagaatagcacatatccatagccatatttgttgcctgatttcttttgaccaagttgattgaattagcctatggatatttgttgttcttttcaaatatatggcaatttttctttgtactatatttttaatatgtattttttgagtttacgagattcctgcatgtacatactatataaatttggcgtaatttgtaataagaatcaatatataatgaaatcatactgttttttataatattgatatttaagtagagatggttttattaaaaatagaagaaaaaagtttattgtttggcagagcaaaaaaaaaaaaggaaaaagacagaggtggataattaggagacgtcgtgtcaaaaatattgtcgcgagaaaacgacaaagcaacgccaatgactttattaaagtcacaagtgtctgtatcattcgattaaagacactcctctctctctctctccctctcatttttttttgtaatactatttttactttctttttttttaacatgtttgtagttaattgcggttccggaataaccacacacagagagaattagttacagtcattttaaaaatccaataaaaatctatgcacggtattcttgaaattgtgttttatgaagggaaactaattaaaaagttcattttcagaaattttaatagaactacatagccaagaaaattaaaaacaggttgagtagaattcataaatcaaacttgtgataagaaaagtaggcccatcaaaaaaaagaattgtagagacaaatggtatcccataaggagaaagcaatttgtcaaattggagcctacattaaaagttgggcccctattttaactttttcaactctttttttttggtttaaagtttattaaaaaaaaaaacagaccaaaacgattagagtgaaaattgaagcttgtcaaactaaactctataatcctcgatcctcgttgtaaaccattcacaataataagtaatctcatcatcgttagatatcagtcctcgatgatgttattttgccaacacaattataaagatcagaaaccaaattctatgttgatttagagttgaacagagttggtgtcatcatgttacaattacaattgttactagggtctattgttgttacataatattggttgatatcgaattatggcatgattttagttatcataatgttggggcttgggagttgggagtgaaccgactctctaatgggcctgcgatttcctttctataagtgttgggtcttaggtgtgatcataattattatgacccggatctttaatgggccttctatttccgttctatcagtattggggcttaggacttatcataactatgatccgaatctctaatgggccatcatcttccaccggattcacttcaatctgtgtctatcagagtcgacagcaatgagatcagtccgtgtgatgaatgccgtcgagtttcttgaaccaaagaagttccaattgacaaagacaacaaacatggctctactaacattccgctgaagaagattcacaccaacttgaaaaatatatcagtttggaatcttcacaaagatgaatgctttaaataacaagacgcttcctagctagtagctaggccaatttgggattctgcatgtgtgagagaagagatcatcaacttagtaaacgactactttgggcaagatagatcaaacatgtgctactctgtttcaaaggtgacgtattttattcaacgcttagcgatttacatggttctcatcgaaaagactaaaaaagggaaacaaaacacaaggaaacatactaaaaaaaaaaaaaaaaacagcgatcaccgattaaacgatccaggtcctgatccggatctaagcttgggatccggatttgtggaggtagagttttccaaagacgtgaagagcagtgacgaagccgatgaaacagagactcatgatcagaacaaccgtcggtgagatcttcaaccccggagcatcatctgtgtagaatctcagcatgttgctcgatcctgatccaactccagatccgccgcctgaggatacgccaccaccgccaccgagcctgcggcgacgcatgccggcagtagcggcggcggaaccacgaggagcggccagaccgggccgggcggttgaagaaccggtggaggttgattgttgggattgggaagagcctctcgccattgttgtacggtcaagggttagaagaaaaaggatacaaggtgagagagaggttatggagatggagtaatgttagaaagggtagtatggtaaataacgtcaaatctgaagggtacttaagaatgttgatgatgattaggaagagacgtggggttctagtggaactagatacaaattatgaattcaataatactcccaacgacttttgttgggcgttagtacttagtagtaactagtaagatgaatattctatcaataaaccttaaattgataagttaaacggtgtcatcatcattggagatcacataactaaatgccgtttggataggtcctatatatcttgaacatatcttggatcgtgtgattattcatttaccaccgacttgcaaattattccttctttgctttccctcatgtgtattagactattagttagtggctaacttagtgttaatctttcctcctttcaaaattacgcgttttataaatgagaaaaaaaaaatgaaacaagtttgggcttttcaaacttttagcttggttcaagctagttgggtttaacatttgagtttatttttatttagttaattcctactagaatgggctattgtaaaaacagttgggctactctttgccacacctatttcaatttttcaatccacaaaattaagaatacagaagatggtaaaaaaaaaaaaaaaaaaaaagagataaccacatgaaataaatctagaatctcggtttctttaagttttttttaaaagtcattggttcaatgtttgcatagtgaaatgagagaataatatcaaagtaaatgtaaaaattcaaactcttccaaaatgctaaattttagttttcaaagctcaaacaaaacatgatgtgtaaacacttttggtataagtctcataatgtataccgagtacatgcatctttcacatgcatctgtctcgctatatatgtgtatgtatatatgataattagaggtcaaaatgtacttatggcgtaattatgtaatgatgatttgcttgccccatcaaatttgagtgttggctgtaaagacaatctccttttccccattatcgtcctttcttcatgtttctatattcgtttctatattcttcttttatatcctttttatgttgatgtcatctcaataaattttgagtcggtgaatgatgaaggatttacttgatgtttatagcaagaaaatcaaaacatagcatcaaaaattataatccgatcctaaataattatgaatgatattttcacgttttgaaaatcataagacgttatttttccattccaaaacattcacttatgtggtattataccagtcatgctcatacgaataattttttttgttacaacagactccaaattaattaattagaaattagggcatcaacattctaagaatgcaaacttaaattagaaatatatacggagggagacctaatgattctaaaataagaaaattaatttggaaaaaatgagctaactattgtcattaaacagaggtggtgtgctttgttagtatatgtatgatgtgatgtcacttgtctcactcgtaaatgatttggctgaactttgattaccattttcaaatttaaagttatattttcatcatgatcaaaatagatattattaaactggggaaaatcacccgtgaacattcatcttgaattcatatctattgtatttactatttagaataacaacagctcctaacttatgctcgctgtgactttagttaattataaaattcaatatagaagaaaagaactgattttcatcttatttcattatacgggtatatataagaactttttcataacgaaatggaatgtaaaccatgtgtaatcgatcgactgaaaaagaaatgtacgttgtggtcttattgtttagtcaactttttgaaacagtagaaaagtccaaaagtttaaagtttgttcacacctcatgcatacacaatcatacaagatatatgcaaaattttctatgtctatatattacaaaaaattgatgttctagtaatgtctaattcttgagttatatatatagattaaggataaccatatattattctcatattattatttttaaaatattaagtcatgataataatatgttattttgactaaaacgatatgctaatatactaggaatgaaaacattaatttcaaaacaaaaattataaattagaattatataagatttgtgttaaactatgatgagaatggtccagtactgtgagtccatgacttaccgacttgtaatagaacagttgtgtgtaaagagagaagagagatgccgtcttcggcagcctcttctttttggtgtcatactcttcacaagtgatcaaaacctcactcacccatcacaatctcttaaacataaaaatccaaaaagaaagtttttctaccaacgaccaaaaactaaaaaaaaaaaaaactttctaaaacttcaataatatccccacttttcagcccataagaaaatattttgatttagtttttatatgtcacaaagatgtagtgtcattagatagataatcaagacattattactagttttcttctttcatttctctctttctgtcttcttgcttgtttaagtggagaactctaagacaaactaaactatttttttttttttgtctcttcttacatatgaatcaagacatgatgattccacataatcatgaccgcctctcattctctagctttgtccatgaccaagagcacatcacccctaatccttaccctaactctcagcctgcagcctccactaaaacacccaagaaaaagagaaaccttccaggaaatccaggcatgtgtatatataattttatatgttctccatgggtctttaataaagctctagcttgatgtgttttcatcaaaatcaataatctttttccaagtatagatcctttgtgttttcttttttctttcttgatactgttttatttttattggttctaattttgtttctaacaacaacaacaaaaaacagatccaaatgcagaagtcatctctctatctccaaaatccctcatggcgacaaatcggttcttttgtgaaatttgtaacaaggggtttcagagagaacagaaccttcagctccacaaaagaggccacaacctgccatggaagctgaagcagaaaacgaacaagaatcaggtgaagaagaaagtttatatatgccctgagaagagttgcgtccatcatgatccagctcgagccctaggagaccttactggaataaagaagcactttagcaggaaacatggagagaagaagtggaaatgcgataagtgttccaagaagtatgctgtgatatccgattggaaagctcataacaagatttgtggtagcagagagtttagatgtgattgtggtactcttttctccaggtcattactactctttctacgtcttcgtctgcagcattatcgtttgccttaacatgttcatatatcaaacatttttaaaaattgtaacaacggaaaaaacgttttcaaatcttcaggtttgcatttatttgaagtgtttgataaaaatataaatataaacgtaaaacacaaaacatatttgaattatatttgaaacaaaccgggtcttataattggacatcgaaacagatgcatgcatacataaaagcatgatattgcctatgctagaaaaataaaaagttattgagtttactttatgtatagcgagtacgttggtctttggctcgtagcttgtcatttggataccactaccgttaattatttcttggcttctctgtgtcttggtccagtttgtagttttatagagacaccaatatcgaggagaaaaaaggctgcatgactaggacatgatgtggtcatgtctccatagccttgagtcttttttttttcaccttactacacatatcgattataagcttgcatcgaataaagagttgcatatataccatatacaagaagacctattttaatttaatttatatgttaccaattagcctatattaacatagttactttattgaatgatttggttgattgtaccaggaaggacagtttcatctcacatagatccttctgtgatgtcttagctgaagaaagttctaaattcttctcagttccttcaccattagccgccaattcgaccatcgccactgtcactgataccaacaatccaattctcattcaatcacaattggatcaatcttccacaggtacggccgatcttaacgtcaacaacaatcacaccaccctatttggacaaaagttcaccaactccaacccaacccaacaacaacccaatgctttggcgttgtcctcaccaccatcacctcgtagtacatctgattcggttcataatctatggaagttacaagaagaggaatgtgcacaccagtggttactcaatgaatatatgaacaataacaaaaacatattccataagggaatattcaagaatcaagaagatgagataaagaagggaaatatctacagcggctcaaacccaaccgatggaaacatagcatccttgttctcgtataatcaagaagcagtgaatatggcttcattttcggcaacaacattgcttcaaaaggtagctcaaacgggaacaccatcaagctccgaaactagcaccaccatgtttgggcaaatgacttcctccatcttcaacaatacgatgctaaactcctattgtttaacggcgaagaataatgaagaagagttgaccagagactttcttggtgtgggaagtagtgaggaccaacaacgtctacatcgtcatcgcttcccatcaagcgtgccattgacggcgaaccatgatattcccaagttggccgcaaccattgtaggcaggaagcaaccatagacatggcgtcatctgattctgaaattactcgtttttgttgacatgcaaggtaattaaagatagaaaaactatctccacaagttctttagaaaaactatagaacaaaaacctgaagcgataatttgtttacaaaataatatgtacgtggaagtgtattgtttaaatctaaaaattttatttatatattttctctcattggagacaacgtatgggatgggagctagatgcgagacaaccatccacaacaataggagaaaagcgtagatcacgagagaatttctgagtcaactcgatttagtagaccaggttaactcggttgacaaagattgaaagttatttggccccacgtgccaccatgcatagagaaacctaaccatggatcatgcatgaaattcgaaatctcttttcttgcagaaacgtaaggtttttatcctcccccccaaaaaaaaagaaacgtaaggtttttatataattcttaagcgttttcagatttgattaatcatgactgaaaacacgcatctcattcttcttgtctttttaaaaagtttccaaactaatgctaaataataggattatttactaatccaaattgcaatcaacaatgttatttatataaacctattggacaaaatctctccctttatgtcattgacaacatttccagaaacagagtataaacgcactagtgagtgaaataagaatcagacatgagctcgttatcaaaaccaaacagacaatttttgtcaccaacaacaaacaaccaagacaccggcagagaacaaacaatcgcctgcgcccgagatatggttgtcttgtacaacgagtgccttaaaaaccacgcggtcagtctcggaggccacgctcttgacggctgcggtgagttcacaccaaagtcaaccaccatcctcacggaccctccgtcccttaggtgcgatgcttgtggctgccatcgcaacttccaccgtcgtagtccttctgacggcttcagtcagcaccggtcaccaccgtctccgttacagctgcagccactcgcccctgttccgaacttgcttctctctcttagctccggtttctttggaccctcggatcaagaagtcaagaacaaatttacggtggaaagggatgttaggaagactgcgatgattaagaaacataagaggacgaaattcacggcggagcagaaggtgaagatgagaggtttcgcggagagagcggggtggaagattaacggctgggatgagaagtgggtgagagagttttgtagtgaagttggaatagagagaaaagttcttaaggtttggatccacaacaataagtactttaacaacgggaggagcagagacacgacgtcctctatgtctttgaatttgaagttgtagatctctttacagtgatgggtcttcatcttcttgagataaggaaaaaccgaaacaaaaagaggttacggtagtctctgatccgaccggaatgtcacgtcagaaatataaattatctaagtttttttaaaattaaaaattattatcctagaagacttgtcattttgggcataacttgtaacgatggatcatgactcatgacatgtatatggatatgtattcgagtgatattaagggtatttactctctcttttttgtttatatttatatataagtaagtatatagtgtaacaatgctgtaaataataattcatgagtgagtaactaagaaaattgaaatatataggtaactggttaatatataggaggaaatcagtacctagttttttttctttctctacagtactaatcctagtttaaggagtaaaaggtgaaaacaggatgtagtctctatatagatacttcctacttgacacggctactttaactagtgacattgagaaacacaataacactccttttgaatacaagatgtgacccattctcgttgacactacaaacgaatctcctgaactttaaaggcaagtagattttaactaataagatacgtgattaggatattatatgtacatccatttaaggataaagcttcggtaacagccctcatataattgtcctaaataaggataatgcaattgtatctatacactatattgtcctaatacatatatctttccgtaaagagttggctcttcacacacatcttgaacgaagcatctgatggtctttattccttgtcatcagaagcttcttattggggtgatatttaatggaagattctttgacgaaggaggagtcgtcacctatatgctgtttcaagtttcaaattccaaattataaagagattcgttttgttgaataattattaaattgatcgactggacttccattttcccagatttgcaatcatgcatgtggcaaaccaatttaattctttgacttaaattaaaatgaagaacgaatttgttgctatagttgtaggatggtttttaaaaaaataaatgtattatcaatttatactaacgctagattaaactttatagtattggattttgtatttgatcagtagatcagaatttttattgcaaaagacatatatatgaatgggtgaaatacaaaataattccatacaaatgaatgtgattttttatttgaaaaaatattaattggatgctatttcatcagaatttttattgcaaaagacatatatatgaatttttaatcatttttattgcaaaagacatttataaaatatcacactgtttctaatgaaatagcatccaattatttatttttcaaataaaaaatcacattcattttatgcaattaattcggctatctatctagatgatatatagttttatgtttcgctaacctatacgatcgatcattattatttaagcaactggatcttgttgaaagaaatgtgaaaataggatcaaaggaaaaaccgaaaaagcaaagataaacgagatattaacaaaaacacaattctcactcgcacgaaaacggaaaatatgatttgtattaataaaaataaacgaaaatataaaaaacaaatggattgattaacacaaaatcgtatgaaaaccaagacacaaatatatccccaaaatcacccacatggcagaaaatcatgagtaataaaaaataacaatttatcagcacaaaaaaaaaaaaagcttttcatcacaaataaaaccatgcgagcattacactcatgacgcaaaacgacaccgcatcacacacagaaccaacattacgcaaagcaaacgaagcatccgccggagaatcatcactggaactatcactgtcatccttcttcttctttgatttcgatacagacggagccggagccggagcaggaggacgaggatcgaaaacttgttgtggaagcaaaaccttatcgacctgataaacagcgagctgtccatcgctgtagacattgccggagacggtggtgttggttacgccggacgtgatatttacggtattgccactggtggtaacgttgagaggaaaatgtccatcggcggagtcaccggcctgagtccggagagggttacttattgtttggaagtttgaggaagagacgtaacttggtatgacatgaaactgaataagctctacttgttgctcatcggttaacgaatttagggtcccggctttgagaccggtgaacgaggaatcactcggtgcgaatatagtgattccattgtcggagttgtttagttggccgtagagttggttagcgactccagtggatttgaggagtcggatgaagacggtgaattgaccagctttctctaggattttggtaacgtttgtgggtcctggtggggccggagcgacggctggagagggctgagataggattccgggagtggtggtgaggaggaggaggacggtgaagaggaggatgatgagagaatgttccatggctctgttttcaagagtgttgatattttgtttgtgtgagtttatatgaagagtaaggggttatattgaactgggggaaattgattggttaagaggtcaacatattttaacaactaagttgattgttaataaccaatgatgattttatcacatgaattgctttacctacaggcaaaattattggatatatagaagcctttatgccattgataagcaaaggggtaactgtttacttttttcttttttggttttattgttggttggatagttgtattttgtggtttaatgtaatggttttagatttaccagttatatatgtaaatgtaagaatgatatcttctcttaaaaaaagggaaactaataaagtaattaatcaggttctagttggtaacatttgaaatagagctaataatgaaaatgtataaaaaattatcagtagttggtatgactgcgataatgtatatttacacacagtgtgtgttgcaaaaactaaaaagaaaatcattacttgtgtttgtaattatcaaatcctgtgtacggaacggtgggaggaaaatggagaatgtggtgtatgtgataatggaaggagcaacttgcaactttgcttggaaattaagaaaaagcaaattgatttgtggtgggctctctttaattttcagcatatttcacgtatgtgaagttcaattttttgactaaaacatgtaacgtaatatagtttgtattagtgttattgttgtgtaaaaggggattcacgcccaaatcaatagataaaaaatggacaacataatttcaagagttcacatgttttcataaaagcatatataacagaggatttaacttaattcattttaaaaatgtaaaaaaataaaaataagaccgattaaaatattgttccaagacattttaacgcccaaatcagtaaattgatcgaatataattagatttgtctgcatgtgaataatactactactatataggaattgatcgaaagattctcattaaaggaaaacagtttctgaagccgtgaataactttcatattttcatttacattttctttgaaatgaaaaaaaaaaactttcatttcccatttttagtgagacacttttcgtttacttttgccatatctctaaggaaacagagattgggttccacccttttgaattccaccttccacattatacatgtcagcatatcattgtgatttcaaaatttgtataagtactttgaaaattgaacaaattataaatattttatgacaaaattatcatctttttcatttttaaatctcaattcaatgtcagcacatagataactcgaatcaaatgaacataattacataagtttataactgacaaactacttgaggggatggagattaatttgtgaaggtgggtgtgaattggttttgttagtgtaattaattaagtggggtataatgaaaactgcattatatcatcctactatgatgtttatgcttttatcagttttgattttgattggcatcctcaaatctggttactatcgctctcttgtctttttgataaataaaaataatggctcattgtattactaattagagaattgaaaaagaataaaattgaactaagagagaacaaaaggaaaatagaagaaatagaccttacaaccatttttgtttatgtcattccattcgcacttacaagagtagacgagtctttacgtgtttcttctaagcctataattataatcaaacaaaacaaaaaaaatgaggtaaaaaagcctccttgaagaattttacgttttcttgtatttattcttacatcaaaaacaagaagtacacatatacactaatataaaatgtcttaaccggagacattacactaatcggagaaattaaaatgttttgtaccaaatgacattaaccggagacagtttatatttgattaaaccagaaagaaagtttaaacactaatccctaatcagcaattttctcccttcccctaaaaatcagccgtatcatatgctcattccatttgcattccccacagaaagaaaagaaaaacttcattctcttgtttatatttcactcgcaacaaaaaaaacaaaaaaaaacaaagtgtgttcttaaattatcttctctgataaccaaaaaagccctattttccgagatgaataccctagaagaagtagatgaatccactcatatcttcaacgctttgatgagtctaatgaggaaatttttgttcagagttctatgcgtcggtccaatccctactaacatttcattcatcatggatggaaaccgcaggttcgctaagaaacacaatcttataggcctagatgcaggacatagagctggtttcatatccgtgaaatatattcttcaatactgcaaagagattggtgtaccgtacgtcacactccacgcgtttggtatggataatttcaagagaggacctgaagaagtcaagtgtgtgatggatctaatgcttgagaaagtcgagctcgcgatcgatcaagctgtatcagggaatatgaacggcgtgagaataatctttgccggtgatttggattcgttaaacgagcattttagagctgcgacaaagaaactgatggagcttacggaggagaatagagatctgattgtggtggtttgcgttgcttacagcacaagtctcgagattgttcacgctgttcgaaaatcttgtgttagaaaatgtacgaatggagatgatcttgtacttttggagttgagtgatgttgaagagtgtatgtatacatcgattgtgccggttccggatcttgtgataagaaccggaggaggagatcggctgagtaacttcatgacgtggcaaacttcgaggtctcttcttcacagaacggaggctctttggccggagttagggctctggcatttggtttgggcaattcttaaattccaaagaatgcaagattacttgacgaagaagaaaaagctcgattagatagtttctaaagttaaaccctgcaggaaagaacttttaactctttattacgtttaatttacgtgtttctatgactggaaacgagaaagctcacaagcaaatcttttttattatgtattggatccgtataacaaacacgaatatacaaaacatcgatactcgttggattgaacgatgctaaaacactataattagaggctcaatttaaacacaatttggtaaacatatgtaaacaatctttaaagatttagtacttcgccactccaggaccaggttttgtttggaacctgcagacataacagagaaggagtttggtacttgtcttctccacccatcattggtgtatcttgagtactaacaatcagagacattttttcagacacaagcttggtgaatccgtgatgtatctttagcatttcaccaacccatctcatgggttacctcatgtatgctactctggtcggatttcgtgtagccttgtagggcaagactgagtcgtgttcttgccccgccaccgtcttcaaaatagttcaaaacatgttcaaccatttgtgcattcgaacttagaatagtagaagagtctttagagttaaataatctggtccaaaaccaataaaatcctgtgcagaagttaattttttgataaccattattttcatttttcagtgtttaagtacctaacatatttttttatctttatttaaactaaacaaatttgagcaagataataatttgaaagtacttagataaaggaaaaaaaaatatggcctttcttagttcttacagtaaaaaaaaaacaaaaaagtgaatatatactaattttgaaatatcttaaccggatctagacaatacatatttgattaaatcaagaataaagtcattaatcacactaatcacccattttctccctccccctaaaaaccagccgtatcatatgctcattccatttgcattccctccaaaaagaaaaaaaaaaacttcattccttttgtttataactttatattcattcattcacttacaacaaaaccaaaaaccccaaacttcttgattctcccctccgataaccaaaaaatccctattttccgagatgaataatacacgagaagaagtaggggaattcactcaaatcttcaacgctttaatgagtcttatgaggaaatttatattcaaagttctacgcgtcggtccaatccctactaacatttctttcatcatggatggaaaccgtaggttcgccaagaaacgcaatcttgaaggcctagacgcaggacacagagctggtttcatatccgtcaaatatattcttcaatactgcaaagagattggtgtaccgtatgtcacactctacgcatttggtatggacaatttcaagagaggacctgaagaagtcaagtgtgtgatggatctaatgcttgagaaagtcgagctcacgatcgatcaagctgtatcagggaatatgaacggcgtgagaataatctttgccggcgatttgaattcgttaaacgagcgttttagagctgcgacaaagaaactgatggagcttacggaggagaacagagatctgattgttgtggtttgcgttgcttatagcacaagtgtcgagattgttcacgctgttcgagattcttgtgttagaaagagtaaaactggagatggttcttcagctttggagttgagtgatattgaagagtgtatgtatacatcggttgtgccggttccggatcttgtggtaagaaccggaggaggagatcggctgagtaacttcatgacgtggcaaacttctagggcacttcttcatagaacggaggctctttggccggagttagggctatggcatttggtttgggccattctgaaattccagagaatgcaagattacttgcagaagaagaagaagctccactaaatagtttctaagttaaaccctagaatgaacttaaacccttatgtttgattacatgtttcttgtggtgtaagaaacaacgaaccgaaactgagaaaccacaagaaaatcctttttattatgtatgggatacaaaataacaaaaacagacataaaacatcgataattattcaatttaacgatgctaaaacactacaattagaggcttaattaaaagacagtttgataaacaaaaacaaataaatctgatttagtacttagccactccaggaccagttttgccttggaacctgcagacattacagagaggtgagaacagagaaggagtttggtacttgtcttctccacccatcataggcatagggactccggtcttaaccggactaacgtatccaggccgatatgttttccccaaaacgccctcgacaagatcactcaggttaaagaacttaaactgagtctctagatgagcaaaagcatcatctttaggaagctgatacttatgaactctatcttcttctttcccaattggtctaacctgaatatctatctgaacaatcccagataccgtgactctcacgttatttctctcatctgttctctcaacaataacttccctttcgtcaagatcaattctccactctgcttcaccttctgtcgggacttcaacttcttctccgttccatctcaccacgagagagtctacggaatcatcccaagacgcaaccttcttggctgcgatgacgaggttgtgactatcgaacatcactgagaaggcttgaacccatgtgaagtctctggttctaccagcaggtcttgtaccaatgaaatgtgcattgatttgaagattctcgtcagagacgatggcgaagttcccgtctttgtttccgtggaagtagaacatcactccatctcctcccacaaatctcgggtcgtaacacaaagatccataaccgttgcagtttgctttcctccctattcaagaacaaaaatcaaccatattagtaagtgtgttagaaatctaacgttgacaaaatgttacaaatataattgaaaaatacgaaacatgcattatggaacttttaaaatgttccaaaatgttgagattttgagacttacatttgcaggtgacttcacatttgctgctacaatcgatgaaacaagcttttttcttcttgttcatttttggttttctctcggggcattccttaggacaagtgaggattttctggttacacgatcctctagccaagcattgaactcgctcttggcccgagccaagtggatacaaaacattatagttcgttgaagccgcatcataagcacctttcttgagtttcttccctttctctgtagcagaaacagaggaaacagagacaagcacgataatagttacaagaactcgcaacattttgtttgtggttttgaaagaaacagtgttttgttgtatatttctgtggattttgatttgatagaagtggagggagtgttcttatagaccagagaggctggaagtaagcagcagagaccggcttaattgacggtccagagttgatcaaaatcacatgaagaatcgaagaccgtgttagaaacagcttcgactttgtttattaaattctttgggagaaccaccactagcttcaaatattaagttcttgacatgaataattaacaaaaattgaaaatctgcatttctaacagggaaaagtcagccgatagaaaatagagtaaattgtaatataaatcattaaccaaaggtcggctgtaacaattttacaaaaaaaaattaactatatatgttaacatttcctgcttgttaatctaaggacatcattgaattaaatatatacaaatgtgcagttcatctttttcacgaatttgtttccacatttatctctccttgttgtaaataatggtttcacacaattaaaggatgaaaagctaatgacaaccatcgataacggatctatgcattgtattcatgattagaaaacaattcaaaactacgagtggttgcactaactaatcatcattgtggagttgacatttatatattaattccatatactcaatagaaatatgattagatggtattgaagccatgtactcatgtgatgagtaacatagtttaatttccttggatcacatgaactatgcctagaaaattggaaaccttttctttatgcaccaacttatttgattatttaaatctgatttttcctactggtttataagttttagtgaaaagagtgctctcgaagcatctccagttgttcgtgagaacccccaaaaaaacacttgctttcaaagtgaagaatatacaaaatactggaaccaagaaacttaatttcagattcaaatacatgaatatacacacaaatatagttttttttttttttattgttcgataaacggataggtacacaaaatacagcaaaggaacgataagaaatcaaggggttgcttcttgcacaagaaatgttttacatttcttaaaccctcaaaaacatcacaaacaggccaaatgttatctttttggcttttattacatcactttttatgaatataaaatatttccagaaacaaaacagttacaaacacgaaatttccatgaatttatttaaaaatcaaagaagtttccatctttctccttcttctcattagatatcagcagaaagtgattcttcttgaggcttgaacctgcacagtctgcaagtcggcgagaacagagaaggcgtttggtatttgtcttctcctcccaatacaggcattgggactccagtcttggcagagctgacgtaatcaggacggtaggttttccccaaaacaccctcgacgagctcacttaggtctaagaacttgaactgagtctcgagatgggcaaaagcgtcatcctgcggcaactgatagttgtgaactctgttctcttctttccctataggtctcactctgatgtccatctgaacaagatcagagacaagtactcttacgctgtttctctcatcagttctttcgatgatgatatccttcttttgtcctgaaatttccctccattctgattgttcgtcttcagggagtgtgatgagttctccatcatatctgatggtaaaggcgtcagatgtttcatcccattgattcactctgttggctgtgatcacgagcttgtggttttcgaacatgacatttagggcctgaacccatgtgaagtctctggttctcccaacgggtcttgtaccgatgaagtgagcgttaatttggagattgttgtctgaaacaatcgcaaagtttcctcctttggatccgtggaaatagaacatcacaccgtctcctcccacaaatcgagggtcgtagcacagagatccgtaaccattgcagttcgtttttctccctgaaagaaagaggaacccgaaattaagccaagttacttgggttataagtaaacaaattcattgtaccacaaattatcaatccacaactgaaatctatattcttgttacttgtgcgataagctaactgaatatagaacaaaggagaccaattgaatagaatgtacttacatttgcaggtagcttcacatttgttagtgcagtcaatgaagcaacctttggtgttcttgttcttcgtgggcttcctcttgggacactcaccagggcaaacaagagtcttgtagtaacatgatccccgaccttggcacatggcctgctcttgtcctgtaggcaacggtgataatattctgtatctcgcagctgcttcactctcctctttgtctttcttctccttcgcctttctctctttctccttcctctccttctccttcctttccttatccttcttttccttttccagtttatccttcttctccttttccttcctttccttatccttcttctccttttcctccttatcctttttctccttctccttcttgtccttggctgccttctccttgtccttcttctcctgttctttatcctttggaccgttaccgttacttttgccattatctcctttacccttgtctacttgtacctcgttccccttgccattgttaccgttgcctttgccgccatcgctctgtgcaatgacaatatctgtcaagagaagcaatccaatgagcgcgacaagcacatatgactgtctgcgctccatctctcaagttcaagtcttcttctttagcttctgcttgttcttcttcttcttcttcttctttggtttctcaaaatgtttctgtgttttttggtgtgatgagatgttgttgcagaagaagggattatatagaatgggcaaagaattgagttgacttattaaaaccccatatgataatatcccttgcttcatcttaagaaagaagccgactctttgagttcatctcaagtcgtctccattgatttcttaacaaaaatctagcttgatgaagcttcaacatcaagtcttttagctagaaaagagttgtttaatttaaacacaaccatacatataatatcagttcacaaatttttacctagttcttaatgcctcatgatcaaatcatattcatacttgcttcatttgttcccagttgaattatattagcaatttactatgagaaaacagggtgaagttagtattcatttagttgacaaaaaataataaaaaagggtgaaaattttggttatcgatacaataaatttgaaaaatccggtctgtatatctttctatacactatatatacaaatttgaaaattttctctattttctgaagaaaaacaaaattaattcttgatggctttatgtgcaaggaaacgagtatctagaacgtgaggatgccttaaatgaagaagaaagccctcatgtcttaacatatctgtaaatgtgtgcattttaagtaacttttcttgactttcattggcccaaagccgcccactactacaagattgcaccctttcgagaaagcaatgaaaagtcaaacgcgtcaaagtcagctgactggtttactataaaccgggttagcttctaaaccattgaaccaaaaccctaccgagttatactttcagagcatgttctgttctgcctataaacgctgacagttatctaaagcttaattcttggccaaacgacctttcacatttcacaagacatagaccaaattgaatcagcaaaaaagtttgagattcaactgtatatataaagttgtatcaagaaacaagtacatgaatccattaaagagtcttgtgaaactttcttgagtgcaaattgcaaactagcttgcaatttttccaaaacatctttagaaagataaagaatctgacactttctctggtttttattttaagaagtgtgtatcttctctctgttcagttattgaaatataggaagatcaggcttagctggctcgggaccagcacttgtttctccaacagatacaatagtcttactactgcttgaagaagctccttgctcaatctctttcgtcatctttatgaaataactgtgcctgcaaaaaaaatgaaaccggaaagagtaaaaacagaccatatagatcattgctgcaaatatcaaaagatcggggaaaatgttaatcaattaccatcgagtgtctgcagtaagctcgggatgaaaagcagttgctaacaagtttccttgcttcacagcaacaatgacttttgtttcaggaagagcatcttcctgatttatccccaaaaaatgaaaccaacaagaagggattcatacatgtgctcacaaaagagtaatcgtttcatgaaaattagtgcaaaattaagcaaacctcttgaatttgtacggtggagcttgaatacaagaccttgtttgatgggacgggataatccgccaggacttcgacatcaggacctacatcaagaacagctggagcacgtatgaacactcccctgtatgtctctggcccaccttcttgagatgttagttgaggtactaagatatcagcttcaaaactttgaatctacacatcaaaaacaaattcgagaacaatctaagattttcacaacatcttatttgatactaagagtgaatgagaatccatatgaaattactcccattgattcatgaaaagaccgagttttatatatcagtacaccacaactcatgctaatataagcagtttctttttccacatattgcaagtcaagattgatttaaatatgtgtttacacattttcttaacatgaacccggaatcttggtaagagacataacctggctaccgaagaagttcctatgtacggtgcaatcaaggccaccaactaattcctgacctccctctttctgacctaaaatttcaacatttactcaagtttctaaattttccgcaacaggaagatgaattcaagtactcaccaactgctctgtctgccaagaatataagacctgcgcatgtcccccaaacaggtttccccatcttaacaaactcacgtagagccggaaacttcaaaagagcaacaaatgaaagaaaattagaacagagaagagacattttacactattcttcgtcctcaccactaaaactgtaaaaacaaccaaatctaaacaaggagtttggtaaagataaaagtaaatgatagctctccctttcctacacttatcacagcttccattaaagacagaaaatatcatccataagatcaacgagtagtttggtccacaatgtttaaaggtttcagatacaaaacattacttcatgtacttgaaggctaactaatcccaaagttccttcattttcaatctcaaagctaattactttcaacagtactaactgaattattcaggtataagagacgttttgactgaaattctggagaattttggtgaataacgccagattcgtgtcaaaacacacataaaaaaggaacctttaactagtttcttcaagtgggtcctcgcaaacaataactttagattctagagagagaggagcggaccaagttatgatactcggcgagtttggccatggtggtgctctcgccgccaggaatgataagagaagaaacggtgagaagctggtcagccttcctaatctcgacgccttggacaccgagccgccgcagagccgcgatgtgctcattgaaagaaccttgcaaagctaaaactccgacggtcattgcggcggcgacggtcaaagaaagagagtgtcagatattattaaacactaaaactttgtgaatggaattgggacactcacaaaagcctttttgtaacagccatcgacgattttgttttgtgtttctttctttgcccacgatttggatttctattcagatattttcttataataacatttttaaatataaagatatcacggtattaataactattgtgaacaaattcaattaaaaagccataaacaattatgctaacaaaacaaaaatatacacttattaagcttttatgtgattataattcaaattctctaggaaaaattgtaatctattttacaaaattttaaagatgatgatataatattatatatacacacaaaaaaaaacttatagtaaaggtaggttttcaaaaactcataatgtgtttttttttattagtagtaattttattgttttctaaccactgaatttagtttatagcatgttttgtcacattagctggtgatgatttaatataaaactactttttataaaagtaattgacaaaacaaaaaatataaaccccaaaaaaaaaaaaacagaagggggagagaatctcgatcaaaggcttcgaagctctctcttttttttttggtgtgtctaaatctctcacgcacgacgttgagagagctctttcctttgcgatcttgttgtcttcctctgctccgatcgaattcacaaccagctttaatgtatgattctcgctcttaccttcagtttatgttccgaatcttctcatgaaatttccattgcatccgatttcgaaattaggtttttttttttcaattttcaaaattttggtttgtgatttatgtgattttgaagccaccttcttgggggttcttaagtttgctgtagaattttattgttcttctctccgtctttgtttctttgcttagagttgactatttggattgaaaaagtttacacctttacgcctgaatcataatacccacaatgtgattgacttatctacacaagcttttgaatttgatgagaatttgaccttttcttttttcgcagaagcattgtagttcaacttgaatttattggcggttgttgaagctgtgtagctattaacaattggggctatgcattcaacgattttctgctcgtgaagaaggaatataacttatttataaggtttcagtcttagacatgtcgtgtttcgattgcagtggttatgatgtctcaagttgtcttattcatctcgctgaatggcatcctttggaatagtcaagttctccgggcttgaagccctcgaaaccccttttatcgcggggtaagatttcgatttctacagaggttcttgtgtttaattatttggatgcttaatgttgatgtcacttttttttttgtgtgcaggttcctcagttaacttgaggattttatatttcatcatacatttgaggagcaatttgtttttttattttatttttgagaaggagatcatgtttcgtgatagttttttgtttgcccgtaccatcggttgctttggatgctttggcagttctggtagtagaaaccaacaatcgcctaagccctacgatgatgatacacattcctgtgatagtgatgtaactagcactgcaagaggagaagaagaagaagatgaagaagaagtagagcagaagagccgctctaaacgatctgaggaaattttgaaatatagattagataatggattaatctgcagacacattccagtgagagaaactaatgaacttatacgtggagaggtaagtgacttctggtgcctgtctctcagattattgcttctttgaatatcccatggcgtgtctataccaattttgttgttttttgatatttaggatgaaaatggtgacaagacaatcaatgagtatgttcgcgtgtgtaaaattggatccggtagctatggtaaagtggtaagtgggaatcttatttactcaatactatccaatcctttaagtgtatcctccataagtattccgggttttggattccataacattatgtttatcattcacaacaggttttatatcgaagcactttagacggccagtattatgctatcaaggtaagctcttctttctttccctcattacctcgtgaaacctttttcttttttgtttagctgatattacgatgatctgatccttaattatggtgcaaattatgcaagttactttgacatattatgatttaatacttggatttccaggcatttcacaagtcgcatttattaaggctaagggtggcaccgtcagagactgctatgagtgatgttcttcgtgaggtatccttagtttttttgcattgctgaacagcatttctattggtttcattttagagaagttatgtttatgctcatttatcctataacttacaggttatgattatgaaaattttggagcatcctaacatcgttaacctcattgaggtgatagatgaccctgaaactgatcatttttacatgggtacttaatctcctttctcttttctactgttttgatatatactctctgtggaaagagcctttaatcttataatgcctgtctttctggcttctcctagttcttgaatacgttgatggaaaatgggtgtatgacggttctggaccgccgggtgctctcggagagaaaactgctagaaagtatttgcgggatattgttactggactgatgtatcttcatgctcatgtatgatcttcattgtttagcgtgcttctctcacttcatggttcatcacctaatgctgtcttcaaactgtttctatggggaaaaaaacaggatgttattcacggggacattaaacccgacaatttgctggttactagtagcggtacagtgaagataggagatttcagtgtcagccaagttttcaaggtaataaatgatctcttaatttttggtcttcattaattcttgatatgcatcgtgtgatttgagtgttagcatcgatctgttgttgctacaggatgatgacgatcagctgcgccgatctcccgggactcctgtcttcactgctccagaatgttgtttaggtcagtttcctttctaatttctctaagcttggtcctgagtctaagtgaatggagaatcaacgagtatcatttttcttggatgaaaatcagtatcaggtataacgtatagtggcagagctgcggatacatgggcagtgggagttacattgtattgtatgatattgggacaatacccgtttcttgcggatactcttcaggacacctacgacaaggttggttttacatatgatcaatgctttccttggatcttaagaactctttttgaaaatcttttagcctccaatggttcataatctgttttctcttacagattgttaacaaccctctgataatcccggatggattgaatcctcttctcagagatttgatcgaaggtctcctttgcaaaggtgtgatttatttcgttccttttggtgtagttaaactgtacgaagcatagaattgagtctttacgtgtgtatgtacatcaatggcggttttgcagatccgagccagagaatgacactgaagaatgtgtcggagcatccatgggtcattggagaagacgggcatgtcccggagtatttttgttggtgcaaacgcaatgctgcctcaaagattgaagaaggagaagctaatgggatctctgaaacctcagatcctaactaaaaaaactttgatgcttttgatcgttttaagaaatgtacaagctttgaagaatagatgcatctacttaaccgtacaagtttgacctcgcttggggtcattgtttttctttttatttaattctagatcattttcatgttattgtccattgtttataaatttcagaaacaaaatgattttgattctgactttgatattttattttttacaaagggctcgatatctctttcaagtttcaacccaatgagctctcccacatggttgactagtaaattacttagactaagatattgttttactgttgttccaaaaaaaaaaaaaaaaaaaagatattgtttcactaaattgtaattaactttaaagttatcgttatatttagacatgccattacacatttacactaagagaaatagagcagtagagaattatatctaatatttgtttctatacaaactacatgaaatgaatgataattataattttgttttgattttttcccttttggttattattaattataaaatgtgaatattttttaccattatataattttatttttatgcaataatttaaaagctaagatatgtaactgtgaatatttcataattactcaaaattttattatttatcactcaaatgataaaaaatgtgaatatctattattaattactaagatatgcaactttaaaagctaagacaatttcataattactcaaatttctaaccataaaagctaaaaccacaacatgagaaaaaaacacactataaagcaaccattattagttctcagtttattcaaccaaaaagtatttcatattaaacttatataatagaaaaatcatcaaaaagtgatgtcgtcgaaaattaaatttgtagctcttctcatcgtagtaatttctctccttcttaacaatgcgcaatccactcgagagatcctctccgcggaaatttgtggatggaatgaccctgctgtacattgtaagacaaaagaagattgttttgagaaatgtggaggcagacctgctaagaaagttttttgtgtgcgtccaggagaccatagctatgatcgtctgtgttgttgtcgcgcttaacatgtaatttaactgagatcttgttttactaaatttcagtatattttatccaaccgttactgaagcttttgcttctgttcaatatataatgactgaagctaactttggttggacaataaattattaagttattaaaatataatacgttttttctacacattttctctcaatttctttctgaatatgttttactatatttgtgtgtttttgtgtatgtgtgtgtgtgtgtgtgtgataataacatgtagtaagaaccatcagctcttagtttattcatgcattggatcaaagatagttcatatcaacttgtaaagtaaaaagttcatcgaaaaatggtgtcctcgaagattcaatttgttgctcttctcattattctttctctccttattaacatgtgcaatcgattcgtgagatctctttcatctttattttcatttaacaaaaaaatagtactagtgtctataattcataacaaaacacgattctgatttcaaaggaccatgtcaaacaaaacaagattgttttccaatcccttatggagatgcttgtgtgtgtgtgttgtgtcccaatgtaatttgattgagatacgttttttctttctttcttttcttatgctaaagtgattaaaatactgtttatattaaaattagataaggcccgcctaaataggcgggtgtaagatgtaaatgtaatttttatcgataatatttaaattttgaatagtaaaataataatcgatacattgttcttgataaataattttgaatagtaaaatagtagtcttatgaattttattttgttatacccattcaatcttattgatgatatttgaagtctaaatagtaacctacacactttttctttattataatttagtatttagaagaaaaaaataattttttatcttatacattcaattttctaatacaatttaactatctatttcataaaaaactcgattttaattttacacacttcatcttacttgataatgatttcatgtcaaaataatatatatatatgagatcaaatctatatcttagttaatattaaaaattattaacaattaacaaaacataattcataataataaaacatttgttaataccatatatattaaaaatttgaccaataacatatataattttttttgatgatatttgaagtctaaatagtaacctacacactttttctttattataatttagtatttagaagaaaaaaataattttttatcttatacattcaattttctaatacaatttaactatctatttcataaaaaactcgattttaattctacacacttcatcttacttgataatgatttcatgtcaaaataatatatatatatatatgagatcaaatctatatcttagttaatattaaaaattattaacaattaacaaaacataattcataataataaaacatttgttaataccatatatattaaaaatttgaccaataacatatataattttttttgatgatatttgaagtctaaatagtaacctacacactttttctttattataatttagtatttagaagaaaaaaataattttttatcttatacattcaattttctaatacaattaactatctatttcataaaaaactcgattttaattctacacacttcatcttacttgataatgatttcatgtcaaaataatatatatatatatatatgagatcaaatctatatcttagttaatattaaaaattattaacaattaacaaaacataattcataataataaaacatttgttaataccatatatattaaaaatttgaccaataacatatataatttttttttttgttaattttccttttggttaagaaaaataaaatgtaatattttttagatatagacatatgaattagtatatgttaataatgatttattttttagttttctatttctttaagaagaaaaaagttaattgatttctttttaagtatttctatttctttaagaagaaaaaagttaattattttcttacacatgtcaacatctgattgatagatttgacacatgacataatcctatgagttagtaactttgaaaaccatactttatataataagattaattattaatatataatatttcttatattttcgtcaattagatgtccaagagaaattctatagaatggaaatttatagtagtatgggcgaaatcataaaaacatatataaaagagatgataatttatagtagtaagacaaattagtgttcttgtcaaacaacaaaagagatgaatattcttttatgttctttatattagttacgaattcccaaaaaatattaaccatcaaaatttgggcttagtttcggcattcaaagtccaaactaagcccaaaacgaaattattttacaaaattactcaaaaagaaaatagaaaaaaaaaacacttgtttcattataaatactttacataaaacgagtgtgggcgatcaaagtccgagaaccctaatttatatttgaaacaatgacgatgatgagcgatctttcggaggatttggtagaggagatattgtgtagggtttcgataacttctctaggagcagtgagatccacgtgcaaaggatggtatgttttatccaaaactagggttctatgtaaagcagaaacaaagcatcagtttctagggttcatgaagaagaattataagctttgctcaatgaggtttgatctccatggaaacttcaacgaagaaggaggtgaagaattcatgaatccatcaataaagaagtcaggtaatttacttgatcaacttgatatatgtaaagtttttcaatgcgacgggttattgttatgcgtgaccaaagaggaaaacactaggctcgtggtatggaacccttattcgggtcaaatcaggtggatcaaatgcaataactcttaccacagatacgaaggttatgctatcggatacaacaataaccgtaaacacaaaatcttgaggttttcggatatgtcattttctacttacaaaatctacgattttatctctaattcatggagggttcttgatattgctcccaactggcatataaaccctgatcaacgtggcgcgtctttgaaagggaacacttacttttttgctagggaaaaaagagaggatgaagaggatgaagatattctttggcagccggtagagtatttactctgttttgattttacaacggagaactttggtcagcttcatcctttaccgtttgagcaatatattgacgacgctggagctctctcttcttttggagaggagaaactcgcggcgttatttcagagcttcgctagttcagttgtggagatttgggttacaagtatgattgaggccaatgcagtgtcgtggatccctttcttaaaagttgatatgaaaccacactgtagttttcgttttcgtttgccctttgacggtggcagtttcttcattgacgaggagaagaaagtcgccgtggttattcatgttgatgttgtcgccgaatctgaaatgaaccgctacgaggacgtagcttacatcattggagagaatgggtacgttaaaaaagtgtgtcttgtagaagctgtgaatcaaggaggatctctcaacttgagcaaacgttcgtgttgtaattacccgcatgtgtgttgtagctcttatgttccaagtttagcacagatcaaccaaagtgtagaattcgaaaatgaaagagaagaagaggaagcgaactaacaagcacaaagaagaagacttataactattagctaaattatattataatagcctattttcttcatgtgctcttcatcgtggaggctctttacttttataagatatatataataaagatcgatcatctctttgatttcaaaagatgttgaaaggcatttcatttctagcgaggtgaaaatgttctatcaaacacttttcttctccaagatcgtgtattgttctcgccaacactaactaatgacttggaaatcaaggtaaacgagatagtgactcttgcaattaccttgagaagaccccctgaagaacctttaacagccccgtaagtgctcgttttctctaaccagaagcgtgagtcttgttattcagcagcaactggaatcaaaggaacgtacaagtttgagctaccgaatctctttggctcttttttttttttttttttttctttctgttattgttgatcaaaacaagttccacaattcttcgcaaattagacaatctatgttttggggaaaaatgtaaatatctaaaagtttaggattagaatgaaagacactattaattttatttttaaaaaagttttatggaagagacattaatacaaaagcttcttgtctcttgtttggcttcttcacttgtttatattacccaaccctacctttcttcttcttcttcttctctttttaccattttttcagtttctggctgttcccagtccactctctctcttctctctttctttctctaccttttgactccatgccggtctccggtgaaattttcaacgggtaataatttccggggattgacccgagacaacaagatctaaatctatctacccattggagttttcttaggtaagcttggagattattagtcttcgttttttattgcatggtttattcattcgcttatgtttgtatgatcctgctttttggatctgtgcgcattttccaatttcagaatttttgataaggatctttggggtttatggtatcagattcggatctactttctcttgttcataatcatatggtagatttgactttggcttcggatttgaggatcgatctcatgtttaatctgaaatgatttctatttcgatcggagaagaagaaagaaaggaacgattttttgtgacatttatttctgttttttgattggttaaaagttttccagattctgacatcgattttagtatttattacagattcttaatttgggttttgcatcggagctacaagattatcattcatctttggaaactcattggtttgggtaaatgaaagatttgatgatcatgttcttcttatattgttttgattgattgaagattcgatggataagataataaagagatggagattgttttggagcaacggtcgaaatcagtgtccagatactgggacaagagttgcccaattaagaaagacttgtctttgatacttacagaagaagaagaagaagagtcttgacaaaatttgttgtttgtattgaaatagttgtttttgtgttgtggttggattctttgtattatacattaatggctgcggaagagcattcgaataagagaagagaagtctctgcttctgcttctgcttctgcttctgcttctgtagttgtgaatttgagggtaggagaggaggataacgatggtcatcgcctcaggttgggatctagtgactcagttctccctggtcttatcgatgacgttgctcttaactgtcttgcttgggttccaaggtcagattatccttccttgtcatgtgtaaacaagaagtacaataagttgatcaacagtggtcatttgtttgctttgagaaaggaattggggatagtggagtatcttgttttcatggtttgtgatccgagaggttggttgatgttttctcctatgaaaaagaaatggatggtgttacctaaaatgccctgtgacgagtgcttcaaccacgcggataaagagtctttggctgtagatgacgagcttttggtcttcgggagagagttgtttcagtttgcgatttggaaatacagtttgaggtctcggtgttgggtcaaatgcgaaggaatgcatcgtcctcgctgcttgtttgcatcgggaagcctcggtgggattgctatagttgcgggaggaactgatatgaatgggaatatactagcatcagctgagctttatgattcttcgtcagggagatgggagatgcttcccaatatgcattcacctcgaagactatgctcgggttttttcatggatggtaagttttatgtgattggaggcatgtcgagccctaatgtatcagtcacttttggagaggagtttgatcttgagacaaggaaatggaggaagatagaaggaatgtatccgaatgtgaaccgagcagcacaggctccaccacttgttgtagtggttaacaacgagctattcacgcttgagtactcaaccaatatggttaagaagtatgataaggtgaagaacaaatgggaagtgatgggaaggttaccgccgatggtggactcgtcaaacggttggggactggcgtttaaaccgtgcggggatcaattgttggtgttttgtgggcaacgaggtcctcatggcgagggcattgtggtgaattcttggtgtccgaaatcgggagctaaagatggaaacttggattggaaagtgcttggagttaaagagaatgttggtgtgtttgtgtataactgcgcagtgatgggttgctaaaatggaaaccttctttgttgttggtcttcttcttctctattgactggtcttttgtttttgctattgggattataatgcttgttgtgtttgttctgcgtttaatttttgtggtatattggaaaaaaatgaagagaaaattcatttactatgcaagatgtttgcacaatttttactttaaagttcctcatttacttgaatgaaaagagaagaattgtattgttgtgaatagtgaaaatactaaatgtgcgtttttgtagttgtgaaaagtgaaaactagttttaagtcattttcgtaagtgaaagcaataggaggagggctttaaaggaggttcaagatcctatgactaatcttggtcctacacgacccaaagccggaggaagaggagactatgaattaggaatttatgatcatttggtggtattttacaacaaaatcataaatttgtttttgagaatttaatgcagtcaagatttttttattagaaacagtctcgatctatttcaaatagtaggtattacaaaatagtctgaaatttcagtgagctgataaagtattcatgtgatccttatttttgcagtcatcactcatcagtacacatttggaatcttggtttaagtgcaatgtggtacaaggagtacttcagaaatcgtgatttttagtttgttttctttgaaaagtgatatctatgtaaaaaaattgttaaacgacaaaaggaaacataatgtacttgttcagttattaggcctctcaagtcaactactacacctacaaaaatattgtagctattcatatttttagagcccattattaaaaacgggctcttttgatcggatatggacttaaaaactcgacaggtatactagaagacacaagtagagatggcttgtgactttgtaagctatctaaaaaaaaagaggataatgacgcgtcggatctgatggattagattttcgcgtttacacatagcttgtaagtatttacaaatttccaatttggtcatgtagtcccaaagggaccaacctagtatttgcaattttgcatgcgtgaaagttaccatcaaatattatctagtgtcgtgaaaatctatgaaacatatccactatatttatggaaatctgtagtagattgtttaattttcatgtgtttttattttttcttaaaaaaatgctttagagctgatggaaactatcacaaaacaataactcatcctatcttaaaaagtctaagcactaaaatgctactgtaataattatggatagtgcgataatgtttaataaacgatcatgtgacatactcttcattcttcaagaatgtagtataatttaagattttccaaaacccacttaggtcattgttaatgtgcgtaggcatttaagtctacttattctaaagaatcttctagttgattctttctccctaacaatgtgggtcttcgagcttggcctctcatgtatgggtaagtcgtacataagtgcaacacacacactttattttgtatgggtaaattcatgattcatgtacctgccataagtgcaaaactgtgtatgatttaagccctacattaccaggaggtggcttaagtcaatatatgtatcatataggattatgtgtgatttgacataatagcatttcagagaaatcttaacataatatatacatgatttggttctaaacttataaattataagacatgctaaaagaagcttattatggtacatttaaacataatcctataaccacaacaaaaaaggataataatgaacctacaatgatgtagagcgagcgagattgcctaccaatatgcttttgctttgcccatttgtgtcggcaaattctggttggtttggatcactttggtatgatgctactttcacgtaatcagtaggtttggccattcagatataaaaacatccatatctgaatacttgatttagttcatttttcttttcatgcatagccggaaatatatcgttaatagattttttgtaaactaaatagaaatttgtttctacagtgataaaataaattttctttaagcttcatgaaattttcaaaaaattattcaatattttagatgttgtacgcttgctactgtagagtattattttgtgtccataactattttaacaatattataaatgagtgagaatacgaatggagagaaacgaaaatcttcaatagataaagattggctggttttgaattctagtcaaaaattagctttattgctgagtgattactcctacaatggttttaaaagcagagattcttcgtaagaagcaaaatatgtaaacgaaagtcacttttattttgggcatcgttctaaagccaaattcaaataaaatatcgacatttctccttcctttgaaatcagcatttacaaaaacgtttgtagaaacacacaaaacatgactaattttgttttcaaaggctatatatgtttgtggctattcattatcaaagatatataagcggtcaccaaaagaattttgcaggtcgaaatgtacttcatatatcataaatgattaaaagtgataactaatcatttttactagcctgaattgaagattattgcaagaaaactttttgtgcaagggaatactaaatttggtaatcttttttatatataataaattaactcgccgttaaaataaaaataaaaaataactcagtaaatttgtattagagagagctatttcagcttggagtatatattgacatggattaatgaaaacaaaagggtaaaagaattgtcaaacgacagcatatttatcattcaagtactcatcgtatagaataattatataacgtattatctgcgccacctaactaagcacaaacttcacgcatgatcgtgatgtatgaaaattccgatctctaagtactaattaacatcaaacaagcttttgttaaacctaatgcatcactagcaactttaatgttataaatatcataatttcttacataaaatactaatatgattcatgccaaaagttatctaattcatatatcatgcgcttggaataatataaatattttcacaacacactttcgtgattgttacgaacatagatcaaacagaaaattcaacatcaaacaaagaaagaatattgaccaaagaaaattgagtatttttggaaaataaatttggtaggaagataagtgggtgaacaaaaatgaagtagatataaattacaaagtgatttaacaatgacataaatgaagtaatatcactaagaatgtttttgcaatattaaaaaaaaaaactttggatattataggaattaggttaatccgcctaataaatgtttggtccaagtccaactaatccaaaactatgttaaattgtaatttaaatttgatacatcaaaacctgtttttggaaattaacctttttcgtcaaaacaagtttctttttggaaaccgttacacggttctggtgattaatagacatgggaactagaatccaaaatgcaggtgttacatcaaacttaagtgatatcaaaaaaagcaaatttcaaaaagagaagaaaaccactaaatcactatgatagtacacatgtcacacattcacaactatgtccaaaatataaattacataatttcgttcatcttatcaaattctgccgcgccgcatcatataacacgcagcatacactatagtgccttttcccaaaaacatactatagtttatttataactagattacatttgataatttgtgataaatattgtgtcaaattggtaggattatgttaatgatattgcttagtagaaaacagttgtatctttttagccttttaggcaagaagatgatgaaaatatgagagaattgagcggtaggcccatctctcttctgttcataaatgagaatcatgctttactctctctccctttttctcattcttcttcttcttccccatttacagcccaattccactatcttcctcatcatcataaattcataatactattgcactaatctcgagaagataaagagacaacaaacacctctctatctctctctttcttttttctttcttccgtttcaaagtttcttccttttgggcgggttttaaggaaattttggaatttctctctttttggagacgtttctttaatttctgggcttcttctagttgtgggttttgttttctacttgtagctactgtgtcacgcttttctctagcgaatactttgatgcttcttcatgactctttaacaagattattctgagcttttcctctggccttctaattattaaagtcttcctttttatctattgttaaggtttggcttcgttgtctcttcctcttacctctgctttttggttcagagtatttgaattttggggaatattaaaaattgcctgatactgaaatcaatctcttgctgtctagtgatggctactgaagagaagcctcttaattctcttgatttaagccatgatgattcttcccctgcttcaaatcaggtacatataacaaaatttatgtatgtttatgcaaagtattgatctatggtttcaaagatttgaacttcgaatgaattagatgcgtctcttgaatggaattgaaaatattagagtttttgttgtgctacttacttgccaaaaattgcttgtcatgtttggaaaaattcaggcttttggaacctaaatctctgattagtgttgttagtttcatccaagggattacttttcttaaggaattgaggtgttgtttgaattctcatagaactcttttgttacttttcctctttgttcttgatgagaaggctgaaggatcatctgctataactgaagacacttctgcgaatgttcaacaatggaggcgaaagaatctctctttacagataccctctagagcagctggtctctctcctgaagattcggttgttatcaaaatgcctccaacgcctagtccaactccaagaagagtcaactttgctttgacttcgagttctccaggtcctactcctacttcttcttctgttcttcctcgtggcaaatcgtccctgaagaatctattgccaaaagctgggtgtaaaccaaaaacctctaacactgatatcgagaagggacaagggaatgcctgttctcctcctgcatcgcaggagaaggcttcgatatcgaggtcattatcactttcaaagctatttacacctaggatcaagagaacttcgtccctacctgtgactcctgttattctttcaaactcagagtcagctcacggaggaaccagtgttgctcctcaaactccaaacgtaagctttctcttgtatcatttcagagaaccttatgattgtttaggtacttatacttggcattgcagagaaaagggagtgtacacatagctcgctctcgctctgtgccccttaacgacaaggaattaagcctgaagggaatggattcatttttcagagtaattccttcgactcctcgtgttaaggaaggagacgttttctcaaatgcatcagaggctggtaatactggtaagttcatatttcaatcggttttatggtttctttttttccgagatatttatttttactggacacgacaaatctatcttaatgtattgtacagaaacaggtgatgctgatggagaagacatacctgaggatgaagcagtttgtaggatttgtttggtagagctctgtgaaggaggagaaaccttaaaaatggagtgtagttgcaaaggcgaacttgctcttgcccacaaagattgtgctcttaaatggttcaccataaagggtaacaagacttgtgaggtgtgtaaacaagaagttaagaacttacctgtaacactcttacgcatccaaagccttcgaaattctggtgttcctcagctagatgtctctggctataggtaaaaatactcttcatttcacattcttgtacaaattttctgcaagatttgaacctcagagagtattcaaactttcttttggttaaatagtaaacttcacctaaatctctgtataatttcccgacagggtgtggcaggaggtaccggttctagtaatcatcagcatgctcgcttacttctgcttcctcgagcagctcctggtaatccgtctctactgtttataacaacaaccagcatccggatttagacatacatatacagactataacagtaagttccatttgtaggttgagaatatgggtacaggtgccatcgctatatcactgccgttttcttgtattcttggtcttcttgcatccatgaccgcatcaaccatgggtaggtcgtcttttagaaaatactctttgcaatgtgctcctccactctgacccgttttcagttctggaatattcctatgcagtaatgagaagatttgtctggatttacgcatctgtccagtttgcgttggtcgttctcttcgcccatatattttactctgtggttagtgctcttcaacgcatctttttttccttcccttgtgagacacatattggttagacgttgtgagcttttggttaaattttagcaacaaaacgttgtgagacatagaaatgcaacctttatcatatgatagtctataaaatcaacatttttgttgctaaaattcgatctctcggtggtaacaggtgaagttgcaaccagttctgtcagttcttctgtcaacatttgctggatttggtgtatgcatatgcggaagttcagtgatggttgagtttgtgagatggagacgaagatggcgagccagaaggctagagcaacagctgaaccatgctttgactctgtcacaaccgccgcaaccactggatccaacaacctctctgcatcattcaaatacctcatagagagccaagaagtggacagatgattttacatttatacagtgtagtttggttaatgtttatgtaatgatttgtataaaagaaaaagagaaagt
